United States Patent Application Publication US 2021/0170017 A1 - sequence listing, part 12

SEQ ID NO: 16863 - RNA, 1931 nt, Artificial Sequence
  mRNA product Design i-1 comprising derived and/or modified sequence from HRSV(Memphis-37)__AIY60640.1__F-del_DSCav1_mut4 (opt3)
gggagagggcgcuuggcuugcaaggacccugagcugcggcauugaagcacacccaacccaacucgacugaagucagccucacugaaccggaucugagaaucuucucucucugggcuugccagggcucuccgaaccuagcuagcauccucuucaauuccaacuagaaagcuuaccauggagcugcccauccucaagaccaacgccauuacaacuauacuugcugcagugacgcugugcuucgccagcucccagaauaucaccgaagaguuuuaccaaucuacauguucagcggucaguaaaggcuauuugagcgcuuuaagaacugggugguacaccuccguuauuacaaucgaacugucuaacauuaaggagaauaaaugcaacggaaccgacgccaaggugaaacuaaucaagcaggaacucgauaaguauaaaaaugcaguaacugagcugcagcuucugaugcagucgaccccugccgcugguucaggcagcgcaauauguagugggaucgccgugugcaaggucuugcaccucgagggagaagugaacaaaauuaagaaugcucugcuguccacaaacaaagccguugugucucucagcaauggcgucuccguguuaacguucaagguacuggaccuuaagaacuacaucgauaaacaauugcugccaauucuaaauaagcagucauguaguaucagcaacauagagacuguuauugaauuucagcagaaaaauaacaggcuccuggagaucacccgggaguucucugugaaugcgggugucacaacuccgguguccaccuauaugcuuacaaacucagaacuguugagccucauuaacgacaugcccaucaccaaugaucaaaagaaacugaugaguaacaaugugcagaucguccgccagcagucuuacuccauuaugugcauaaucaaggaggaaguuuuagcauaugugguacaacugccucucuacggggugauugacacgccauguuggaaacuucauacuagcccccugugcacaaccaacacuaaggagggaucgaauaucuguuugacacgaaccgaucguggcugguacugcgacaacgccggcucugucuccuuuuucccucaggcugaaacguguaaggugcagucaaauagaguguuuugcgauaccaugaacaguagaacacugccaagcgaggugaaucucugcaacauagacauuuucaaucccaaauaugauuguaagaucaugacuuccaaaaccgacgucucuagcucagugaucacaagucugggggccauuguauccugcuacggaaagacuaaauguaccgcaagcaacaagaauagggguaucauuaagacauuuucuaacggcugcgauuauguuucaaauaaagggguggacaccgucagugugggaaacacucuuuacugugucaacaagcaagagggcaaaagccuguaugugaagggugaaccuauaaucaauuucuacgacccauugguuuuuccguccgaugaguucgacgcuucuauuucgcagguuaacgagaaaaucaaucagagccucgccuuuauccggaaguccgaugaacuguuacacaacguaaaugucgggaagucaacgacaaacauuaugauaaccacuaucauuaucgugauuaucguuauacugcuacuccugaucgcggugggacuuuucuuguauugcaaagcccgcugaggacuaguguccaccugucccuccugggcugcuggauugucucguuuuccugccaaauaaacaggaucagcgcuuuacagaucuaaaaaaaaaaaaaaaaaaaaaaaaaaaaaaaaaaaaaaaaaaaaaaaaaaaaaaaaaaaaaaaaugcaucccccccccccccccccccccccccccccccaaaggcucuuuucagagccaccagaauu

SEQ ID NO: 16864 - RNA, 1931 nt, Artificial Sequence
  mRNA product Design i-1 comprising derived and/or modified sequence from HRSV(Memphis-37)__AIY60640.1__F-del_DSCav1_mut4 (opt4)
gggagagggcgcuuggcuugcaaggacccugagcugcggcauugaagcacacccaacccaacucgacugaagucagccucacugaaccggaucugagaaucuucucucucugggcuugccagggcucuccgaaccuagcuagcauccucuucaauuccaacuagaaagcuuaccauggagcugcccauccugaagaccaacgccaucaccaccauccuggccgccgugacccugugcuucgccagcagccagaacaucaccgaggaguucuaccagagcaccugcagcgccgugagcaagggcuaccugagcgcccugagaaccggcugguacaccagcgugaucaccaucgagcugagcaacaucaaggagaacaagugcaacggcaccgacgccaaggugaagcugaucaagcaggagcuggacaaguacaagaacgccgugaccgagcugcagcugcugaugcagagcacccccgccgccggcagcggcagcgccaucugcagcggcaucgccgugugcaaggugcugcaccuggagggcgaggugaacaagaucaagaacgcccugcugagcaccaacaaggccguggugagccugagcaacggcgugagcgugcugaccuucaaggugcuggaccugaagaacuacaucgacaagcagcugcugcccauccugaacaagcagagcugcagcaucagcaacaucgagaccgugaucgaguuccagcagaagaacaacagacugcuggagaucaccagagaguucagcgugaacgccggcgugaccacccccgugagcaccuacaugcugaccaacagcgagcugcugagccugaucaacgacaugcccaucaccaacgaccagaagaagcugaugagcaacaacgugcagaucgugagacagcagagcuacagcaucaugugcaucaucaaggaggaggugcuggccuacguggugcagcugccccuguacggcgugaucgacacccccugcuggaagcugcacaccagcccccugugcaccaccaacaccaaggagggcagcaacaucugccugaccagaaccgacagaggcugguacugcgacaacgccggcagcgugagcuucuucccccaggccgagaccugcaaggugcagagcaacagaguguucugcgacaccaugaacagcagaacccugcccagcgaggugaaccugugcaacaucgacaucuucaaccccaaguacgacugcaagaucaugaccagcaagaccgacgugagcagcagcgugaucaccagccugggcgccaucgugagcugcuacggcaagaccaagugcaccgccagcaacaagaacagaggcaucaucaagaccuucagcaacggcugcgacuacgugagcaacaagggcguggacaccgugagcgugggcaacacccuguacugcgugaacaagcaggagggcaagagccuguacgugaagggcgagcccaucaucaacuucuacgacccccugguguuccccagcgacgaguucgacgccagcaucagccaggugaacgagaagaucaaccagagccuggccuucaucagaaagagcgacgagcugcugcacaacgugaacgugggcaagagcaccaccaacaucaugaucaccaccaucaucaucgugaucaucgugauccugcugcugcugaucgccgugggccuguuccuguacugcaaggccagaugaggacuaguguccaccugucccuccugggcugcuggauugucucguuuuccugccaaauaaacaggaucagcgcuuuacagaucuaaaaaaaaaaaaaaaaaaaaaaaaaaaaaaaaaaaaaaaaaaaaaaaaaaaaaaaaaaaaaaaaugcaucccccccccccccccccccccccccccccccaaaggcucuuuucagagccaccagaauu

SEQ ID NO: 16865 - RNA, 1931 nt, Artificial Sequence
  mRNA product Design i-1 comprising derived and/or modified sequence from HRSV(Memphis-37)__AIY60640.1__F-del_DSCav1_mut4 (opt5)
gggagagggcgcuuggcuugcaaggacccugagcugcggcauugaagcacacccaacccaacucgacugaagucagccucacugaaccggaucugagaaucuucucucucugggcuugccagggcucuccgaaccuagcuagcauccucuucaauuccaacuagaaagcuuaccauggagcugcccauccucaagaccaacgccauuacaacgauccuggcugccgugacccuuugcuucgcgagcucccagaauauuacagaagaguuuuaccaaucuaccuguagcgcugucuccaaaggcuaucugucugcccucagaacagggugguacaccagcguuaucacaauugaacuguccaacaucaaggagaauaaaugcaacggaaccgacgccaaggugaaacuuaucaagcaggaacuggauaaguauaaaaaugcugugacggagcuccagcugcugaugcagucuaccccugccgcuggcagcggguccgccauuuguagcggaaucgcggucugcaaggugcuccaccuggagggcgaaguuaacaaaauuaagaaugcccuucugucuacaaacaaagcuguggucucccucagcaauggggugucuguucugaccuucaaggugcuugaccugaagaacuacaucgauaaacaacuccugccgauucugaauaagcaguccuguagcaucucuaacauugagacagucaucgaauuucagcagaaaaauaaccggcuccuggagaucacccgcgaguucuccgugaaugccggagugacgacacccgucagcaccuauaugcuuacaaacuccgaacugcucucucugauuaacgacaugccuaucaccaaugaucaaaagaaacuuaugagcaacaauguucagauugugagacagcaguccuacagcaucaugugcauuaucaaggaggaagugcuggcuuaugucgugcaacucccccuguacggcguuaucgacaccccuuguuggaaacugcauacaucuccccucugcacgaccaacacaaaggagggcuccaauauuugucugacccggacagaucgcgggugguacugcgacaacgccggaagcgugagcuuuuucccucaggcggaaaccuguaagguccagucuaauagaguguuuugcgauacgaugaacuccagaacacugccgucugagguuaaucucugcaacaucgacauuuucaaucccaaauaugauuguaagaucaugaccagcaaaaccgacguguccagcucugucauuacaucccugggcgccaucgugagcugcuacgggaagaccaaauguacagcuucuaacaagaaucggggaaucauuaagacguuuuccaacggcugcgauuaugucagcaauaaagggguggacaccguuuccgugggaaacacacuuuacugugucaacaagcaagagggcaaaucucuguaugugaagggcgaaccuaucauuaauuucuacgacccccucguuuuuccuagcgaugaguucgacgccuccaucucucaggugaacgaaaagauuaaucagagccuggcuuuuauccgcaaguccgaugagcugcuccacaacgucaauguggggaaaagcaccacaaacauuaugaucaccacgaucauuaucgugauuaucguuauucugcuucugcucaucgccgucggacuguuccuguauugcaaagccagaugaggacuaguguccaccugucccuccugggcugcuggauugucucguuuuccugccaaauaaacaggaucagcgcuuuacagaucuaaaaaaaaaaaaaaaaaaaaaaaaaaaaaaaaaaaaaaaaaaaaaaaaaaaaaaaaaaaaaaaaugcaucccccccccccccccccccccccccccccccaaaggcucuuuucagagccaccagaauu

SEQ ID NO: 16866 - RNA, 1931 nt, Artificial Sequence
  mRNA product Design i-1 comprising derived and/or modified sequence from HRSV(Memphis-37)__AIY60640.1__F-del_DSCav1_mut4 (opt6)
gggagagggcgcuuggcuugcaaggacccugagcugcggcauugaagcacacccaacccaacucgacugaagucagccucacugaaccggaucugagaaucuucucucucugggcuugccagggcucuccgaaccuagcuagcauccucuucaauuccaacuagaaagcuuaccauggaacuaccaauacucaaaacaaacgcaauaacaacuauacuagccgcaguuacacucugcuucgcuucaucacaaaauaucacagaagaauuuuaccaaucuacauguucagcuguauccaaagguuaccuuucagcacuacgaacaggaugguauaccucaguaaucaccaucgaacucucgaacauaaaagaaaacaaauguaacggaaccgaugcuaaagucaagcucauaaaacaagaacuagacaaauacaaaaacgcaguaaccgaacuacaacuacuuaugcaaucaacaccagcugcaggcucaggcucagcaaucugcucaggcauagcuguaugcaaaguacuacaucuagaaggagaaguaaacaaaauaaaaaacgcauuauuaucaacaaauaaagcaguaguaucacuaucaaauggaguaucaguacucacauucaaaguacuagaucuaaaaaacuacauugacaaacaauuacuaccaauccucaacaaacaaucaugcucaauauccaacauagaaacaguaauagaauuucaacaaaaaaacaaucgacuacuagaaauaacaagagaauuuucagucaaugccggaguuacaacacccguaagcacuuacaugcuaaccaacucagaacuacuaucacuaauaaacgacaugccaauuacaaacgaccaaaaaaaacuaaugucaaauaacguacaaauaguacgucaacaaucauacucaauaaugugcauaauaaaagaagaaguccuagcauacguaguacaauuacccuuauauggcguaauagacacaccaugcuggaaacuacacacauccccacucugcaccaccaacaccaaagaaggcuccaacauaugucuaacccgaaccgacagagguugguauugugauaacgcuggcuccguaucauucuucccacaagcagaaacauguaaaguacaaucaaacagaguauucugcgauacaaugaauagcagaacacuaccaucagaaguaaacuuaugcaacaucgacaucuucaaucccaaauacgacugcaaaauaaugacauccaaaacugacguuucuucaagcguaauaacaucuuuaggagcaauaguauccugcuacggaaaaacuaaaugcacagcauccaauaaaaaccguggaauaauaaaaacauucucaaauggcugcgacuacgucucaaacaaaggcguagacaccguuagugucggaaacacacuauauugcguaaauaaacaagaaggaaaauccuuauacguaaaaggcgaaccaauaauuaacuucuaugacccccucguauuuccauccgaugaauuugacgcaucaaucucgcaaguaaacgaaaaaauaaaccaaagccuagcauucauaagaaaauccgacgaacuacuccacaauguaaauguaggaaaaucaacuaccaacauaaugauuacuacuauaauaauaguaauuauagucaucuuacuacuauuaauagcagucggauuauuccuauacugcaaagcaagauagggacuaguguccaccugucccuccugggcugcuggauugucucguuuuccugccaaauaaacaggaucagcgcuuuacagaucuaaaaaaaaaaaaaaaaaaaaaaaaaaaaaaaaaaaaaaaaaaaaaaaaaaaaaaaaaaaaaaaaugcaucccccccccccccccccccccccccccccccaaaggcucuuuucagagccaccagaauu

SEQ ID NO: 16867 - RNA, 1931 nt, Artificial Sequence
  mRNA product Design i-1 comprising derived and/or modified sequence from HRSV(Memphis-37)__AIY60640.1__F-del_DSCav1_mut4 (opt11)
gggagagggcgcuuggcuugcaaggacccugagcugcggcauugaagcacacccaacccaacucgacugaagucagccucacugaaccggaucugagaaucuucucucucugggcuugccagggcucuccgaaccuagcuagcauccucuucaauuccaacuagaaagcuuaccauggagcuccccauccuaaaaaccaacgccaucaccaccauccucgccgccgucacccuaugcuucgcuucaucacaaaacaucaccgaagaauuuuaccaaucuaccugcuccgccgucuccaaaggauaucucagcgcccuacggaccggcugguacaccuccgucauaaccaucgaacucaguaacaucaaagaaaacaaaugcaacggcaccgacgccaaagucaaacuaaucaaacaagaacuagauaaauacaaaaacgcggucaccgaacuacaacuccuaaugcaaagcacccccgccgccggauccggcuccgccauaugcuccggcauugcugucugcaaaguacuacaccucgagggcgaggucaacaaaaucaaaaacgcacuacucagcacuaauaaagccguaguaucccuaucaaacggugucucagucuuaacauucaaaguacucgaccuaaagaacuacaucgacaaacaacuccuacccauccucaacaagcaguccuguucuaucucaaacaucgaaaccgucaucgaauuucaacaaaagaacaaccgccuccucgaaaucacacgcgaguucuccgucaacgcaggaguaaccacccccgucuccaccuacaugcucacaaacucggaacuccucucacuaaucaacgacaugcccaucaccaacgaccaaaagaaacucaugagcaacaacguucaaaucguccgccaacaaucauacuccaucaugugcauaaucaaagaagaaguccuagcuuacgucguccagcugccccucuacggagucaucgacacgcccugcuggaaacuacacacaagcccccucugcaccaccaacaccaaagaaggcuccaacauaugccucacacggaccgaccgcgguugguacugcgacaacgccggcuccgucuccuucuucccccaagcagaaacuugcaaaguccaauccaaccgcguauucugcgacacaaugaacagcagaacacucccuagcgaagucaaccucugcaacaucgacauauucaaccccaaauacgacugcaaaaucaugacgucaaaaaccgacgucuccagcuccguuaucaccucacucggcgccaucgucagcugcuacggcaaaacuaaaugcaccgccuccaacaaaaaccgcggcaucauuaaaaccuucagcaacggcugcgacuacgucuccaacaaaggugucgauacgguauccgucggaaacacccuauacugcgucaacaaacaagaaggcaaaucucucuacgucaaaggcgaacccauaaucaauuucuacgacccccuagucuuccccuccgaugaauuugacgccuccaucagccaagucaacgagaaaaucaaccaaucacuagccuucauccggaaauccgacgaacuccuacacaacguaaacgucggcaaauccaccaccaauauaaugaucacaaccaucaucaucguaaucaucgucauccuccuccuacucaucgccgucggauuauucuuauacugcaaagcccgcuaaggacuaguguccaccugucccuccugggcugcuggauugucucguuuuccugccaaauaaacaggaucagcgcuuuacagaucuaaaaaaaaaaaaaaaaaaaaaaaaaaaaaaaaaaaaaaaaaaaaaaaaaaaaaaaaaaaaaaaaugcaucccccccccccccccccccccccccccccccaaaggcucuuuucagagccaccagaauu

SEQ ID NO: 16868 - RNA, 1931 nt, Artificial Sequence
  mRNA product Design i-2 comprising derived and/or modified sequence from HRSV(Memphis-37)__AIY60640.1__F-del_DSCav1_mut4 (opt1)
gggagaggcgcugccuacggagguggcagccaucuccuucucggcaucaagcuuaccauggagcugcccauccucaagaccaacgccaucaccacgauccuggccgcggugacccugugcuucgccagcucccagaacaucaccgaggaguucuaccagagcacgugcuccgccgucagcaagggcuaccucuccgcccugcgcaccgggugguacaccagcgugaucaccaucgagcuguccaacaucaaggagaacaagugcaacggcaccgacgccaaggugaagcucaucaagcaggagcuggacaaguacaagaacgcggucacggagcugcagcuccugaugcagagcaccccggccgccggcuccgggagcgcgaucugcuccggcaucgccgucugcaaggugcugcaccucgagggcgaggugaacaagaucaagaacgcccugcuguccaccaacaaggccgucgugagccucuccaacggggugagcguccugaccuucaaggugcuggaccucaagaacuacaucgacaagcagcugcugcccauccugaacaagcagagcugcuccaucagcaacaucgagaccgucaucgaguuccagcagaagaacaaccgccuccuggagaucacgcgggaguucagcgugaacgcgggcgugaccacccccgucuccaccuacaugcugacgaacagcgagcuccugucccugaucaacgacaugccgaucaccaacgaccagaagaagcucaugagcaacaacgugcagaucgugcgccagcaguccuacagcaucaugugcaucaucaaggaggagguccuggccuacguggugcagcugccccucuacggggucaucgacacccccugcuggaagcugcacaccagcccccugugcacgaccaacaccaaggagggcuccaacaucugccucacccggacggaccgcgggugguacugcgacaacgccggcagcguguccuucuucccgcaggccgagaccugcaagguccagagcaaccggguguucugcgacaccaugaacucccggacccugcccagcgaggugaaccucugcaacaucgacaucuucaaccccaaguacgacugcaagaucaugacguccaagaccgacgucagcuccagcgugaucaccucccugggcgccaucgugagcugcuacgggaagaccaagugcacggcgagcaacaagaaccgcggcaucaucaagaccuucuccaacgggugcgacuacgucagcaacaagggcguggacaccguguccgucggcaacacccuguacugcgugaacaagcaggagggcaagagccucuacgugaagggggagcccaucaucaacuucuacgacccgcuggucuuccccuccgacgaguucgacgccagcaucucccaggugaacgagaagaucaaccagagccuggccuucauccggaaguccgacgagcuccugcacaacgugaacgucggcaagagcaccacgaacaucaugaucaccaccaucaucaucgugaucaucgugauccugcugcuccugaucgccgucgggcuguuccucuacugcaaggcccgcugaggacuagugcaucacauuuaaaagcaucucagccuaccaugagaauaagagaaagaaaaugaagaucaauagcuuauucaucucuuuuucuuuuucguugguguaaagccaacacccugucuaaaaaacauaaauuucuuuaaucauuuugccucuuuucucugugcuucaauuaauaaaaaauggaaagaaccuagaucuaaaaaaaaaaaaaaaaaaaaaaaaaaaaaaaaaaaaaaaaaaaaaaaaaaaaaaaaaaaaaaaaugcaucccccccccccccccccccccccccccccccaaaggcucuuuucagagccaccagaauu

SEQ ID NO: 16869 - RNA, 1931 nt, Artificial Sequence
  mRNA product Design i-2 comprising derived and/or modified sequence from HRSV(Memphis-37)__AIY60640.1__F-del_DSCav1_mut4 (opt1)
gggagaggcgcugccuacggagguggcagccaucuccuucucggcaucaagcuuaccauggagcugcccauccucaagaccaacgccaucaccacgauccuggccgcggugacccugugcuucgccagcucccagaacaucaccgaggaguucuaccagagcacgugcuccgccgucagcaagggcuaccucuccgcccugcgcaccgggugguacaccagcgugaucaccaucgagcuguccaacaucaaggagaacaagugcaacggcaccgacgccaaggugaagcucaucaagcaggagcuggacaaguacaagaacgcggucacggagcugcagcuccugaugcagagcaccccggccgccggguccggcagcgccaucugcuccgggaucgcggugugcaaggugcugcaccucgagggcgaggucaacaagaucaagaacgcccugcugagcaccaacaaggccguggugucccucagcaacggcgucuccgugcugaccuucaaggugcuggaccucaagaacuacaucgacaagcagcugcugcccauccucaacaagcagagcugcuccaucagcaacaucgagacggucaucgaguuccagcagaagaacaaccggcugcuggagaucacccgcgaguucuccgugaacgccggggugaccacccccgucagcacguacaugcucaccaacagcgagcugcugucccucaucaacgacaugcccaucaccaacgaccagaagaagcugaugagcaacaacgugcagaucgugcggcagcaguccuacagcaucaugugcaucaucaaggaggagguccuggccuacguggugcagcucccgcuguacggcgucaucgacacccccugcuggaagcugcacacgagcccccucugcaccaccaacaccaaggagggguccaacaucugccugacgcgcaccgaccggggcugguacugcgacaacgcgggguccgugagcuucuucccccaggccgagaccugcaaggugcaguccaaccgcgucuucugcgacaccaugaacagccggacgcucccguccgaggugaaccugugcaacaucgacaucuucaaccccaaguacgacugcaagaucaugaccagcaagaccgacgucuccagcuccgugaucaccagccugggcgccaucguguccugcuacggcaagacgaagugcaccgccagcaacaagaaccgggggaucaucaagaccuucuccaacggcugcgacuacgucagcaacaaggggguggacaccgugagcgucggcaacacgcucuacugcgugaacaagcaggagggcaagucccuguacgugaagggggagcccaucaucaacuucuacgacccccuggucuucccgagcgacgaguucgacgccuccaucagccaggugaacgagaagaucaaccagucccucgcguucauccgcaagagcgacgagcugcugcacaacgugaacgucggcaaguccaccaccaacaucaugaucaccaccaucaucaucgugaucaucgugauccuccugcugcucaucgccgucgggcuguuccuguacugcaaggcccggugaggacuagugcaucacauuuaaaagcaucucagccuaccaugagaauaagagaaagaaaaugaagaucaauagcuuauucaucucuuuuucuuuuucguugguguaaagccaacacccugucuaaaaaacauaaauuucuuuaaucauuuugccucuuuucucugugcuucaauuaauaaaaaauggaaagaaccuagaucuaaaaaaaaaaaaaaaaaaaaaaaaaaaaaaaaaaaaaaaaaaaaaaaaaaaaaaaaaaaaaaaaugcaucccccccccccccccccccccccccccccccaaaggcucuuuucagagccaccagaauu

SEQ ID NO: 16870 - RNA, 1931 nt, Artificial Sequence
  mRNA product Design i-2 comprising derived and/or modified sequence from HRSV(Memphis-37)__AIY60640.1__F-del_DSCav1_mut4 (opt2)
gggagaggcgcugccuacggagguggcagccaucuccuucucggcaucaagcuuaccauggagcuccccauccucaagaccaacgccaucaccaccauccucgccgccgucacccucugcuucgccuccucccagaacaucaccgaggaguucuaccaguccaccugcuccgccgucuccaagggcuaccucuccgcccuccgcaccggcugguacaccuccgucaucaccaucgagcucuccaacaucaaggagaacaagugcaacggcaccgacgccaaggucaagcucaucaagcaggagcucgacaaguacaagaacgccgucaccgagcuccagcuccucaugcaguccacccccgccgccggcuccggcuccgccaucugcuccggcaucgccgucugcaagguccuccaccucgagggcgaggucaacaagaucaagaacgcccuccucuccaccaacaaggccgucgucucccucuccaacggcgucuccguccucaccuucaagguccucgaccucaagaacuacaucgacaagcagcuccuccccauccucaacaagcaguccugcuccaucuccaacaucgagaccgucaucgaguuccagcagaagaacaaccgccuccucgagaucacccgcgaguucuccgucaacgccggcgucaccacccccgucuccaccuacaugcucaccaacuccgagcuccucucccucaucaacgacaugcccaucaccaacgaccagaagaagcucauguccaacaacguccagaucguccgccagcaguccuacuccaucaugugcaucaucaaggaggagguccucgccuacgucguccagcucccccucuacggcgucaucgacacccccugcuggaagcuccacaccuccccccucugcaccaccaacaccaaggagggcuccaacaucugccucacccgcaccgaccgcggcugguacugcgacaacgccggcuccgucuccuucuucccccaggccgagaccugcaagguccaguccaaccgcgucuucugcgacaccaugaacucccgcacccuccccuccgaggucaaccucugcaacaucgacaucuucaaccccaaguacgacugcaagaucaugaccuccaagaccgacgucuccuccuccgucaucaccucccucggcgccaucgucuccugcuacggcaagaccaagugcaccgccuccaacaagaaccgcggcaucaucaagaccuucuccaacggcugcgacuacgucuccaacaagggcgucgacaccgucuccgucggcaacacccucuacugcgucaacaagcaggagggcaagucccucuacgucaagggcgagcccaucaucaacuucuacgacccccucgucuuccccuccgacgaguucgacgccuccaucucccaggucaacgagaagaucaaccagucccucgccuucauccgcaaguccgacgagcuccuccacaacgucaacgucggcaaguccaccaccaacaucaugaucaccaccaucaucaucgucaucaucgucauccuccuccuccucaucgccgucggccucuuccucuacugcaaggcccgcugaggacuagugcaucacauuuaaaagcaucucagccuaccaugagaauaagagaaagaaaaugaagaucaauagcuuauucaucucuuuuucuuuuucguugguguaaagccaacacccugucuaaaaaacauaaauuucuuuaaucauuuugccucuuuucucugugcuucaauuaauaaaaaauggaaagaaccuagaucuaaaaaaaaaaaaaaaaaaaaaaaaaaaaaaaaaaaaaaaaaaaaaaaaaaaaaaaaaaaaaaaaugcaucccccccccccccccccccccccccccccccaaaggcucuuuucagagccaccagaauu

SEQ ID NO: 16871 - RNA, 1931 nt, Artificial Sequence
  mRNA product Design i-2 comprising derived and/or modified sequence from HRSV(Memphis-37)__AIY60640.1__F-del_DSCav1_mut4 (opt3)
gggagaggcgcugccuacggagguggcagccaucuccuucucggcaucaagcuuaccauggagcugcccauccucaagaccaacgccauuacaacuauacuugcugcagugacgcugugcuucgccagcucccagaauaucaccgaagaguuuuaccaaucuacauguucagcggucaguaaaggcuauuugagcgcuuuaagaacugggugguacaccuccguuauuacaaucgaacugucuaacauuaaggagaauaaaugcaacggaaccgacgccaaggugaaacuaaucaagcaggaacucgauaaguauaaaaaugcaguaacugagcugcagcuucugaugcagucgaccccugccgcugguucaggcagcgcaauauguagugggaucgccgugugcaaggucuugcaccucgagggagaagugaacaaaauuaagaaugcucugcuguccacaaacaaagccguugugucucucagcaauggcgucuccguguuaacguucaagguacuggaccuuaagaacuacaucgauaaacaauugcugccaauucuaaauaagcagucauguaguaucagcaacauagagacuguuauugaauuucagcagaaaaauaacaggcuccuggagaucacccgggaguucucugugaaugcgggugucacaacuccgguguccaccuauaugcuuacaaacucagaacuguugagccucauuaacgacaugcccaucaccaaugaucaaaagaaacugaugaguaacaaugugcagaucguccgccagcagucuuacuccauuaugugcauaaucaaggaggaaguuuuagcauaugugguacaacugccucucuacggggugauugacacgccauguuggaaacuucauacuagcccccugugcacaaccaacacuaaggagggaucgaauaucuguuugacacgaaccgaucguggcugguacugcgacaacgccggcucugucuccuuuuucccucaggcugaaacguguaaggugcagucaaauagaguguuuugcgauaccaugaacaguagaacacugccaagcgaggugaaucucugcaacauagacauuuucaaucccaaauaugauuguaagaucaugacuuccaaaaccgacgucucuagcucagugaucacaagucugggggccauuguauccugcuacggaaagacuaaauguaccgcaagcaacaagaauagggguaucauuaagacauuuucuaacggcugcgauuauguuucaaauaaagggguggacaccgucagugugggaaacacucuuuacugugucaacaagcaagagggcaaaagccuguaugugaagggugaaccuauaaucaauuucuacgacccauugguuuuuccguccgaugaguucgacgcuucuauuucgcagguuaacgagaaaaucaaucagagccucgccuuuauccggaaguccgaugaacuguuacacaacguaaaugucgggaagucaacgacaaacauuaugauaaccacuaucauuaucgugauuaucguuauacugcuacuccugaucgcggugggacuuuucuuguauugcaaagcccgcugaggacuagugcaucacauuuaaaagcaucucagccuaccaugagaauaagagaaagaaaaugaagaucaauagcuuauucaucucuuuuucuuuuucguugguguaaagccaacacccugucuaaaaaacauaaauuucuuuaaucauuuugccucuuuucucugugcuucaauuaauaaaaaauggaaagaaccuagaucuaaaaaaaaaaaaaaaaaaaaaaaaaaaaaaaaaaaaaaaaaaaaaaaaaaaaaaaaaaaaaaaaugcaucccccccccccccccccccccccccccccccaaaggcucuuuucagagccaccagaauu

SEQ ID NO: 16872 - RNA, 1931 nt, Artificial Sequence
  mRNA product Design i-2 comprising derived and/or modified sequence from HRSV(Memphis-37)__AIY60640.1__F-del_DSCav1_mut4 (opt4)
gggagaggcgcugccuacggagguggcagccaucuccuucucggcaucaagcuuaccauggagcugcccauccugaagaccaacgccaucaccaccauccuggccgccgugacccugugcuucgccagcagccagaacaucaccgaggaguucuaccagagcaccugcagcgccgugagcaagggcuaccugagcgcccugagaaccggcugguacaccagcgugaucaccaucgagcugagcaacaucaaggagaacaagugcaacggcaccgacgccaaggugaagcugaucaagcaggagcuggacaaguacaagaacgccgugaccgagcugcagcugcugaugcagagcacccccgccgccggcagcggcagcgccaucugcagcggcaucgccgugugcaaggugcugcaccuggagggcgaggugaacaagaucaagaacgcccugcugagcaccaacaaggccguggugagccugagcaacggcgugagcgugcugaccuucaaggugcuggaccugaagaacuacaucgacaagcagcugcugcccauccugaacaagcagagcugcagcaucagcaacaucgagaccgugaucgaguuccagcagaagaacaacagacugcuggagaucaccagagaguucagcgugaacgccggcgugaccacccccgugagcaccuacaugcugaccaacagcgagcugcugagccugaucaacgacaugcccaucaccaacgaccagaagaagcugaugagcaacaacgugcagaucgugagacagcagagcuacagcaucaugugcaucaucaaggaggaggugcuggccuacguggugcagcugccccuguacggcgugaucgacacccccugcuggaagcugcacaccagcccccugugcaccaccaacaccaaggagggcagcaacaucugccugaccagaaccgacagaggcugguacugcgacaacgccggcagcgugagcuucuucccccaggccgagaccugcaaggugcagagcaacagaguguucugcgacaccaugaacagcagaacccugcccagcgaggugaaccugugcaacaucgacaucuucaaccccaaguacgacugcaagaucaugaccagcaagaccgacgugagcagcagcgugaucaccagccugggcgccaucgugagcugcuacggcaagaccaagugcaccgccagcaacaagaacagaggcaucaucaagaccuucagcaacggcugcgacuacgugagcaacaagggcguggacaccgugagcgugggcaacacccuguacugcgugaacaagcaggagggcaagagccuguacgugaagggcgagcccaucaucaacuucuacgacccccugguguuccccagcgacgaguucgacgccagcaucagccaggugaacgagaagaucaaccagagccuggccuucaucagaaagagcgacgagcugcugcacaacgugaacgugggcaagagcaccaccaacaucaugaucaccaccaucaucaucgugaucaucgugauccugcugcugcugaucgccgugggccuguuccuguacugcaaggccagaugaggacuagugcaucacauuuaaaagcaucucagccuaccaugagaauaagagaaagaaaaugaagaucaauagcuuauucaucucuuuuucuuuuucguugguguaaagccaacacccugucuaaaaaacauaaauuucuuuaaucauuuugccucuuuucucugugcuucaauuaauaaaaaauggaaagaaccuagaucuaaaaaaaaaaaaaaaaaaaaaaaaaaaaaaaaaaaaaaaaaaaaaaaaaaaaaaaaaaaaaaaaugcaucccccccccccccccccccccccccccccccaaaggcucuuuucagagccaccagaauu

SEQ ID NO: 16873 - RNA, 1931 nt, Artificial Sequence
  mRNA product Design i-2 comprising derived and/or modified sequence from HRSV(Memphis-37)__AIY60640.1__F-del_DSCav1_mut4 (opt5)
gggagaggcgcugccuacggagguggcagccaucuccuucucggcaucaagcuuaccauggagcugcccauccucaagaccaacgccauuacaacgauccuggcugccgugacccuuugcuucgcgagcucccagaauauuacagaagaguuuuaccaaucuaccuguagcgcugucuccaaaggcuaucugucugcccucagaacagggugguacaccagcguuaucacaauugaacuguccaacaucaaggagaauaaaugcaacggaaccgacgccaaggugaaacuuaucaagcaggaacuggauaaguauaaaaaugcugugacggagcuccagcugcugaugcagucuaccccugccgcuggcagcggguccgccauuuguagcggaaucgcggucugcaaggugcuccaccuggagggcgaaguuaacaaaauuaagaaugcccuucugucuacaaacaaagcuguggucucccucagcaauggggugucuguucugaccuucaaggugcuugaccugaagaacuacaucgauaaacaacuccugccgauucugaauaagcaguccuguagcaucucuaacauugagacagucaucgaauuucagcagaaaaauaaccggcuccuggagaucacccgcgaguucuccgugaaugccggagugacgacacccgucagcaccuauaugcuuacaaacuccgaacugcucucucugauuaacgacaugccuaucaccaaugaucaaaagaaacuuaugagcaacaauguucagauugugagacagcaguccuacagcaucaugugcauuaucaaggaggaagugcuggcuuaugucgugcaacucccccuguacggcguuaucgacaccccuuguuggaaacugcauacaucuccccucugcacgaccaacacaaaggagggcuccaauauuugucugacccggacagaucgcgggugguacugcgacaacgccggaagcgugagcuuuuucccucaggcggaaaccuguaagguccagucuaauagaguguuuugcgauacgaugaacuccagaacacugccgucugagguuaaucucugcaacaucgacauuuucaaucccaaauaugauuguaagaucaugaccagcaaaaccgacguguccagcucugucauuacaucccugggcgccaucgugagcugcuacgggaagaccaaauguacagcuucuaacaagaaucggggaaucauuaagacguuuuccaacggcugcgauuaugucagcaauaaagggguggacaccguuuccgugggaaacacacuuuacugugucaacaagcaagagggcaaaucucuguaugugaagggcgaaccuaucauuaauuucuacgacccccucguuuuuccuagcgaugaguucgacgccuccaucucucaggugaacgaaaagauuaaucagagccuggcuuuuauccgcaaguccgaugagcugcuccacaacgucaauguggggaaaagcaccacaaacauuaugaucaccacgaucauuaucgugauuaucguuauucugcuucugcucaucgccgucggacuguuccuguauugcaaagccagaugaggacuagugcaucacauuuaaaagcaucucagccuaccaugagaauaagagaaagaaaaugaagaucaauagcuuauucaucucuuuuucuuuuucguugguguaaagccaacacccugucuaaaaaacauaaauuucuuuaaucauuuugccucuuuucucugugcuucaauuaauaaaaaauggaaagaaccuagaucuaaaaaaaaaaaaaaaaaaaaaaaaaaaaaaaaaaaaaaaaaaaaaaaaaaaaaaaaaaaaaaaaugcaucccccccccccccccccccccccccccccccaaaggcucuuuucagagccaccagaauu

SEQ ID NO: 16874 - RNA, 1931 nt, Artificial Sequence
  mRNA product Design i-2 comprising derived and/or modified sequence from HRSV(Memphis-37)__AIY60640.1__F-del_DSCav1_mut4 (opt6)
gggagaggcgcugccuacggagguggcagccaucuccuucucggcaucaagcuuaccauggaacuaccaauacucaaaacaaacgcaauaacaacuauacuagccgcaguuacacucugcuucgcuucaucacaaaauaucacagaagaauuuuaccaaucuacauguucagcuguauccaaagguuaccuuucagcacuacgaacaggaugguauaccucaguaaucaccaucgaacucucgaacauaaaagaaaacaaauguaacggaaccgaugcuaaagucaagcucauaaaacaagaacuagacaaauacaaaaacgcaguaaccgaacuacaacuacuuaugcaaucaacaccagcugcaggcucaggcucagcaaucugcucaggcauagcuguaugcaaaguacuacaucuagaaggagaaguaaacaaaauaaaaaacgcauuauuaucaacaaauaaagcaguaguaucacuaucaaauggaguaucaguacucacauucaaaguacuagaucuaaaaaacuacauugacaaacaauuacuaccaauccucaacaaacaaucaugcucaauauccaacauagaaacaguaauagaauuucaacaaaaaaacaaucgacuacuagaaauaacaagagaauuuucagucaaugccggaguuacaacacccguaagcacuuacaugcuaaccaacucagaacuacuaucacuaauaaacgacaugccaauuacaaacgaccaaaaaaaacuaaugucaaauaacguacaaauaguacgucaacaaucauacucaauaaugugcauaauaaaagaagaaguccuagcauacguaguacaauuacccuuauauggcguaauagacacaccaugcuggaaacuacacacauccccacucugcaccaccaacaccaaagaaggcuccaacauaugucuaacccgaaccgacagagguugguauugugauaacgcuggcuccguaucauucuucccacaagcagaaacauguaaaguacaaucaaacagaguauucugcgauacaaugaauagcagaacacuaccaucagaaguaaacuuaugcaacaucgacaucuucaaucccaaauacgacugcaaaauaaugacauccaaaacugacguuucuucaagcguaauaacaucuuuaggagcaauaguauccugcuacggaaaaacuaaaugcacagcauccaauaaaaaccguggaauaauaaaaacauucucaaauggcugcgacuacgucucaaacaaaggcguagacaccguuagugucggaaacacacuauauugcguaaauaaacaagaaggaaaauccuuauacguaaaaggcgaaccaauaauuaacuucuaugacccccucguauuuccauccgaugaauuugacgcaucaaucucgcaaguaaacgaaaaaauaaaccaaagccuagcauucauaagaaaauccgacgaacuacuccacaauguaaauguaggaaaaucaacuaccaacauaaugauuacuacuauaauaauaguaauuauagucaucuuacuacuauuaauagcagucggauuauuccuauacugcaaagcaagauagggacuagugcaucacauuuaaaagcaucucagccuaccaugagaauaagagaaagaaaaugaagaucaauagcuuauucaucucuuuuucuuuuucguugguguaaagccaacacccugucuaaaaaacauaaauuucuuuaaucauuuugccucuuuucucugugcuucaauuaauaaaaaauggaaagaaccuagaucuaaaaaaaaaaaaaaaaaaaaaaaaaaaaaaaaaaaaaaaaaaaaaaaaaaaaaaaaaaaaaaaaugcaucccccccccccccccccccccccccccccccaaaggcucuuuucagagccaccagaauu

SEQ ID NO: 16875 - RNA, 1931 nt, Artificial Sequence
  mRNA product Design i-2 comprising derived and/or modified sequence from HRSV(Memphis-37)__AIY60640.1__F-del_DSCav1_mut4 (opt11)
gggagaggcgcugccuacggagguggcagccaucuccuucucggcaucaagcuuaccauggagcuccccauccuaaaaaccaacgccaucaccaccauccucgccgccgucacccuaugcuucgcuucaucacaaaacaucaccgaagaauuuuaccaaucuaccugcuccgccgucuccaaaggauaucucagcgcccuacggaccggcugguacaccuccgucauaaccaucgaacucaguaacaucaaagaaaacaaaugcaacggcaccgacgccaaagucaaacuaaucaaacaagaacuagauaaauacaaaaacgcggucaccgaacuacaacuccuaaugcaaagcacccccgccgccggauccggcuccgccauaugcuccggcauugcugucugcaaaguacuacaccucgagggcgaggucaacaaaaucaaaaacgcacuacucagcacuaauaaagccguaguaucccuaucaaacggugucucagucuuaacauucaaaguacucgaccuaaagaacuacaucgacaaacaacuccuacccauccucaacaagcaguccuguucuaucucaaacaucgaaaccgucaucgaauuucaacaaaagaacaaccgccuccucgaaaucacacgcgaguucuccgucaacgcaggaguaaccacccccgucuccaccuacaugcucacaaacucggaacuccucucacuaaucaacgacaugcccaucaccaacgaccaaaagaaacucaugagcaacaacguucaaaucguccgccaacaaucauacuccaucaugugcauaaucaaagaagaaguccuagcuuacgucguccagcugccccucuacggagucaucgacacgcccugcuggaaacuacacacaagcccccucugcaccaccaacaccaaagaaggcuccaacauaugccucacacggaccgaccgcgguugguacugcgacaacgccggcuccgucuccuucuucccccaagcagaaacuugcaaaguccaauccaaccgcguauucugcgacacaaugaacagcagaacacucccuagcgaagucaaccucugcaacaucgacauauucaaccccaaauacgacugcaaaaucaugacgucaaaaaccgacgucuccagcuccguuaucaccucacucggcgccaucgucagcugcuacggcaaaacuaaaugcaccgccuccaacaaaaaccgcggcaucauuaaaaccuucagcaacggcugcgacuacgucuccaacaaaggugucgauacgguauccgucggaaacacccuauacugcgucaacaaacaagaaggcaaaucucucuacgucaaaggcgaacccauaaucaauuucuacgacccccuagucuuccccuccgaugaauuugacgccuccaucagccaagucaacgagaaaaucaaccaaucacuagccuucauccggaaauccgacgaacuccuacacaacguaaacgucggcaaauccaccaccaauauaaugaucacaaccaucaucaucguaaucaucgucauccuccuccuacucaucgccgucggauuauucuuauacugcaaagcccgcuaaggacuagugcaucacauuuaaaagcaucucagccuaccaugagaauaagagaaagaaaaugaagaucaauagcuuauucaucucuuuuucuuuuucguugguguaaagccaacacccugucuaaaaaacauaaauuucuuuaaucauuuugccucuuuucucugugcuucaauuaauaaaaaauggaaagaaccuagaucuaaaaaaaaaaaaaaaaaaaaaaaaaaaaaaaaaaaaaaaaaaaaaaaaaaaaaaaaaaaaaaaaugcaucccccccccccccccccccccccccccccccaaaggcucuuuucagagccaccagaauu

SEQ ID NO: 16876 - RNA, 1927 nt, Artificial Sequence
  mRNA product Design i-2 comprising derived and/or modified sequence from HRSV(Memphis-37)__AIY60640.1__F-del_DSCav1_mut4 (opt1)
ggggcgcugccuacggagguggcagccaucuccuucucggcaucaagcuuaccauggagcugcccauccucaagaccaacgccaucaccacgauccuggccgcggugacccugugcuucgccagcucccagaacaucaccgaggaguucuaccagagcacgugcuccgccgucagcaagggcuaccucuccgcccugcgcaccgggugguacaccagcgugaucaccaucgagcuguccaacaucaaggagaacaagugcaacggcaccgacgccaaggugaagcucaucaagcaggagcuggacaaguacaagaacgcggucacggagcugcagcuccugaugcagagcaccccggccgccggcuccgggagcgcgaucugcuccggcaucgccgucugcaaggugcugcaccucgagggcgaggugaacaagaucaagaacgcccugcuguccaccaacaaggccgucgugagccucuccaacggggugagcguccugaccuucaaggugcuggaccucaagaacuacaucgacaagcagcugcugcccauccugaacaagcagagcugcuccaucagcaacaucgagaccgucaucgaguuccagcagaagaacaaccgccuccuggagaucacgcgggaguucagcgugaacgcgggcgugaccacccccgucuccaccuacaugcugacgaacagcgagcuccugucccugaucaacgacaugccgaucaccaacgaccagaagaagcucaugagcaacaacgugcagaucgugcgccagcaguccuacagcaucaugugcaucaucaaggaggagguccuggccuacguggugcagcugccccucuacggggucaucgacacccccugcuggaagcugcacaccagcccccugugcacgaccaacaccaaggagggcuccaacaucugccucacccggacggaccgcgggugguacugcgacaacgccggcagcguguccuucuucccgcaggccgagaccugcaagguccagagcaaccggguguucugcgacaccaugaacucccggacccugcccagcgaggugaaccucugcaacaucgacaucuucaaccccaaguacgacugcaagaucaugacguccaagaccgacgucagcuccagcgugaucaccucccugggcgccaucgugagcugcuacgggaagaccaagugcacggcgagcaacaagaaccgcggcaucaucaagaccuucuccaacgggugcgacuacgucagcaacaagggcguggacaccguguccgucggcaacacccuguacugcgugaacaagcaggagggcaagagccucuacgugaagggggagcccaucaucaacuucuacgacccgcuggucuuccccuccgacgaguucgacgccagcaucucccaggugaacgagaagaucaaccagagccuggccuucauccggaaguccgacgagcuccugcacaacgugaacgucggcaagagcaccacgaacaucaugaucaccaccaucaucaucgugaucaucgugauccugcugcuccugaucgccgucgggcuguuccucuacugcaaggcccgcugaggacuagugcaucacauuuaaaagcaucucagccuaccaugagaauaagagaaagaaaaugaagaucaauagcuuauucaucucuuuuucuuuuucguugguguaaagccaacacccugucuaaaaaacauaaauuucuuuaaucauuuugccucuuuucucugugcuucaauuaauaaaaaauggaaagaaccuagaucuaaaaaaaaaaaaaaaaaaaaaaaaaaaaaaaaaaaaaaaaaaaaaaaaaaaaaaaaaaaaaaaaugcaucccccccccccccccccccccccccccccccaaaggcucuuuucagagccaccagaauu

SEQ ID NO: 16877 - RNA, 1927 nt, Artificial Sequence
  mRNA product Design i-2 comprising derived and/or modified sequence from HRSV(Memphis-37)__AIY60640.1__F-del_DSCav1_mut4 (opt1)
ggggcgcugccuacggagguggcagccaucuccuucucggcaucaagcuuaccauggagcugcccauccucaagaccaacgccaucaccacgauccuggccgcggugacccugugcuucgccagcucccagaacaucaccgaggaguucuaccagagcacgugcuccgccgucagcaagggcuaccucuccgcccugcgcaccgggugguacaccagcgugaucaccaucgagcuguccaacaucaaggagaacaagugcaacggcaccgacgccaaggugaagcucaucaagcaggagcuggacaaguacaagaacgcggucacggagcugcagcuccugaugcagagcaccccggccgccggguccggcagcgccaucugcuccgggaucgcggugugcaaggugcugcaccucgagggcgaggucaacaagaucaagaacgcccugcugagcaccaacaaggccguggugucccucagcaacggcgucuccgugcugaccuucaaggugcuggaccucaagaacuacaucgacaagcagcugcugcccauccucaacaagcagagcugcuccaucagcaacaucgagacggucaucgaguuccagcagaagaacaaccggcugcuggagaucacccgcgaguucuccgugaacgccggggugaccacccccgucagcacguacaugcucaccaacagcgagcugcugucccucaucaacgacaugcccaucaccaacgaccagaagaagcugaugagcaacaacgugcagaucgugcggcagcaguccuacagcaucaugugcaucaucaaggaggagguccuggccuacguggugcagcucccgcuguacggcgucaucgacacccccugcuggaagcugcacacgagcccccucugcaccaccaacaccaaggagggguccaacaucugccugacgcgcaccgaccggggcugguacugcgacaacgcgggguccgugagcuucuucccccaggccgagaccugcaaggugcaguccaaccgcgucuucugcgacaccaugaacagccggacgcucccguccgaggugaaccugugcaacaucgacaucuucaaccccaaguacgacugcaagaucaugaccagcaagaccgacgucuccagcuccgugaucaccagccugggcgccaucguguccugcuacggcaagacgaagugcaccgccagcaacaagaaccgggggaucaucaagaccuucuccaacggcugcgacuacgucagcaacaaggggguggacaccgugagcgucggcaacacgcucuacugcgugaacaagcaggagggcaagucccuguacgugaagggggagcccaucaucaacuucuacgacccccuggucuucccgagcgacgaguucgacgccuccaucagccaggugaacgagaagaucaaccagucccucgcguucauccgcaagagcgacgagcugcugcacaacgugaacgucggcaaguccaccaccaacaucaugaucaccaccaucaucaucgugaucaucgugauccuccugcugcucaucgccgucgggcuguuccuguacugcaaggcccggugaggacuagugcaucacauuuaaaagcaucucagccuaccaugagaauaagagaaagaaaaugaagaucaauagcuuauucaucucuuuuucuuuuucguugguguaaagccaacacccugucuaaaaaacauaaauuucuuuaaucauuuugccucuuuucucugugcuucaauuaauaaaaaauggaaagaaccuagaucuaaaaaaaaaaaaaaaaaaaaaaaaaaaaaaaaaaaaaaaaaaaaaaaaaaaaaaaaaaaaaaaaugcaucccccccccccccccccccccccccccccccaaaggcucuuuucagagccaccagaauu

SEQ ID NO: 16878 - RNA, 1927 nt, Artificial Sequence
  mRNA product Design i-2 comprising derived and/or modified sequence from HRSV(Memphis-37)__AIY60640.1__F-del_DSCav1_mut4 (opt2)
ggggcgcugccuacggagguggcagccaucuccuucucggcaucaagcuuaccauggagcuccccauccucaagaccaacgccaucaccaccauccucgccgccgucacccucugcuucgccuccucccagaacaucaccgaggaguucuaccaguccaccugcuccgccgucuccaagggcuaccucuccgcccuccgcaccggcugguacaccuccgucaucaccaucgagcucuccaacaucaaggagaacaagugcaacggcaccgacgccaaggucaagcucaucaagcaggagcucgacaaguacaagaacgccgucaccgagcuccagcuccucaugcaguccacccccgccgccggcuccggcuccgccaucugcuccggcaucgccgucugcaagguccuccaccucgagggcgaggucaacaagaucaagaacgcccuccucuccaccaacaaggccgucgucucccucuccaacggcgucuccguccucaccuucaagguccucgaccucaagaacuacaucgacaagcagcuccuccccauccucaacaagcaguccugcuccaucuccaacaucgagaccgucaucgaguuccagcagaagaacaaccgccuccucgagaucacccgcgaguucuccgucaacgccggcgucaccacccccgucuccaccuacaugcucaccaacuccgagcuccucucccucaucaacgacaugcccaucaccaacgaccagaagaagcucauguccaacaacguccagaucguccgccagcaguccuacuccaucaugugcaucaucaaggaggagguccucgccuacgucguccagcucccccucuacggcgucaucgacacccccugcuggaagcuccacaccuccccccucugcaccaccaacaccaaggagggcuccaacaucugccucacccgcaccgaccgcggcugguacugcgacaacgccggcuccgucuccuucuucccccaggccgagaccugcaagguccaguccaaccgcgucuucugcgacaccaugaacucccgcacccuccccuccgaggucaaccucugcaacaucgacaucuucaaccccaaguacgacugcaagaucaugaccuccaagaccgacgucuccuccuccgucaucaccucccucggcgccaucgucuccugcuacggcaagaccaagugcaccgccuccaacaagaaccgcggcaucaucaagaccuucuccaacggcugcgacuacgucuccaacaagggcgucgacaccgucuccgucggcaacacccucuacugcgucaacaagcaggagggcaagucccucuacgucaagggcgagcccaucaucaacuucuacgacccccucgucuuccccuccgacgaguucgacgccuccaucucccaggucaacgagaagaucaaccagucccucgccuucauccgcaaguccgacgagcuccuccacaacgucaacgucggcaaguccaccaccaacaucaugaucaccaccaucaucaucgucaucaucgucauccuccuccuccucaucgccgucggccucuuccucuacugcaaggcccgcugaggacuagugcaucacauuuaaaagcaucucagccuaccaugagaauaagagaaagaaaaugaagaucaauagcuuauucaucucuuuuucuuuuucguugguguaaagccaacacccugucuaaaaaacauaaauuucuuuaaucauuuugccucuuuucucugugcuucaauuaauaaaaaauggaaagaaccuagaucuaaaaaaaaaaaaaaaaaaaaaaaaaaaaaaaaaaaaaaaaaaaaaaaaaaaaaaaaaaaaaaaaugcaucccccccccccccccccccccccccccccccaaaggcucuuuucagagccaccagaauu

SEQ ID NO: 16879 - RNA, 1927 nt, Artificial Sequence
  mRNA product Design i-2 comprising derived and/or modified sequence from HRSV(Memphis-37)__AIY60640.1__F-del_DSCav1_mut4 (opt3)
ggggcgcugccuacggagguggcagccaucuccuucucggcaucaagcuuaccauggagcugcccauccucaagaccaacgccauuacaacuauacuugcugcagugacgcugugcuucgccagcucccagaauaucaccgaagaguuuuaccaaucuacauguucagcggucaguaaaggcuauuugagcgcuuuaagaacugggugguacaccuccguuauuacaaucgaacugucuaacauuaaggagaauaaaugcaacggaaccgacgccaaggugaaacuaaucaagcaggaacucgauaaguauaaaaaugcaguaacugagcugcagcuucugaugcagucgaccccugccgcugguucaggcagcgcaauauguagugggaucgccgugugcaaggucuugcaccucgagggagaagugaacaaaauuaagaaugcucugcuguccacaaacaaagccguugugucucucagcaauggcgucuccguguuaacguucaagguacuggaccuuaagaacuacaucgauaaacaauugcugccaauucuaaauaagcagucauguaguaucagcaacauagagacuguuauugaauuucagcagaaaaauaacaggcuccuggagaucacccgggaguucucugugaaugcgggugucacaacuccgguguccaccuauaugcuuacaaacucagaacuguugagccucauuaacgacaugcccaucaccaaugaucaaaagaaacugaugaguaacaaugugcagaucguccgccagcagucuuacuccauuaugugcauaaucaaggaggaaguuuuagcauaugugguacaacugccucucuacggggugauugacacgccauguuggaaacuucauacuagcccccugugcacaaccaacacuaaggagggaucgaauaucuguuugacacgaaccgaucguggcugguacugcgacaacgccggcucugucuccuuuuucccucaggcugaaacguguaaggugcagucaaauagaguguuuugcgauaccaugaacaguagaacacugccaagcgaggugaaucucugcaacauagacauuuucaaucccaaauaugauuguaagaucaugacuuccaaaaccgacgucucuagcucagugaucacaagucugggggccauuguauccugcuacggaaagacuaaauguaccgcaagcaacaagaauagggguaucauuaagacauuuucuaacggcugcgauuauguuucaaauaaagggguggacaccgucagugugggaaacacucuuuacugugucaacaagcaagagggcaaaagccuguaugugaagggugaaccuauaaucaauuucuacgacccauugguuuuuccguccgaugaguucgacgcuucuauuucgcagguuaacgagaaaaucaaucagagccucgccuuuauccggaaguccgaugaacuguuacacaacguaaaugucgggaagucaacgacaaacauuaugauaaccacuaucauuaucgugauuaucguuauacugcuacuccugaucgcggugggacuuuucuuguauugcaaagcccgcugaggacuagugcaucacauuuaaaagcaucucagccuaccaugagaauaagagaaagaaaaugaagaucaauagcuuauucaucucuuuuucuuuuucguugguguaaagccaacacccugucuaaaaaacauaaauuucuuuaaucauuuugccucuuuucucugugcuucaauuaauaaaaaauggaaagaaccuagaucuaaaaaaaaaaaaaaaaaaaaaaaaaaaaaaaaaaaaaaaaaaaaaaaaaaaaaaaaaaaaaaaaugcaucccccccccccccccccccccccccccccccaaaggcucuuuucagagccaccagaauu

SEQ ID NO: 16880 - RNA, 1927 nt, Artificial Sequence
  mRNA product Design i-2 comprising derived and/or modified sequence from HRSV(Memphis-37)__AIY60640.1__F-del_DSCav1_mut4 (opt4)
ggggcgcugccuacggagguggcagccaucuccuucucggcaucaagcuuaccauggagcugcccauccugaagaccaacgccaucaccaccauccuggccgccgugacccugugcuucgccagcagccagaacaucaccgaggaguucuaccagagcaccugcagcgccgugagcaagggcuaccugagcgcccugagaaccggcugguacaccagcgugaucaccaucgagcugagcaacaucaaggagaacaagugcaacggcaccgacgccaaggugaagcugaucaagcaggagcuggacaaguacaagaacgccgugaccgagcugcagcugcugaugcagagcacccccgccgccggcagcggcagcgccaucugcagcggcaucgccgugugcaaggugcugcaccuggagggcgaggugaacaagaucaagaacgcccugcugagcaccaacaaggccguggugagccugagcaacggcgugagcgugcugaccuucaaggugcuggaccugaagaacuacaucgacaagcagcugcugcccauccugaacaagcagagcugcagcaucagcaacaucgagaccgugaucgaguuccagcagaagaacaacagacugcuggagaucaccagagaguucagcgugaacgccggcgugaccacccccgugagcaccuacaugcugaccaacagcgagcugcugagccugaucaacgacaugcccaucaccaacgaccagaagaagcugaugagcaacaacgugcagaucgugagacagcagagcuacagcaucaugugcaucaucaaggaggaggugcuggccuacguggugcagcugccccuguacggcgugaucgacacccccugcuggaagcugcacaccagcccccugugcaccaccaacaccaaggagggcagcaacaucugccugaccagaaccgacagaggcugguacugcgacaacgccggcagcgugagcuucuucccccaggccgagaccugcaaggugcagagcaacagaguguucugcgacaccaugaacagcagaacccugcccagcgaggugaaccugugcaacaucgacaucuucaaccccaaguacgacugcaagaucaugaccagcaagaccgacgugagcagcagcgugaucaccagccugggcgccaucgugagcugcuacggcaagaccaagugcaccgccagcaacaagaacagaggcaucaucaagaccuucagcaacggcugcgacuacgugagcaacaagggcguggacaccgugagcgugggcaacacccuguacugcgugaacaagcaggagggcaagagccuguacgugaagggcgagcccaucaucaacuucuacgacccccugguguuccccagcgacgaguucgacgccagcaucagccaggugaacgagaagaucaaccagagccuggccuucaucagaaagagcgacgagcugcugcacaacgugaacgugggcaagagcaccaccaacaucaugaucaccaccaucaucaucgugaucaucgugauccugcugcugcugaucgccgugggccuguuccuguacugcaaggccagaugaggacuagugcaucacauuuaaaagcaucucagccuaccaugagaauaagagaaagaaaaugaagaucaauagcuuauucaucucuuuuucuuuuucguugguguaaagccaacacccugucuaaaaaacauaaauuucuuuaaucauuuugccucuuuucucugugcuucaauuaauaaaaaauggaaagaaccuagaucuaaaaaaaaaaaaaaaaaaaaaaaaaaaaaaaaaaaaaaaaaaaaaaaaaaaaaaaaaaaaaaaaugcaucccccccccccccccccccccccccccccccaaaggcucuuuucagagccaccagaauu

SEQ ID NO: 16881 - RNA, 1927 nt, Artificial Sequence
  mRNA product Design i-2 comprising derived and/or modified sequence from HRSV(Memphis-37)__AIY60640.1__F-del_DSCav1_mut4 (opt5)
ggggcgcugccuacggagguggcagccaucuccuucucggcaucaagcuuaccauggagcugcccauccucaagaccaacgccauuacaacgauccuggcugccgugacccuuugcuucgcgagcucccagaauauuacagaagaguuuuaccaaucuaccuguagcgcugucuccaaaggcuaucugucugcccucagaacagggugguacaccagcguuaucacaauugaacuguccaacaucaaggagaauaaaugcaacggaaccgacgccaaggugaaacuuaucaagcaggaacuggauaaguauaaaaaugcugugacggagcuccagcugcugaugcagucuaccccugccgcuggcagcggguccgccauuuguagcggaaucgcggucugcaaggugcuccaccuggagggcgaaguuaacaaaauuaagaaugcccuucugucuacaaacaaagcuguggucucccucagcaauggggugucuguucugaccuucaaggugcuugaccugaagaacuacaucgauaaacaacuccugccgauucugaauaagcaguccuguagcaucucuaacauugagacagucaucgaauuucagcagaaaaauaaccggcuccuggagaucacccgcgaguucuccgugaaugccggagugacgacacccgucagcaccuauaugcuuacaaacuccgaacugcucucucugauuaacgacaugccuaucaccaaugaucaaaagaaacuuaugagcaacaauguucagauugugagacagcaguccuacagcaucaugugcauuaucaaggaggaagugcuggcuuaugucgugcaacucccccuguacggcguuaucgacaccccuuguuggaaacugcauacaucuccccucugcacgaccaacacaaaggagggcuccaauauuugucugacccggacagaucgcgggugguacugcgacaacgccggaagcgugagcuuuuucccucaggcggaaaccuguaagguccagucuaauagaguguuuugcgauacgaugaacuccagaacacugccgucugagguuaaucucugcaacaucgacauuuucaaucccaaauaugauuguaagaucaugaccagcaaaaccgacguguccagcucugucauuacaucccugggcgccaucgugagcugcuacgggaagaccaaauguacagcuucuaacaagaaucggggaaucauuaagacguuuuccaacggcugcgauuaugucagcaauaaagggguggacaccguuuccgugggaaacacacuuuacugugucaacaagcaagagggcaaaucucuguaugugaagggcgaaccuaucauuaauuucuacgacccccucguuuuuccuagcgaugaguucgacgccuccaucucucaggugaacgaaaagauuaaucagagccuggcuuuuauccgcaaguccgaugagcugcuccacaacgucaauguggggaaaagcaccacaaacauuaugaucaccacgaucauuaucgugauuaucguuauucugcuucugcucaucgccgucggacuguuccuguauugcaaagccagaugaggacuagugcaucacauuuaaaagcaucucagccuaccaugagaauaagagaaagaaaaugaagaucaauagcuuauucaucucuuuuucuuuuucguugguguaaagccaacacccugucuaaaaaacauaaauuucuuuaaucauuuugccucuuuucucugugcuucaauuaauaaaaaauggaaagaaccuagaucuaaaaaaaaaaaaaaaaaaaaaaaaaaaaaaaaaaaaaaaaaaaaaaaaaaaaaaaaaaaaaaaaugcaucccccccccccccccccccccccccccccccaaaggcucuuuucagagccaccagaauu

SEQ ID NO: 16882 - RNA, 1927 nt, Artificial Sequence
  mRNA product Design i-2 comprising derived and/or modified sequence from HRSV(Memphis-37)__AIY60640.1__F-del_DSCav1_mut4 (opt6)
ggggcgcugccuacggagguggcagccaucuccuucucggcaucaagcuuaccauggaacuaccaauacucaaaacaaacgcaauaacaacuauacuagccgcaguuacacucugcuucgcuucaucacaaaauaucacagaagaauuuuaccaaucuacauguucagcuguauccaaagguuaccuuucagcacuacgaacaggaugguauaccucaguaaucaccaucgaacucucgaacauaaaagaaaacaaauguaacggaaccgaugcuaaagucaagcucauaaaacaagaacuagacaaauacaaaaacgcaguaaccgaacuacaacuacuuaugcaaucaacaccagcugcaggcucaggcucagcaaucugcucaggcauagcuguaugcaaaguacuacaucuagaaggagaaguaaacaaaauaaaaaacgcauuauuaucaacaaauaaagcaguaguaucacuaucaaauggaguaucaguacucacauucaaaguacuagaucuaaaaaacuacauugacaaacaauuacuaccaauccucaacaaacaaucaugcucaauauccaacauagaaacaguaauagaauuucaacaaaaaaacaaucgacuacuagaaauaacaagagaauuuucagucaaugccggaguuacaacacccguaagcacuuacaugcuaaccaacucagaacuacuaucacuaauaaacgacaugccaauuacaaacgaccaaaaaaaacuaaugucaaauaacguacaaauaguacgucaacaaucauacucaauaaugugcauaauaaaagaagaaguccuagcauacguaguacaauuacccuuauauggcguaauagacacaccaugcuggaaacuacacacauccccacucugcaccaccaacaccaaagaaggcuccaacauaugucuaacccgaaccgacagagguugguauugugauaacgcuggcuccguaucauucuucccacaagcagaaacauguaaaguacaaucaaacagaguauucugcgauacaaugaauagcagaacacuaccaucagaaguaaacuuaugcaacaucgacaucuucaaucccaaauacgacugcaaaauaaugacauccaaaacugacguuucuucaagcguaauaacaucuuuaggagcaauaguauccugcuacggaaaaacuaaaugcacagcauccaauaaaaaccguggaauaauaaaaacauucucaaauggcugcgacuacgucucaaacaaaggcguagacaccguuagugucggaaacacacuauauugcguaaauaaacaagaaggaaaauccuuauacguaaaaggcgaaccaauaauuaacuucuaugacccccucguauuuccauccgaugaauuugacgcaucaaucucgcaaguaaacgaaaaaauaaaccaaagccuagcauucauaagaaaauccgacgaacuacuccacaauguaaauguaggaaaaucaacuaccaacauaaugauuacuacuauaauaauaguaauuauagucaucuuacuacuauuaauagcagucggauuauuccuauacugcaaagcaagauagggacuagugcaucacauuuaaaagcaucucagccuaccaugagaauaagagaaagaaaaugaagaucaauagcuuauucaucucuuuuucuuuuucguugguguaaagccaacacccugucuaaaaaacauaaauuucuuuaaucauuuugccucuuuucucugugcuucaauuaauaaaaaauggaaagaaccuagaucuaaaaaaaaaaaaaaaaaaaaaaaaaaaaaaaaaaaaaaaaaaaaaaaaaaaaaaaaaaaaaaaaugcaucccccccccccccccccccccccccccccccaaaggcucuuuucagagccaccagaauu

SEQ ID NO: 16883 - RNA, 1927 nt, Artificial Sequence
  mRNA product Design i-2 comprising derived and/or modified sequence from HRSV(Memphis-37)__AIY60640.1__F-del_DSCav1_mut4 (opt11)
ggggcgcugccuacggagguggcagccaucuccuucucggcaucaagcuuaccauggagcuccccauccuaaaaaccaacgccaucaccaccauccucgccgccgucacccuaugcuucgcuucaucacaaaacaucaccgaagaauuuuaccaaucuaccugcuccgccgucuccaaaggauaucucagcgcccuacggaccggcugguacaccuccgucauaaccaucgaacucaguaacaucaaagaaaacaaaugcaacggcaccgacgccaaagucaaacuaaucaaacaagaacuagauaaauacaaaaacgcggucaccgaacuacaacuccuaaugcaaagcacccccgccgccggauccggcuccgccauaugcuccggcauugcugucugcaaaguacuacaccucgagggcgaggucaacaaaaucaaaaacgcacuacucagcacuaauaaagccguaguaucccuaucaaacggugucucagucuuaacauucaaaguacucgaccuaaagaacuacaucgacaaacaacuccuacccauccucaacaagcaguccuguucuaucucaaacaucgaaaccgucaucgaauuucaacaaaagaacaaccgccuccucgaaaucacacgcgaguucuccgucaacgcaggaguaaccacccccgucuccaccuacaugcucacaaacucggaacuccucucacuaaucaacgacaugcccaucaccaacgaccaaaagaaacucaugagcaacaacguucaaaucguccgccaacaaucauacuccaucaugugcauaaucaaagaagaaguccuagcuuacgucguccagcugccccucuacggagucaucgacacgcccugcuggaaacuacacacaagcccccucugcaccaccaacaccaaagaaggcuccaacauaugccucacacggaccgaccgcgguugguacugcgacaacgccggcuccgucuccuucuucccccaagcagaaacuugcaaaguccaauccaaccgcguauucugcgacacaaugaacagcagaacacucccuagcgaagucaaccucugcaacaucgacauauucaaccccaaauacgacugcaaaaucaugacgucaaaaaccgacgucuccagcuccguuaucaccucacucggcgccaucgucagcugcuacggcaaaacuaaaugcaccgccuccaacaaaaaccgcggcaucauuaaaaccuucagcaacggcugcgacuacgucuccaacaaaggugucgauacgguauccgucggaaacacccuauacugcgucaacaaacaagaaggcaaaucucucuacgucaaaggcgaacccauaaucaauuucuacgacccccuagucuuccccuccgaugaauuugacgccuccaucagccaagucaacgagaaaaucaaccaaucacuagccuucauccggaaauccgacgaacuccuacacaacguaaacgucggcaaauccaccaccaauauaaugaucacaaccaucaucaucguaaucaucgucauccuccuccuacucaucgccgucggauuauucuuauacugcaaagcccgcuaaggacuagugcaucacauuuaaaagcaucucagccuaccaugagaauaagagaaagaaaaugaagaucaauagcuuauucaucucuuuuucuuuuucguugguguaaagccaacacccugucuaaaaaacauaaauuucuuuaaucauuuugccucuuuucucugugcuucaauuaauaaaaaauggaaagaaccuagaucuaaaaaaaaaaaaaaaaaaaaaaaaaaaaaaaaaaaaaaaaaaaaaaaaaaaaaaaaaaaaaaaaugcaucccccccccccccccccccccccccccccccaaaggcucuuuucagagccaccagaauu

SEQ ID NO: 16884 - RNA, 1762 nt, Artificial Sequence
  mRNA product Design i-3 comprising derived and/or modified sequence from HRSV(Memphis-37)__AIY60640.1__F-del_DSCav1_mut4 (opt1)
gggagaaagcuuaccauggagcugcccauccucaagaccaacgccaucaccacgauccuggccgcggugacccugugcuucgccagcucccagaacaucaccgaggaguucuaccagagcacgugcuccgccgucagcaagggcuaccucuccgcccugcgcaccgggugguacaccagcgugaucaccaucgagcuguccaacaucaaggagaacaagugcaacggcaccgacgccaaggugaagcucaucaagcaggagcuggacaaguacaagaacgcggucacggagcugcagcuccugaugcagagcaccccggccgccggcuccgggagcgcgaucugcuccggcaucgccgucugcaaggugcugcaccucgagggcgaggugaacaagaucaagaacgcccugcuguccaccaacaaggccgucgugagccucuccaacggggugagcguccugaccuucaaggugcuggaccucaagaacuacaucgacaagcagcugcugcccauccugaacaagcagagcugcuccaucagcaacaucgagaccgucaucgaguuccagcagaagaacaaccgccuccuggagaucacgcgggaguucagcgugaacgcgggcgugaccacccccgucuccaccuacaugcugacgaacagcgagcuccugucccugaucaacgacaugccgaucaccaacgaccagaagaagcucaugagcaacaacgugcagaucgugcgccagcaguccuacagcaucaugugcaucaucaaggaggagguccuggccuacguggugcagcugccccucuacggggucaucgacacccccugcuggaagcugcacaccagcccccugugcacgaccaacaccaaggagggcuccaacaucugccucacccggacggaccgcgggugguacugcgacaacgccggcagcguguccuucuucccgcaggccgagaccugcaagguccagagcaaccggguguucugcgacaccaugaacucccggacccugcccagcgaggugaaccucugcaacaucgacaucuucaaccccaaguacgacugcaagaucaugacguccaagaccgacgucagcuccagcgugaucaccucccugggcgccaucgugagcugcuacgggaagaccaagugcacggcgagcaacaagaaccgcggcaucaucaagaccuucuccaacgggugcgacuacgucagcaacaagggcguggacaccguguccgucggcaacacccuguacugcgugaacaagcaggagggcaagagccucuacgugaagggggagcccaucaucaacuucuacgacccgcuggucuuccccuccgacgaguucgacgccagcaucucccaggugaacgagaagaucaaccagagccuggccuucauccggaaguccgacgagcuccugcacaacgugaacgucggcaagagcaccacgaacaucaugaucaccaccaucaucaucgugaucaucgugauccugcugcuccugaucgccgucgggcuguuccucuacugcaaggcccgcugaggacuaguuauaagacugacuagcccgaugggccucccaacgggcccuccuccccuccuugcaccgagauuaauaaaaaaaaaaaaaaaaaaaaaaaaaaaaaaaaaaaaaaaaaaaaaaaaaaaaaaaaaaaaaaaaugcaucccccccccccccccccccccccccccccccaaaggcucuuuucagagccaccagaauu

SEQ ID NO: 16885 - RNA, 1762 nt, Artificial Sequence
  mRNA product Design i-3 comprising derived and/or modified sequence from HRSV(Memphis-37)__AIY60640.1__F-del_DSCav1_mut4 (opt1)
gggagaaagcuuaccauggagcugcccauccucaagaccaacgccaucaccacgauccuggccgcggugacccugugcuucgccagcucccagaacaucaccgaggaguucuaccagagcacgugcuccgccgucagcaagggcuaccucuccgcccugcgcaccgggugguacaccagcgugaucaccaucgagcuguccaacaucaaggagaacaagugcaacggcaccgacgccaaggugaagcucaucaagcaggagcuggacaaguacaagaacgcggucacggagcugcagcuccugaugcagagcaccccggccgccggguccggcagcgccaucugcuccgggaucgcggugugcaaggugcugcaccucgagggcgaggucaacaagaucaagaacgcccugcugagcaccaacaaggccguggugucccucagcaacggcgucuccgugcugaccuucaaggugcuggaccucaagaacuacaucgacaagcagcugcugcccauccucaacaagcagagcugcuccaucagcaacaucgagacggucaucgaguuccagcagaagaacaaccggcugcuggagaucacccgcgaguucuccgugaacgccggggugaccacccccgucagcacguacaugcucaccaacagcgagcugcugucccucaucaacgacaugcccaucaccaacgaccagaagaagcugaugagcaacaacgugcagaucgugcggcagcaguccuacagcaucaugugcaucaucaaggaggagguccuggccuacguggugcagcucccgcuguacggcgucaucgacacccccugcuggaagcugcacacgagcccccucugcaccaccaacaccaaggagggguccaacaucugccugacgcgcaccgaccggggcugguacugcgacaacgcgggguccgugagcuucuucccccaggccgagaccugcaaggugcaguccaaccgcgucuucugcgacaccaugaacagccggacgcucccguccgaggugaaccugugcaacaucgacaucuucaaccccaaguacgacugcaagaucaugaccagcaagaccgacgucuccagcuccgugaucaccagccugggcgccaucguguccugcuacggcaagacgaagugcaccgccagcaacaagaaccgggggaucaucaagaccuucuccaacggcugcgacuacgucagcaacaaggggguggacaccgugagcgucggcaacacgcucuacugcgugaacaagcaggagggcaagucccuguacgugaagggggagcccaucaucaacuucuacgacccccuggucuucccgagcgacgaguucgacgccuccaucagccaggugaacgagaagaucaaccagucccucgcguucauccgcaagagcgacgagcugcugcacaacgugaacgucggcaaguccaccaccaacaucaugaucaccaccaucaucaucgugaucaucgugauccuccugcugcucaucgccgucgggcuguuccuguacugcaaggcccggugaggacuaguuauaagacugacuagcccgaugggccucccaacgggcccuccuccccuccuugcaccgagauuaauaaaaaaaaaaaaaaaaaaaaaaaaaaaaaaaaaaaaaaaaaaaaaaaaaaaaaaaaaaaaaaaaugcaucccccccccccccccccccccccccccccccaaaggcucuuuucagagccaccagaauu

SEQ ID NO: 16886 - RNA, 1762 nt, Artificial Sequence
  mRNA product Design i-3 comprising derived and/or modified sequence from HRSV(Memphis-37)__AIY60640.1__F-del_DSCav1_mut4 (opt2)
gggagaaagcuuaccauggagcuccccauccucaagaccaacgccaucaccaccauccucgccgccgucacccucugcuucgccuccucccagaacaucaccgaggaguucuaccaguccaccugcuccgccgucuccaagggcuaccucuccgcccuccgcaccggcugguacaccuccgucaucaccaucgagcucuccaacaucaaggagaacaagugcaacggcaccgacgccaaggucaagcucaucaagcaggagcucgacaaguacaagaacgccgucaccgagcuccagcuccucaugcaguccacccccgccgccggcuccggcuccgccaucugcuccggcaucgccgucugcaagguccuccaccucgagggcgaggucaacaagaucaagaacgcccuccucuccaccaacaaggccgucgucucccucuccaacggcgucuccguccucaccuucaagguccucgaccucaagaacuacaucgacaagcagcuccuccccauccucaacaagcaguccugcuccaucuccaacaucgagaccgucaucgaguuccagcagaagaacaaccgccuccucgagaucacccgcgaguucuccgucaacgccggcgucaccacccccgucuccaccuacaugcucaccaacuccgagcuccucucccucaucaacgacaugcccaucaccaacgaccagaagaagcucauguccaacaacguccagaucguccgccagcaguccuacuccaucaugugcaucaucaaggaggagguccucgccuacgucguccagcucccccucuacggcgucaucgacacccccugcuggaagcuccacaccuccccccucugcaccaccaacaccaaggagggcuccaacaucugccucacccgcaccgaccgcggcugguacugcgacaacgccggcuccgucuccuucuucccccaggccgagaccugcaagguccaguccaaccgcgucuucugcgacaccaugaacucccgcacccuccccuccgaggucaaccucugcaacaucgacaucuucaaccccaaguacgacugcaagaucaugaccuccaagaccgacgucuccuccuccgucaucaccucccucggcgccaucgucuccugcuacggcaagaccaagugcaccgccuccaacaagaaccgcggcaucaucaagaccuucuccaacggcugcgacuacgucuccaacaagggcgucgacaccgucuccgucggcaacacccucuacugcgucaacaagcaggagggcaagucccucuacgucaagggcgagcccaucaucaacuucuacgacccccucgucuuccccuccgacgaguucgacgccuccaucucccaggucaacgagaagaucaaccagucccucgccuucauccgcaaguccgacgagcuccuccacaacgucaacgucggcaaguccaccaccaacaucaugaucaccaccaucaucaucgucaucaucgucauccuccuccuccucaucgccgucggccucuuccucuacugcaaggcccgcugaggacuaguuauaagacugacuagcccgaugggccucccaacgggcccuccuccccuccuugcaccgagauuaauaaaaaaaaaaaaaaaaaaaaaaaaaaaaaaaaaaaaaaaaaaaaaaaaaaaaaaaaaaaaaaaaugcaucccccccccccccccccccccccccccccccaaaggcucuuuucagagccaccagaauu

SEQ ID NO: 16887 - RNA, 1762 nt, Artificial Sequence
  mRNA product Design i-3 comprising derived and/or modified sequence from HRSV(Memphis-37)__AIY60640.1__F-del_DSCav1_mut4 (opt3)
gggagaaagcuuaccauggagcugcccauccucaagaccaacgccauuacaacuauacuugcugcagugacgcugugcuucgccagcucccagaauaucaccgaagaguuuuaccaaucuacauguucagcggucaguaaaggcuauuugagcgcuuuaagaacugggugguacaccuccguuauuacaaucgaacugucuaacauuaaggagaauaaaugcaacggaaccgacgccaaggugaaacuaaucaagcaggaacucgauaaguauaaaaaugcaguaacugagcugcagcuucugaugcagucgaccccugccgcugguucaggcagcgcaauauguagugggaucgccgugugcaaggucuugcaccucgagggagaagugaacaaaauuaagaaugcucugcuguccacaaacaaagccguugugucucucagcaauggcgucuccguguuaacguucaagguacuggaccuuaagaacuacaucgauaaacaauugcugccaauucuaaauaagcagucauguaguaucagcaacauagagacuguuauugaauuucagcagaaaaauaacaggcuccuggagaucacccgggaguucucugugaaugcgggugucacaacuccgguguccaccuauaugcuuacaaacucagaacuguugagccucauuaacgacaugcccaucaccaaugaucaaaagaaacugaugaguaacaaugugcagaucguccgccagcagucuuacuccauuaugugcauaaucaaggaggaaguuuuagcauaugugguacaacugccucucuacggggugauugacacgccauguuggaaacuucauacuagcccccugugcacaaccaacacuaaggagggaucgaauaucuguuugacacgaaccgaucguggcugguacugcgacaacgccggcucugucuccuuuuucccucaggcugaaacguguaaggugcagucaaauagaguguuuugcgauaccaugaacaguagaacacugccaagcgaggugaaucucugcaacauagacauuuucaaucccaaauaugauuguaagaucaugacuuccaaaaccgacgucucuagcucagugaucacaagucugggggccauuguauccugcuacggaaagacuaaauguaccgcaagcaacaagaauagggguaucauuaagacauuuucuaacggcugcgauuauguuucaaauaaagggguggacaccgucagugugggaaacacucuuuacugugucaacaagcaagagggcaaaagccuguaugugaagggugaaccuauaaucaauuucuacgacccauugguuuuuccguccgaugaguucgacgcuucuauuucgcagguuaacgagaaaaucaaucagagccucgccuuuauccggaaguccgaugaacuguuacacaacguaaaugucgggaagucaacgacaaacauuaugauaaccacuaucauuaucgugauuaucguuauacugcuacuccugaucgcggugggacuuuucuuguauugcaaagcccgcugaggacuaguuauaagacugacuagcccgaugggccucccaacgggcccuccuccccuccuugcaccgagauuaauaaaaaaaaaaaaaaaaaaaaaaaaaaaaaaaaaaaaaaaaaaaaaaaaaaaaaaaaaaaaaaaaugcaucccccccccccccccccccccccccccccccaaaggcucuuuucagagccaccagaauu

SEQ ID NO: 16888 - RNA, 1762 nt, Artificial Sequence
  mRNA product Design i-3 comprising derived and/or modified sequence from HRSV(Memphis-37)__AIY60640.1__F-del_DSCav1_mut4 (opt4)
gggagaaagcuuaccauggagcugcccauccugaagaccaacgccaucaccaccauccuggccgccgugacccugugcuucgccagcagccagaacaucaccgaggaguucuaccagagcaccugcagcgccgugagcaagggcuaccugagcgcccugagaaccggcugguacaccagcgugaucaccaucgagcugagcaacaucaaggagaacaagugcaacggcaccgacgccaaggugaagcugaucaagcaggagcuggacaaguacaagaacgccgugaccgagcugcagcugcugaugcagagcacccccgccgccggcagcggcagcgccaucugcagcggcaucgccgugugcaaggugcugcaccuggagggcgaggugaacaagaucaagaacgcccugcugagcaccaacaaggccguggugagccugagcaacggcgugagcgugcugaccuucaaggugcuggaccugaagaacuacaucgacaagcagcugcugcccauccugaacaagcagagcugcagcaucagcaacaucgagaccgugaucgaguuccagcagaagaacaacagacugcuggagaucaccagagaguucagcgugaacgccggcgugaccacccccgugagcaccuacaugcugaccaacagcgagcugcugagccugaucaacgacaugcccaucaccaacgaccagaagaagcugaugagcaacaacgugcagaucgugagacagcagagcuacagcaucaugugcaucaucaaggaggaggugcuggccuacguggugcagcugccccuguacggcgugaucgacacccccugcuggaagcugcacaccagcccccugugcaccaccaacaccaaggagggcagcaacaucugccugaccagaaccgacagaggcugguacugcgacaacgccggcagcgugagcuucuucccccaggccgagaccugcaaggugcagagcaacagaguguucugcgacaccaugaacagcagaacccugcccagcgaggugaaccugugcaacaucgacaucuucaaccccaaguacgacugcaagaucaugaccagcaagaccgacgugagcagcagcgugaucaccagccugggcgccaucgugagcugcuacggcaagaccaagugcaccgccagcaacaagaacagaggcaucaucaagaccuucagcaacggcugcgacuacgugagcaacaagggcguggacaccgugagcgugggcaacacccuguacugcgugaacaagcaggagggcaagagccuguacgugaagggcgagcccaucaucaacuucuacgacccccugguguuccccagcgacgaguucgacgccagcaucagccaggugaacgagaagaucaaccagagccuggccuucaucagaaagagcgacgagcugcugcacaacgugaacgugggcaagagcaccaccaacaucaugaucaccaccaucaucaucgugaucaucgugauccugcugcugcugaucgccgugggccuguuccuguacugcaaggccagaugaggacuaguuauaagacugacuagcccgaugggccucccaacgggcccuccuccccuccuugcaccgagauuaauaaaaaaaaaaaaaaaaaaaaaaaaaaaaaaaaaaaaaaaaaaaaaaaaaaaaaaaaaaaaaaaaugcaucccccccccccccccccccccccccccccccaaaggcucuuuucagagccaccagaauu

SEQ ID NO: 16889 - RNA, 1762 nt, Artificial Sequence
  mRNA product Design i-3 comprising derived and/or modified sequence from HRSV(Memphis-37)__AIY60640.1__F-del_DSCav1_mut4 (opt5)
gggagaaagcuuaccauggagcugcccauccucaagaccaacgccauuacaacgauccuggcugccgugacccuuugcuucgcgagcucccagaauauuacagaagaguuuuaccaaucuaccuguagcgcugucuccaaaggcuaucugucugcccucagaacagggugguacaccagcguuaucacaauugaacuguccaacaucaaggagaauaaaugcaacggaaccgacgccaaggugaaacuuaucaagcaggaacuggauaaguauaaaaaugcugugacggagcuccagcugcugaugcagucuaccccugccgcuggcagcggguccgccauuuguagcggaaucgcggucugcaaggugcuccaccuggagggcgaaguuaacaaaauuaagaaugcccuucugucuacaaacaaagcuguggucucccucagcaauggggugucuguucugaccuucaaggugcuugaccugaagaacuacaucgauaaacaacuccugccgauucugaauaagcaguccuguagcaucucuaacauugagacagucaucgaauuucagcagaaaaauaaccggcuccuggagaucacccgcgaguucuccgugaaugccggagugacgacacccgucagcaccuauaugcuuacaaacuccgaacugcucucucugauuaacgacaugccuaucaccaaugaucaaaagaaacuuaugagcaacaauguucagauugugagacagcaguccuacagcaucaugugcauuaucaaggaggaagugcuggcuuaugucgugcaacucccccuguacggcguuaucgacaccccuuguuggaaacugcauacaucuccccucugcacgaccaacacaaaggagggcuccaauauuugucugacccggacagaucgcgggugguacugcgacaacgccggaagcgugagcuuuuucccucaggcggaaaccuguaagguccagucuaauagaguguuuugcgauacgaugaacuccagaacacugccgucugagguuaaucucugcaacaucgacauuuucaaucccaaauaugauuguaagaucaugaccagcaaaaccgacguguccagcucugucauuacaucccugggcgccaucgugagcugcuacgggaagaccaaauguacagcuucuaacaagaaucggggaaucauuaagacguuuuccaacggcugcgauuaugucagcaauaaagggguggacaccguuuccgugggaaacacacuuuacugugucaacaagcaagagggcaaaucucuguaugugaagggcgaaccuaucauuaauuucuacgacccccucguuuuuccuagcgaugaguucgacgccuccaucucucaggugaacgaaaagauuaaucagagccuggcuuuuauccgcaaguccgaugagcugcuccacaacgucaauguggggaaaagcaccacaaacauuaugaucaccacgaucauuaucgugauuaucguuauucugcuucugcucaucgccgucggacuguuccuguauugcaaagccagaugaggacuaguuauaagacugacuagcccgaugggccucccaacgggcccuccuccccuccuugcaccgagauuaauaaaaaaaaaaaaaaaaaaaaaaaaaaaaaaaaaaaaaaaaaaaaaaaaaaaaaaaaaaaaaaaaugcaucccccccccccccccccccccccccccccccaaaggcucuuuucagagccaccagaauu

SEQ ID NO: 16890 - RNA, 1762 nt, Artificial Sequence
  mRNA product Design i-3 comprising derived and/or modified sequence from HRSV(Memphis-37)__AIY60640.1__F-del_DSCav1_mut4 (opt6)
gggagaaagcuuaccauggaacuaccaauacucaaaacaaacgcaauaacaacuauacuagccgcaguuacacucugcuucgcuucaucacaaaauaucacagaagaauuuuaccaaucuacauguucagcuguauccaaagguuaccuuucagcacuacgaacaggaugguauaccucaguaaucaccaucgaacucucgaacauaaaagaaaacaaauguaacggaaccgaugcuaaagucaagcucauaaaacaagaacuagacaaauacaaaaacgcaguaaccgaacuacaacuacuuaugcaaucaacaccagcugcaggcucaggcucagcaaucugcucaggcauagcuguaugcaaaguacuacaucuagaaggagaaguaaacaaaauaaaaaacgcauuauuaucaacaaauaaagcaguaguaucacuaucaaauggaguaucaguacucacauucaaaguacuagaucuaaaaaacuacauugacaaacaauuacuaccaauccucaacaaacaaucaugcucaauauccaacauagaaacaguaauagaauuucaacaaaaaaacaaucgacuacuagaaauaacaagagaauuuucagucaaugccggaguuacaacacccguaagcacuuacaugcuaaccaacucagaacuacuaucacuaauaaacgacaugccaauuacaaacgaccaaaaaaaacuaaugucaaauaacguacaaauaguacgucaacaaucauacucaauaaugugcauaauaaaagaagaaguccuagcauacguaguacaauuacccuuauauggcguaauagacacaccaugcuggaaacuacacacauccccacucugcaccaccaacaccaaagaaggcuccaacauaugucuaacccgaaccgacagagguugguauugugauaacgcuggcuccguaucauucuucccacaagcagaaacauguaaaguacaaucaaacagaguauucugcgauacaaugaauagcagaacacuaccaucagaaguaaacuuaugcaacaucgacaucuucaaucccaaauacgacugcaaaauaaugacauccaaaacugacguuucuucaagcguaauaacaucuuuaggagcaauaguauccugcuacggaaaaacuaaaugcacagcauccaauaaaaaccguggaauaauaaaaacauucucaaauggcugcgacuacgucucaaacaaaggcguagacaccguuagugucggaaacacacuauauugcguaaauaaacaagaaggaaaauccuuauacguaaaaggcgaaccaauaauuaacuucuaugacccccucguauuuccauccgaugaauuugacgcaucaaucucgcaaguaaacgaaaaaauaaaccaaagccuagcauucauaagaaaauccgacgaacuacuccacaauguaaauguaggaaaaucaacuaccaacauaaugauuacuacuauaauaauaguaauuauagucaucuuacuacuauuaauagcagucggauuauuccuauacugcaaagcaagauagggacuaguuauaagacugacuagcccgaugggccucccaacgggcccuccuccccuccuugcaccgagauuaauaaaaaaaaaaaaaaaaaaaaaaaaaaaaaaaaaaaaaaaaaaaaaaaaaaaaaaaaaaaaaaaaugcaucccccccccccccccccccccccccccccccaaaggcucuuuucagagccaccagaauu

SEQ ID NO: 16891 - RNA, 1762 nt, Artificial Sequence
  mRNA product Design i-3 comprising derived and/or modified sequence from HRSV(Memphis-37)__AIY60640.1__F-del_DSCav1_mut4 (opt11)
gggagaaagcuuaccauggagcuccccauccuaaaaaccaacgccaucaccaccauccucgccgccgucacccuaugcuucgcuucaucacaaaacaucaccgaagaauuuuaccaaucuaccugcuccgccgucuccaaaggauaucucagcgcccuacggaccggcugguacaccuccgucauaaccaucgaacucaguaacaucaaagaaaacaaaugcaacggcaccgacgccaaagucaaacuaaucaaacaagaacuagauaaauacaaaaacgcggucaccgaacuacaacuccuaaugcaaagcacccccgccgccggauccggcuccgccauaugcuccggcauugcugucugcaaaguacuacaccucgagggcgaggucaacaaaaucaaaaacgcacuacucagcacuaauaaagccguaguaucccuaucaaacggugucucagucuuaacauucaaaguacucgaccuaaagaacuacaucgacaaacaacuccuacccauccucaacaagcaguccuguucuaucucaaacaucgaaaccgucaucgaauuucaacaaaagaacaaccgccuccucgaaaucacacgcgaguucuccgucaacgcaggaguaaccacccccgucuccaccuacaugcucacaaacucggaacuccucucacuaaucaacgacaugcccaucaccaacgaccaaaagaaacucaugagcaacaacguucaaaucguccgccaacaaucauacuccaucaugugcauaaucaaagaagaaguccuagcuuacgucguccagcugccccucuacggagucaucgacacgcccugcuggaaacuacacacaagcccccucugcaccaccaacaccaaagaaggcuccaacauaugccucacacggaccgaccgcgguugguacugcgacaacgccggcuccgucuccuucuucccccaagcagaaacuugcaaaguccaauccaaccgcguauucugcgacacaaugaacagcagaacacucccuagcgaagucaaccucugcaacaucgacauauucaaccccaaauacgacugcaaaaucaugacgucaaaaaccgacgucuccagcuccguuaucaccucacucggcgccaucgucagcugcuacggcaaaacuaaaugcaccgccuccaacaaaaaccgcggcaucauuaaaaccuucagcaacggcugcgacuacgucuccaacaaaggugucgauacgguauccgucggaaacacccuauacugcgucaacaaacaagaaggcaaaucucucuacgucaaaggcgaacccauaaucaauuucuacgacccccuagucuuccccuccgaugaauuugacgccuccaucagccaagucaacgagaaaaucaaccaaucacuagccuucauccggaaauccgacgaacuccuacacaacguaaacgucggcaaauccaccaccaauauaaugaucacaaccaucaucaucguaaucaucgucauccuccuccuacucaucgccgucggauuauucuuauacugcaaagcccgcuaaggacuaguuauaagacugacuagcccgaugggccucccaacgggcccuccuccccuccuugcaccgagauuaauaaaaaaaaaaaaaaaaaaaaaaaaaaaaaaaaaaaaaaaaaaaaaaaaaaaaaaaaaaaaaaaaugcaucccccccccccccccccccccccccccccccaaaggcucuuuucagagccaccagaauu

SEQ ID NO: 16892 - protein, 536 aa, Artificial Sequence
  derived and/or modified protein sequence (artificial) from HRSV(Memphis-37)__AIY60640.1__F_DSCav1_mut5
MELPILKTNAITTILAAVTLCFASSQNITEEFYQSTCSAVSKGYLSALRTGWYTSVITIELSNIKENKCNGTDAKVKLIKQELDKYKNAVTELQLLMQSTPAAGSGSAIASGIAVCKVLHLEGEVNKIKNALLSTNKAVVSLSGCGVSVLTFKVLDLKNYIDKQLLPILNKQSCSISNIETVIEFQQKNNRLLEITREFSVNAGVTTPVSTYMLTNSELLSLINDMPITNDQKKLMSNNVQIVRQQSYSIMCIIKEEVLAYVVQLPLYGVIDTPCWKLHTSPLCTTNTKEGSNICLTRTDRGWYCDNAGSVSFFPQAETCKVQSNRVFCDTMNSRTLPSEVNLCNIDIFNPKYDCKIMTSKTDVSSSVITSLGAIVSCYGKTKCTASNKCRGIIKTFSNGCDYVSNKGVDTVSVGNTLYYVNKQEGKSLYVKGEPIINFYDPLVFPSDEFDASISQVNEKINQSLAFIRKSDELLHNVNVGKSTTNIMITTIIIVIIVILLLLIAVGLFLYCKARSTPVTLSKDQLSGINNIAFSN

SEQ ID NO: 16893 - RNA, 1611 nt, Artificial Sequence
  derived and/or modified CDS sequence (opt1) from HRSV(Memphis-37)__AIY60640.1__F_DSCav1_mut5
auggagcugcccauccucaagaccaacgccaucaccacgauccuggccgcggugacccugugcuucgccagcucccagaacaucaccgaggaguucuaccagagcacgugcuccgccgucagcaagggcuaccucuccgcccugcgcaccgggugguacaccagcgugaucaccaucgagcuguccaacaucaaggagaacaagugcaacggcaccgacgccaaggugaagcucaucaagcaggagcuggacaaguacaagaacgcggucacggagcugcagcuccugaugcagagcaccccggccgccggcuccgggagcgcgaucgccuccggcaucgccgucugcaaggugcugcaccucgagggcgaggugaacaagaucaagaacgcccugcuguccaccaacaaggccgucgugagccucuccggcugcggggugagcguccugaccuucaaggugcuggaccucaagaacuacaucgacaagcagcugcugcccauccugaacaagcagagcugcuccaucagcaacaucgagaccgucaucgaguuccagcagaagaacaaccgccuccuggagaucacgcgggaguucagcgugaacgcgggcgugaccacccccgucuccaccuacaugcugacgaacagcgagcuccugucccugaucaacgacaugccgaucaccaacgaccagaagaagcucaugagcaacaacgugcagaucgugcgccagcaguccuacagcaucaugugcaucaucaaggaggagguccuggccuacguggugcagcugccccucuacggggucaucgacacccccugcuggaagcugcacaccagcccccugugcacgaccaacaccaaggagggcuccaacaucugccucacccggacggaccgcgggugguacugcgacaacgccggcagcguguccuucuucccgcaggccgagaccugcaagguccagagcaaccggguguucugcgacaccaugaacucccggacccugcccagcgaggugaaccucugcaacaucgacaucuucaaccccaaguacgacugcaagaucaugacguccaagaccgacgucagcuccagcgugaucaccucccugggcgccaucgugagcugcuacgggaagaccaagugcacggcgagcaacaagugccgcggcaucaucaagaccuucuccaacgggugcgacuacgucagcaacaagggcguggacaccguguccgucggcaacacccuguacuacgugaacaagcaggagggcaagagccucuacgugaagggggagcccaucaucaacuucuacgacccgcuggucuuccccuccgacgaguucgacgccagcaucucccaggugaacgagaagaucaaccagagccuggccuucauccggaaguccgacgagcuccugcacaacgugaacgucggcaagagcaccacgaacaucaugaucaccaccaucaucaucgugaucaucgugauccugcugcuccugaucgccgucgggcuguuccucuacugcaaggcccgcuccacccccgugacgcugagcaaggaccagcuguccgggaucaacaacaucgcguucagcaacuga

SEQ ID NO: 16894 - RNA, 1611 nt, Artificial Sequence
  derived and/or modified CDS sequence (opt1) from HRSV(Memphis-37)__AIY60640.1__F_DSCav1_mut5
auggagcugcccauccucaagaccaacgccaucaccacgauccuggccgcggugacccugugcuucgccagcucccagaacaucaccgaggaguucuaccagagcacgugcuccgccgucagcaagggcuaccucuccgcccugcgcaccgggugguacaccagcgugaucaccaucgagcuguccaacaucaaggagaacaagugcaacggcaccgacgccaaggugaagcucaucaagcaggagcuggacaaguacaagaacgcggucacggagcugcagcuccugaugcagagcaccccggccgccggguccggcagcgccaucgcguccgggaucgccgugugcaaggugcugcaccucgagggcgaggucaacaagaucaagaacgcccugcugagcaccaacaaggccguggugucccucagcggcugcggggucuccgugcugaccuucaaggugcuggaccucaagaacuacaucgacaagcagcugcugcccauccucaacaagcagagcugcuccaucagcaacaucgagacggucaucgaguuccagcagaagaacaaccggcugcuggagaucacccgcgaguucuccgugaacgccggcgugaccacccccgucagcacguacaugcucaccaacagcgagcugcugucccucaucaacgacaugcccaucaccaacgaccagaagaagcugaugagcaacaacgugcagaucgugcggcagcaguccuacagcaucaugugcaucaucaaggaggagguccuggcguacguggugcagcucccgcuguacggggucaucgacacccccugcuggaagcugcacacgagcccccucugcaccaccaacaccaaggagggcuccaacaucugccugacgcgcaccgaccgggggugguacugcgacaacgccggcuccgugagcuucuucccccaggccgagaccugcaaggugcaguccaaccgcgucuucugcgacaccaugaacagccggacgcucccguccgaggugaaccugugcaacaucgacaucuucaaccccaaguacgacugcaagaucaugaccagcaagaccgacgucuccagcuccgugaucaccagccugggcgccaucguguccugcuacgggaagacgaagugcaccgccagcaacaagugccggggcaucaucaagaccuucuccaacgggugcgacuacgucagcaacaagggcguggacaccgugagcgucggcaacacgcucuacuacgugaacaagcaggaggggaagucccuguacgugaagggcgagcccaucaucaacuucuacgacccccuggucuucccgagcgacgaguucgacgcguccaucagccaggugaacgagaagaucaaccagucccucgccuucauccgcaagagcgacgagcugcugcacaacgugaacgucgggaaguccaccaccaacaucaugaucaccaccaucaucaucgugaucaucgugauccuccugcugcucaucgccgucggccuguuccuguacugcaaggcccggagcacgcccgugacccuguccaaggaccagcucagcgggaucaacaacaucgccuucuccaacuga

SEQ ID NO: 16895 - RNA, 1611 nt, Artificial Sequence
  derived and/or modified CDS sequence (opt2) from HRSV(Memphis-37)__AIY60640.1__F_DSCav1_mut5
auggagcuccccauccucaagaccaacgccaucaccaccauccucgccgccgucacccucugcuucgccuccucccagaacaucaccgaggaguucuaccaguccaccugcuccgccgucuccaagggcuaccucuccgcccuccgcaccggcugguacaccuccgucaucaccaucgagcucuccaacaucaaggagaacaagugcaacggcaccgacgccaaggucaagcucaucaagcaggagcucgacaaguacaagaacgccgucaccgagcuccagcuccucaugcaguccacccccgccgccggcuccggcuccgccaucgccuccggcaucgccgucugcaagguccuccaccucgagggcgaggucaacaagaucaagaacgcccuccucuccaccaacaaggccgucgucucccucuccggcugcggcgucuccguccucaccuucaagguccucgaccucaagaacuacaucgacaagcagcuccuccccauccucaacaagcaguccugcuccaucuccaacaucgagaccgucaucgaguuccagcagaagaacaaccgccuccucgagaucacccgcgaguucuccgucaacgccggcgucaccacccccgucuccaccuacaugcucaccaacuccgagcuccucucccucaucaacgacaugcccaucaccaacgaccagaagaagcucauguccaacaacguccagaucguccgccagcaguccuacuccaucaugugcaucaucaaggaggagguccucgccuacgucguccagcucccccucuacggcgucaucgacacccccugcuggaagcuccacaccuccccccucugcaccaccaacaccaaggagggcuccaacaucugccucacccgcaccgaccgcggcugguacugcgacaacgccggcuccgucuccuucuucccccaggccgagaccugcaagguccaguccaaccgcgucuucugcgacaccaugaacucccgcacccuccccuccgaggucaaccucugcaacaucgacaucuucaaccccaaguacgacugcaagaucaugaccuccaagaccgacgucuccuccuccgucaucaccucccucggcgccaucgucuccugcuacggcaagaccaagugcaccgccuccaacaagugccgcggcaucaucaagaccuucuccaacggcugcgacuacgucuccaacaagggcgucgacaccgucuccgucggcaacacccucuacuacgucaacaagcaggagggcaagucccucuacgucaagggcgagcccaucaucaacuucuacgacccccucgucuuccccuccgacgaguucgacgccuccaucucccaggucaacgagaagaucaaccagucccucgccuucauccgcaaguccgacgagcuccuccacaacgucaacgucggcaaguccaccaccaacaucaugaucaccaccaucaucaucgucaucaucgucauccuccuccuccucaucgccgucggccucuuccucuacugcaaggcccgcuccacccccgucacccucuccaaggaccagcucuccggcaucaacaacaucgccuucuccaacuga

SEQ ID NO: 16896 - RNA, 1611 nt, Artificial Sequence
  derived and/or modified CDS sequence (opt3) from HRSV(Memphis-37)__AIY60640.1__F_DSCav1_mut5
auggagcugcccauccucaagaccaacgccauuacaacuauacuugcugcagugacgcugugcuucgccagcucccagaauaucaccgaagaguuuuaccaaucuacauguucagcggucaguaaaggcuauuugagcgcuuuaagaacugggugguacaccuccguuauuacaaucgaacugucuaacauuaaggagaauaaaugcaacggaaccgacgccaaggugaaacuaaucaagcaggaacucgauaaguauaaaaaugcaguaacugagcugcagcuucugaugcagucgaccccugccgcugguucaggcagcgcaauagccagugggaucgcuguguguaaggucuugcaccucgagggagaagugaacaaaauuaagaaugcccugcuguccacaaacaaagcgguugugucucucagcggcugcggugucuccguguuaacguucaagguacuggaccuuaagaauuacaucgauaaacaauugcugccaauucuaaacaagcagucauguaguaucagcaauauagagacuguuauugaauuucagcagaaaaacaauaggcuccuggagaucacccgggaguucucugugaacgcaggggucacaacuccgguguccaccuauaugcuuacaaauucagaacuguugagccucauuaacgacaugcccaucaccaacgaucaaaagaaacugaugaguaauaacgugcagaucguccgccagcagucuuacuccauuaugugcauaaucaaggaggaaguuuuagccuaugugguacaacugccucucuacggagugauugacacgccauguuggaaacuucauacuagcccccugugcacaaccaauacuaaggagggcucgaacaucuguuugacacgaaccgaucguggcugguacugcgacaaugcugggucugucuccuuuuucccucaggccgaaacguguaaggugcagucaaacagaguguuuugcgauaccaugaauaguagaacacugccaagcgaggugaaccucugcaauauagacauuuucaaccccaaauaugauuguaagaucaugacuuccaaaaccgacgucucuagcucagugaucacaagucugggagcaauuguauccugcuacgguaagacuaaauguaccgcuagcaauaagugcaggggcaucauuaagacauuuucuaacgggugugauuauguuucaaauaaaggaguggacaccgucagugugggcaacacucuuuacuaugucaauaagcaagaggguaaaagccuguacgugaagggggaaccuauaaucaacuucuaugacccauugguuuuuccguccgaugaguucgacgccucuauuucgcagguuaacgagaaaaucaaucagagccucgcguuuauccggaaguccgaugaacuguuacacaacguaaaugucggaaagucaacgacaaacauuaugauaaccacuaucauuaucgugauuaucguuauacugcuacuccugaucgccgugggccuuuucuuguacugcaaagcacgcaguacccccgucacacugucuaaggaccagcucagcggcauuaauaacaucgcuuucuccaauuga

SEQ ID NO: 16897 - RNA, 1611 nt, Artificial Sequence
  derived and/or modified CDS sequence (opt4) from HRSV(Memphis-37)__AIY60640.1__F_DSCav1_mut5
auggagcugcccauccugaagaccaacgccaucaccaccauccuggccgccgugacccugugcuucgccagcagccagaacaucaccgaggaguucuaccagagcaccugcagcgccgugagcaagggcuaccugagcgcccugagaaccggcugguacaccagcgugaucaccaucgagcugagcaacaucaaggagaacaagugcaacggcaccgacgccaaggugaagcugaucaagcaggagcuggacaaguacaagaacgccgugaccgagcugcagcugcugaugcagagcacccccgccgccggcagcggcagcgccaucgccagcggcaucgccgugugcaaggugcugcaccuggagggcgaggugaacaagaucaagaacgcccugcugagcaccaacaaggccguggugagccugagcggcugcggcgugagcgugcugaccuucaaggugcuggaccugaagaacuacaucgacaagcagcugcugcccauccugaacaagcagagcugcagcaucagcaacaucgagaccgugaucgaguuccagcagaagaacaacagacugcuggagaucaccagagaguucagcgugaacgccggcgugaccacccccgugagcaccuacaugcugaccaacagcgagcugcugagccugaucaacgacaugcccaucaccaacgaccagaagaagcugaugagcaacaacgugcagaucgugagacagcagagcuacagcaucaugugcaucaucaaggaggaggugcuggccuacguggugcagcugccccuguacggcgugaucgacacccccugcuggaagcugcacaccagcccccugugcaccaccaacaccaaggagggcagcaacaucugccugaccagaaccgacagaggcugguacugcgacaacgccggcagcgugagcuucuucccccaggccgagaccugcaaggugcagagcaacagaguguucugcgacaccaugaacagcagaacccugcccagcgaggugaaccugugcaacaucgacaucuucaaccccaaguacgacugcaagaucaugaccagcaagaccgacgugagcagcagcgugaucaccagccugggcgccaucgugagcugcuacggcaagaccaagugcaccgccagcaacaagugcagaggcaucaucaagaccuucagcaacggcugcgacuacgugagcaacaagggcguggacaccgugagcgugggcaacacccuguacuacgugaacaagcaggagggcaagagccuguacgugaagggcgagcccaucaucaacuucuacgacccccugguguuccccagcgacgaguucgacgccagcaucagccaggugaacgagaagaucaaccagagccuggccuucaucagaaagagcgacgagcugcugcacaacgugaacgugggcaagagcaccaccaacaucaugaucaccaccaucaucaucgugaucaucgugauccugcugcugcugaucgccgugggccuguuccuguacugcaaggccagaagcacccccgugacccugagcaaggaccagcugagcggcaucaacaacaucgccuucagcaacuga

SEQ ID NO: 16898 - RNA, 1611 nt, Artificial Sequence
  derived and/or modified CDS sequence (opt5) from HRSV(Memphis-37)__AIY60640.1__F_DSCav1_mut5
auggagcugcccauccucaagaccaacgccauuacaacgauccuggcugccgugacccuuugcuucgcgagcucccagaauauuacagaagaguuuuaccaaucuaccuguagcgcugucuccaaaggcuaucugucugcccucagaacagggugguacaccagcguuaucacaauugaacuguccaacaucaaggagaauaaaugcaacggaaccgacgccaaggugaaacuuaucaagcaggaacuggauaaguauaaaaaugcugugacggagcuccagcugcugaugcagucuaccccugccgcuggcagcggguccgccauugcgagcggaaucgccgucuguaaggugcuccaccuggagggcgaaguuaacaaaauuaagaaugcccuucugucuacaaacaaagcuguggucucccucagcgggugcggagugucuguucugaccuucaaggugcuugaccugaagaauuacaucgauaaacaacuccugccgauucugaacaagcaguccuguagcaucucuaauauugagacagucaucgaauuucagcagaaaaacaaucggcuccuggagaucacccgcgaguucuccgugaacgcuggcgugacgacacccgucagcaccuauaugcuuacaaauuccgaacugcucucucugauuaacgacaugccuaucaccaacgaucaaaagaaacuuaugagcaauaacguucagauugugagacagcaguccuacagcaucaugugcauuaucaaggaggaagugcuggccuaugucgugcaacucccccuguacggcguuaucgacaccccuuguuggaaacugcauacaucuccccucugcacgaccaauacaaaggagggguccaacauuugucugacccggacagaucgcggaugguacugcgacaaugcgggcagcgugagcuuuuucccucaggccgaaaccuguaagguccagucuaacagaguguuuugcgauacgaugaacuccagaacacugccgucugagguuaaucucugcaauaucgacauuuucaaccccaaauaugauuguaagaucaugaccagcaaaaccgacguguccagcucugucauuacaucccugggggcuaucgugagcugcuacggaaagaccaaauguacagccucuaauaagugccggggcaucauuaagacguuuuccaacgggugugauuaugucagcaauaaaggaguggacaccguuuccgugggcaacacacuuuacuaugucaauaagcaagagggcaaaucucuguacgugaagggggaaccuaucauuaacuucuaugacccccucguuuuuccuagcgaugaguucgacgcuuccaucucucaggugaacgagaaaauuaaucagagccuggccuuuauccgcaaguccgaugaacugcuccacaacgucaaugugggaaagagcaccacaaacauuaugaucaccacgaucauuaucgugauuaucguuauucugcuucugcucaucgccgucggccuguuccuguacugcaaagcuagaucuacccccgugacacuuuccaaggaccagcucagcgggaucaauaacauugcguucucuaauuga

SEQ ID NO: 16899 - RNA, 1611 nt, Artificial Sequence
  derived and/or modified CDS sequence (opt6) from HRSV(Memphis-37)__AIY60640.1__F_DSCav1_mut5
auggaacucccaaucuuaaaaacaaacgcaauaacuacaauacucgcagcaguaacacuaugcuucgcaucaucacaaaacauaaccgaagaauuuuaccaaaguacaugcucagcaguaucaaaagguuaccucucagcccuaagaaccggaugguacacaucaguaaucacuauagaacuauccaauauaaaagaaaacaaaugcaacggcacugacgcaaaaguuaaauuaauuaaacaagaacucgauaaauauaaaaaugcaguaacagaacuacaacuacuaaugcaaagcaccccagcugcaggaagcggaucagcaaucgcaucaggaauagcaguauguaaaguacuacaccuagaaggagaagucaacaaaaucaaaaaugcacuacuaaguacaaacaaagcuguaguaagccuaucagguugcggaguaucaguauuaacauuuaaaguccucgaccuaaaaaauuacauagauaaacaacucuuaccaauacucaauaaacaaaguugcagcaucagcaacauagaaacagucaucgaauuucaacaaaaaaauaauagacuccuagaaauaacacgugaauuuucaguaaaugcuggaguaacaacaccaguaucuacauauaugcuaacaaauagcgaacuacucucacuuauuaacgauaugcccauaacaaacgaccaaaaaaaacuuaugucaaacaauguucaaauaguuagacaacaauccuacagcauaaugugcauaaucaaagaagaaguucuagcuuacguaguacaacuaccacucuaugguguuaucgacacccccuguuggaaacuucacacaucaccacuaugcacaacaaacacaaaagaaggaucaaauauuugcuuaacaagaacagauagaggaugguauugcgauaaugccggaucaguaucauuuuuuccacaagcagaaacauguaaaguacaauccaaccgaguauuuugcgacaccaugaacuccagaacacuaccaucugaagucaaccuauguaauauagauauauuuaacccaaaauaugacuguaaaaucaugacaucaaaaacugauguaaguucuaguguaauaaccagcuuaggcgccauaguaagcuguuacgguaaaacaaaaugcacagcaagcaacaaaugccgcgguauaauaaaaacauucucaaacggaugcgauuauguaaguaacaaaggaguagauacagucuccguaggcaacacauuauacuacguaaacaaacaagaaggaaaaucacuauauguaaaaggagaaccaaucauaaauuucuacgacccacuuguauuccccagcgacgaauuugaugcuuccauuucacaagucaacgaaaaaauaaaccaaucauuagccuucauaagaaaaucagacgaauuauuacauaauguuaaugucggcaaauccacaacuaauauaaugauaacaacaaucauaauaguaauaaucguuauacuacuauuacucauagcaguaggacucuucuuauauuguaaagccagauccaccccaguaacacucucaaaagaccaauuaucaggaauuaauaacaucgcauuuucaaacuaa

SEQ ID NO: 16900 - RNA, 1611 nt, Artificial Sequence
  derived and/or modified CDS sequence (opt11) from HRSV(Memphis-37)__AIY60640.1__F_DSCav1_mut5
auggaacuccccauccuuaaaaccaacgcaaucaccacaauacucgccgccgucacccucugcuuugcguccucccagaacaucaccgaagaguucuaccaaucgaccugcagcgccgucagcaagggcuaccucucagcccuccgaacaggcugguacacauccgucaucaccaucgaacucucaaacauaaaagaaaacaaguguaacggcaccgacgcgaaaguuaaacucaucaaacaagaacucgauaaauacaaaaacgcaguaaccgaacuacaacuccuaaugcaauccacacccgcagccggcagcggcuccgcaaucgccuccggcauagcagucugcaaaguccuccaccucgaaggagaagucaauaaaaucaaaaacgcccuccuauccaccaacaaagcgguugucucccuguccggaugcggaguuagcguccuaaccuucaaggugcucgaccucaaaaacuacauagacaaacaacuacuccccauacucaacaaacaaucaugcuccaucagcaacaucgagaccgucaucgaguuccaacagaaaaacaaccgccuccucgaaaucacacgagaguucuccguaaacgccggcgucacaacccccguuuccacuuacaugcucacaaacagcgaacuccucucccucaucaacgacaugccaaucaccaacgaccaaaagaaacucauguccaacaacguccaaaucguccgccaacaaagcuacagcauaaugugcaucauaaaagaagaaguacucgcguacguaguccaacuaccccuauacggcgucaucgacacccccugcuggaaacugcacacuucuccccucuguacaaccaacacuaaagaaggcucgaacaucugccucaccagaacagaccgaggaugguacugcgacaacgccggcuccgucagcuucuucccccaggccgaaacaugcaaaguacaaucaaaccgagucuucugcgacacaaugaacagcagaacucuacccuccgaaguuaaccuaugcaacaucgacaucuucaaccccaaauacgacugcaaaauaaugaccucaaaaacagacguguccagcuccguuaucaccucucucggagccaucguauccuguuauggaaaaaccaaaugcaccgccucaaacaaaugccgaggcauaaucaaaacauucucaaauggaugcgacuacguauccaacaaaggagucgacaccgucagcgugggcaauacccucuacuacgucaacaaacaggaagggaaaucccucuauguaaagggcgagcccauuauuaacuucuaugacccccucguguucccaagcgacgaguucgacgccuccauaucacaagucaaugagaaaaucaaccaaucacuagcuuucauucgcaaauccgacgaacuccuucacaacgucaacgucggcaaauccaccaccaacaucaugaucaccaccauaauuaucgucauuaucgucauacuacuccuacucaucgccgucggccucuuccucuauugcaaagcacgcucgacacccgucacccuuucaaaagaccaacuuuccggcauaaacaacauagccuucagcaacuag

SEQ ID NO: 16901 - RNA, 1887 nt, Artificial Sequence
  mRNA product Design a-1 comprising derived and/or modified sequence from HRSV(Memphis-37)__AIY60640.1__F_DSCav1_mut5 (opt1)
gggagagucccgcagucggcguccagcggcucugcuuguucgugugugugucguugcaggccuuauucaagcuuaccauggagcugcccauccucaagaccaacgccaucaccacgauccuggccgcggugacccugugcuucgccagcucccagaacaucaccgaggaguucuaccagagcacgugcuccgccgucagcaagggcuaccucuccgcccugcgcaccgggugguacaccagcgugaucaccaucgagcuguccaacaucaaggagaacaagugcaacggcaccgacgccaaggugaagcucaucaagcaggagcuggacaaguacaagaacgcggucacggagcugcagcuccugaugcagagcaccccggccgccggcuccgggagcgcgaucgccuccggcaucgccgucugcaaggugcugcaccucgagggcgaggugaacaagaucaagaacgcccugcuguccaccaacaaggccgucgugagccucuccggcugcggggugagcguccugaccuucaaggugcuggaccucaagaacuacaucgacaagcagcugcugcccauccugaacaagcagagcugcuccaucagcaacaucgagaccgucaucgaguuccagcagaagaacaaccgccuccuggagaucacgcgggaguucagcgugaacgcgggcgugaccacccccgucuccaccuacaugcugacgaacagcgagcuccugucccugaucaacgacaugccgaucaccaacgaccagaagaagcucaugagcaacaacgugcagaucgugcgccagcaguccuacagcaucaugugcaucaucaaggaggagguccuggccuacguggugcagcugccccucuacggggucaucgacacccccugcuggaagcugcacaccagcccccugugcacgaccaacaccaaggagggcuccaacaucugccucacccggacggaccgcgggugguacugcgacaacgccggcagcguguccuucuucccgcaggccgagaccugcaagguccagagcaaccggguguucugcgacaccaugaacucccggacccugcccagcgaggugaaccucugcaacaucgacaucuucaaccccaaguacgacugcaagaucaugacguccaagaccgacgucagcuccagcgugaucaccucccugggcgccaucgugagcugcuacgggaagaccaagugcacggcgagcaacaagugccgcggcaucaucaagaccuucuccaacgggugcgacuacgucagcaacaagggcguggacaccguguccgucggcaacacccuguacuacgugaacaagcaggagggcaagagccucuacgugaagggggagcccaucaucaacuucuacgacccgcuggucuuccccuccgacgaguucgacgccagcaucucccaggugaacgagaagaucaaccagagccuggccuucauccggaaguccgacgagcuccugcacaacgugaacgucggcaagagcaccacgaacaucaugaucaccaccaucaucaucgugaucaucgugauccugcugcuccugaucgccgucgggcuguuccucuacugcaaggcccgcuccacccccgugacgcugagcaaggaccagcuguccgggaucaacaacaucgcguucagcaacugaggacuagucccuguucccagagcccacuuuuuuuucuuuuuuugaaauaaaauagccugucuuucagaucuaaaaaaaaaaaaaaaaaaaaaaaaaaaaaaaaaaaaaaaaaaaaaaaaaaaaaaaaaaaaaaaaugcaucccccccccccccccccccccccccccccccaaaggcucuuuucagagccaccagaauu

SEQ ID NO: 16902 - RNA, 1887 nt, Artificial Sequence
  mRNA product Design a-1 comprising derived and/or modified sequence from HRSV(Memphis-37)__AIY60640.1__F_DSCav1_mut5 (opt1)
gggagagucccgcagucggcguccagcggcucugcuuguucgugugugugucguugcaggccuuauucaagcuuaccauggagcugcccauccucaagaccaacgccaucaccacgauccuggccgcggugacccugugcuucgccagcucccagaacaucaccgaggaguucuaccagagcacgugcuccgccgucagcaagggcuaccucuccgcccugcgcaccgggugguacaccagcgugaucaccaucgagcuguccaacaucaaggagaacaagugcaacggcaccgacgccaaggugaagcucaucaagcaggagcuggacaaguacaagaacgcggucacggagcugcagcuccugaugcagagcaccccggccgccggguccggcagcgccaucgcguccgggaucgccgugugcaaggugcugcaccucgagggcgaggucaacaagaucaagaacgcccugcugagcaccaacaaggccguggugucccucagcggcugcggggucuccgugcugaccuucaaggugcuggaccucaagaacuacaucgacaagcagcugcugcccauccucaacaagcagagcugcuccaucagcaacaucgagacggucaucgaguuccagcagaagaacaaccggcugcuggagaucacccgcgaguucuccgugaacgccggcgugaccacccccgucagcacguacaugcucaccaacagcgagcugcugucccucaucaacgacaugcccaucaccaacgaccagaagaagcugaugagcaacaacgugcagaucgugcggcagcaguccuacagcaucaugugcaucaucaaggaggagguccuggcguacguggugcagcucccgcuguacggggucaucgacacccccugcuggaagcugcacacgagcccccucugcaccaccaacaccaaggagggcuccaacaucugccugacgcgcaccgaccgggggugguacugcgacaacgccggcuccgugagcuucuucccccaggccgagaccugcaaggugcaguccaaccgcgucuucugcgacaccaugaacagccggacgcucccguccgaggugaaccugugcaacaucgacaucuucaaccccaaguacgacugcaagaucaugaccagcaagaccgacgucuccagcuccgugaucaccagccugggcgccaucguguccugcuacgggaagacgaagugcaccgccagcaacaagugccggggcaucaucaagaccuucuccaacgggugcgacuacgucagcaacaagggcguggacaccgugagcgucggcaacacgcucuacuacgugaacaagcaggaggggaagucccuguacgugaagggcgagcccaucaucaacuucuacgacccccuggucuucccgagcgacgaguucgacgcguccaucagccaggugaacgagaagaucaaccagucccucgccuucauccgcaagagcgacgagcugcugcacaacgugaacgucgggaaguccaccaccaacaucaugaucaccaccaucaucaucgugaucaucgugauccuccugcugcucaucgccgucggccuguuccuguacugcaaggcccggagcacgcccgugacccuguccaaggaccagcucagcgggaucaacaacaucgccuucuccaacugaggacuagucccuguucccagagcccacuuuuuuuucuuuuuuugaaauaaaauagccugucuuucagaucuaaaaaaaaaaaaaaaaaaaaaaaaaaaaaaaaaaaaaaaaaaaaaaaaaaaaaaaaaaaaaaaaugcaucccccccccccccccccccccccccccccccaaaggcucuuuucagagccaccagaauu

SEQ ID NO: 16903 - RNA, 1887 nt, Artificial Sequence
  mRNA product Design a-1 comprising derived and/or modified sequence from HRSV(Memphis-37)__AIY60640.1__F_DSCav1_mut5 (opt2)
gggagagucccgcagucggcguccagcggcucugcuuguucgugugugugucguugcaggccuuauucaagcuuaccauggagcuccccauccucaagaccaacgccaucaccaccauccucgccgccgucacccucugcuucgccuccucccagaacaucaccgaggaguucuaccaguccaccugcuccgccgucuccaagggcuaccucuccgcccuccgcaccggcugguacaccuccgucaucaccaucgagcucuccaacaucaaggagaacaagugcaacggcaccgacgccaaggucaagcucaucaagcaggagcucgacaaguacaagaacgccgucaccgagcuccagcuccucaugcaguccacccccgccgccggcuccggcuccgccaucgccuccggcaucgccgucugcaagguccuccaccucgagggcgaggucaacaagaucaagaacgcccuccucuccaccaacaaggccgucgucucccucuccggcugcggcgucuccguccucaccuucaagguccucgaccucaagaacuacaucgacaagcagcuccuccccauccucaacaagcaguccugcuccaucuccaacaucgagaccgucaucgaguuccagcagaagaacaaccgccuccucgagaucacccgcgaguucuccgucaacgccggcgucaccacccccgucuccaccuacaugcucaccaacuccgagcuccucucccucaucaacgacaugcccaucaccaacgaccagaagaagcucauguccaacaacguccagaucguccgccagcaguccuacuccaucaugugcaucaucaaggaggagguccucgccuacgucguccagcucccccucuacggcgucaucgacacccccugcuggaagcuccacaccuccccccucugcaccaccaacaccaaggagggcuccaacaucugccucacccgcaccgaccgcggcugguacugcgacaacgccggcuccgucuccuucuucccccaggccgagaccugcaagguccaguccaaccgcgucuucugcgacaccaugaacucccgcacccuccccuccgaggucaaccucugcaacaucgacaucuucaaccccaaguacgacugcaagaucaugaccuccaagaccgacgucuccuccuccgucaucaccucccucggcgccaucgucuccugcuacggcaagaccaagugcaccgccuccaacaagugccgcggcaucaucaagaccuucuccaacggcugcgacuacgucuccaacaagggcgucgacaccgucuccgucggcaacacccucuacuacgucaacaagcaggagggcaagucccucuacgucaagggcgagcccaucaucaacuucuacgacccccucgucuuccccuccgacgaguucgacgccuccaucucccaggucaacgagaagaucaaccagucccucgccuucauccgcaaguccgacgagcuccuccacaacgucaacgucggcaaguccaccaccaacaucaugaucaccaccaucaucaucgucaucaucgucauccuccuccuccucaucgccgucggccucuuccucuacugcaaggcccgcuccacccccgucacccucuccaaggaccagcucuccggcaucaacaacaucgccuucuccaacugaggacuagucccuguucccagagcccacuuuuuuuucuuuuuuugaaauaaaauagccugucuuucagaucuaaaaaaaaaaaaaaaaaaaaaaaaaaaaaaaaaaaaaaaaaaaaaaaaaaaaaaaaaaaaaaaaugcaucccccccccccccccccccccccccccccccaaaggcucuuuucagagccaccagaauu

SEQ ID NO: 16904 - RNA, 1887 nt, Artificial Sequence
  mRNA product Design a-1 comprising derived and/or modified sequence from HRSV(Memphis-37)__AIY60640.1__F_DSCav1_mut5 (opt3)
gggagagucccgcagucggcguccagcggcucugcuuguucgugugugugucguugcaggccuuauucaagcuuaccauggagcugcccauccucaagaccaacgccauuacaacuauacuugcugcagugacgcugugcuucgccagcucccagaauaucaccgaagaguuuuaccaaucuacauguucagcggucaguaaaggcuauuugagcgcuuuaagaacugggugguacaccuccguuauuacaaucgaacugucuaacauuaaggagaauaaaugcaacggaaccgacgccaaggugaaacuaaucaagcaggaacucgauaaguauaaaaaugcaguaacugagcugcagcuucugaugcagucgaccccugccgcugguucaggcagcgcaauagccagugggaucgcuguguguaaggucuugcaccucgagggagaagugaacaaaauuaagaaugcccugcuguccacaaacaaagcgguugugucucucagcggcugcggugucuccguguuaacguucaagguacuggaccuuaagaauuacaucgauaaacaauugcugccaauucuaaacaagcagucauguaguaucagcaauauagagacuguuauugaauuucagcagaaaaacaauaggcuccuggagaucacccgggaguucucugugaacgcaggggucacaacuccgguguccaccuauaugcuuacaaauucagaacuguugagccucauuaacgacaugcccaucaccaacgaucaaaagaaacugaugaguaauaacgugcagaucguccgccagcagucuuacuccauuaugugcauaaucaaggaggaaguuuuagccuaugugguacaacugccucucuacggagugauugacacgccauguuggaaacuucauacuagcccccugugcacaaccaauacuaaggagggcucgaacaucuguuugacacgaaccgaucguggcugguacugcgacaaugcugggucugucuccuuuuucccucaggccgaaacguguaaggugcagucaaacagaguguuuugcgauaccaugaauaguagaacacugccaagcgaggugaaccucugcaauauagacauuuucaaccccaaauaugauuguaagaucaugacuuccaaaaccgacgucucuagcucagugaucacaagucugggagcaauuguauccugcuacgguaagacuaaauguaccgcuagcaauaagugcaggggcaucauuaagacauuuucuaacgggugugauuauguuucaaauaaaggaguggacaccgucagugugggcaacacucuuuacuaugucaauaagcaagaggguaaaagccuguacgugaagggggaaccuauaaucaacuucuaugacccauugguuuuuccguccgaugaguucgacgccucuauuucgcagguuaacgagaaaaucaaucagagccucgcguuuauccggaaguccgaugaacuguuacacaacguaaaugucggaaagucaacgacaaacauuaugauaaccacuaucauuaucgugauuaucguuauacugcuacuccugaucgccgugggccuuuucuuguacugcaaagcacgcaguacccccgucacacugucuaaggaccagcucagcggcauuaauaacaucgcuuucuccaauugaggacuagucccuguucccagagcccacuuuuuuuucuuuuuuugaaauaaaauagccugucuuucagaucuaaaaaaaaaaaaaaaaaaaaaaaaaaaaaaaaaaaaaaaaaaaaaaaaaaaaaaaaaaaaaaaaugcaucccccccccccccccccccccccccccccccaaaggcucuuuucagagccaccagaauu

SEQ ID NO: 16905 - RNA, 1887 nt, Artificial Sequence
  mRNA product Design a-1 comprising derived and/or modified sequence from HRSV(Memphis-37)__AIY60640.1__F_DSCav1_mut5 (opt4)
gggagagucccgcagucggcguccagcggcucugcuuguucgugugugugucguugcaggccuuauucaagcuuaccauggagcugcccauccugaagaccaacgccaucaccaccauccuggccgccgugacccugugcuucgccagcagccagaacaucaccgaggaguucuaccagagcaccugcagcgccgugagcaagggcuaccugagcgcccugagaaccggcugguacaccagcgugaucaccaucgagcugagcaacaucaaggagaacaagugcaacggcaccgacgccaaggugaagcugaucaagcaggagcuggacaaguacaagaacgccgugaccgagcugcagcugcugaugcagagcacccccgccgccggcagcggcagcgccaucgccagcggcaucgccgugugcaaggugcugcaccuggagggcgaggugaacaagaucaagaacgcccugcugagcaccaacaaggccguggugagccugagcggcugcggcgugagcgugcugaccuucaaggugcuggaccugaagaacuacaucgacaagcagcugcugcccauccugaacaagcagagcugcagcaucagcaacaucgagaccgugaucgaguuccagcagaagaacaacagacugcuggagaucaccagagaguucagcgugaacgccggcgugaccacccccgugagcaccuacaugcugaccaacagcgagcugcugagccugaucaacgacaugcccaucaccaacgaccagaagaagcugaugagcaacaacgugcagaucgugagacagcagagcuacagcaucaugugcaucaucaaggaggaggugcuggccuacguggugcagcugccccuguacggcgugaucgacacccccugcuggaagcugcacaccagcccccugugcaccaccaacaccaaggagggcagcaacaucugccugaccagaaccgacagaggcugguacugcgacaacgccggcagcgugagcuucuucccccaggccgagaccugcaaggugcagagcaacagaguguucugcgacaccaugaacagcagaacccugcccagcgaggugaaccugugcaacaucgacaucuucaaccccaaguacgacugcaagaucaugaccagcaagaccgacgugagcagcagcgugaucaccagccugggcgccaucgugagcugcuacggcaagaccaagugcaccgccagcaacaagugcagaggcaucaucaagaccuucagcaacggcugcgacuacgugagcaacaagggcguggacaccgugagcgugggcaacacccuguacuacgugaacaagcaggagggcaagagccuguacgugaagggcgagcccaucaucaacuucuacgacccccugguguuccccagcgacgaguucgacgccagcaucagccaggugaacgagaagaucaaccagagccuggccuucaucagaaagagcgacgagcugcugcacaacgugaacgugggcaagagcaccaccaacaucaugaucaccaccaucaucaucgugaucaucgugauccugcugcugcugaucgccgugggccuguuccuguacugcaaggccagaagcacccccgugacccugagcaaggaccagcugagcggcaucaacaacaucgccuucagcaacugaggacuagucccuguucccagagcccacuuuuuuuucuuuuuuugaaauaaaauagccugucuuucagaucuaaaaaaaaaaaaaaaaaaaaaaaaaaaaaaaaaaaaaaaaaaaaaaaaaaaaaaaaaaaaaaaaugcaucccccccccccccccccccccccccccccccaaaggcucuuuucagagccaccagaauu

SEQ ID NO: 16906 - RNA, 1887 nt, Artificial Sequence
  mRNA product Design a-1 comprising derived and/or modified sequence from HRSV(Memphis-37)__AIY60640.1__F_DSCav1_mut5 (opt5)
gggagagucccgcagucggcguccagcggcucugcuuguucgugugugugucguugcaggccuuauucaagcuuaccauggagcugcccauccucaagaccaacgccauuacaacgauccuggcugccgugacccuuugcuucgcgagcucccagaauauuacagaagaguuuuaccaaucuaccuguagcgcugucuccaaaggcuaucugucugcccucagaacagggugguacaccagcguuaucacaauugaacuguccaacaucaaggagaauaaaugcaacggaaccgacgccaaggugaaacuuaucaagcaggaacuggauaaguauaaaaaugcugugacggagcuccagcugcugaugcagucuaccccugccgcuggcagcggguccgccauugcgagcggaaucgccgucuguaaggugcuccaccuggagggcgaaguuaacaaaauuaagaaugcccuucugucuacaaacaaagcuguggucucccucagcgggugcggagugucuguucugaccuucaaggugcuugaccugaagaauuacaucgauaaacaacuccugccgauucugaacaagcaguccuguagcaucucuaauauugagacagucaucgaauuucagcagaaaaacaaucggcuccuggagaucacccgcgaguucuccgugaacgcuggcgugacgacacccgucagcaccuauaugcuuacaaauuccgaacugcucucucugauuaacgacaugccuaucaccaacgaucaaaagaaacuuaugagcaauaacguucagauugugagacagcaguccuacagcaucaugugcauuaucaaggaggaagugcuggccuaugucgugcaacucccccuguacggcguuaucgacaccccuuguuggaaacugcauacaucuccccucugcacgaccaauacaaaggagggguccaacauuugucugacccggacagaucgcggaugguacugcgacaaugcgggcagcgugagcuuuuucccucaggccgaaaccuguaagguccagucuaacagaguguuuugcgauacgaugaacuccagaacacugccgucugagguuaaucucugcaauaucgacauuuucaaccccaaauaugauuguaagaucaugaccagcaaaaccgacguguccagcucugucauuacaucccugggggcuaucgugagcugcuacggaaagaccaaauguacagccucuaauaagugccggggcaucauuaagacguuuuccaacgggugugauuaugucagcaauaaaggaguggacaccguuuccgugggcaacacacuuuacuaugucaauaagcaagagggcaaaucucuguacgugaagggggaaccuaucauuaacuucuaugacccccucguuuuuccuagcgaugaguucgacgcuuccaucucucaggugaacgagaaaauuaaucagagccuggccuuuauccgcaaguccgaugaacugcuccacaacgucaaugugggaaagagcaccacaaacauuaugaucaccacgaucauuaucgugauuaucguuauucugcuucugcucaucgccgucggccuguuccuguacugcaaagcuagaucuacccccgugacacuuuccaaggaccagcucagcgggaucaauaacauugcguucucuaauugaggacuagucccuguucccagagcccacuuuuuuuucuuuuuuugaaauaaaauagccugucuuucagaucuaaaaaaaaaaaaaaaaaaaaaaaaaaaaaaaaaaaaaaaaaaaaaaaaaaaaaaaaaaaaaaaaugcaucccccccccccccccccccccccccccccccaaaggcucuuuucagagccaccagaauu

SEQ ID NO: 16907 - RNA, 1887 nt, Artificial Sequence
  mRNA product Design a-1 comprising derived and/or modified sequence from HRSV(Memphis-37)__AIY60640.1__F_DSCav1_mut5 (opt6)
gggagagucccgcagucggcguccagcggcucugcuuguucgugugugugucguugcaggccuuauucaagcuuaccauggaacucccaaucuuaaaaacaaacgcaauaacuacaauacucgcagcaguaacacuaugcuucgcaucaucacaaaacauaaccgaagaauuuuaccaaaguacaugcucagcaguaucaaaagguuaccucucagcccuaagaaccggaugguacacaucaguaaucacuauagaacuauccaauauaaaagaaaacaaaugcaacggcacugacgcaaaaguuaaauuaauuaaacaagaacucgauaaauauaaaaaugcaguaacagaacuacaacuacuaaugcaaagcaccccagcugcaggaagcggaucagcaaucgcaucaggaauagcaguauguaaaguacuacaccuagaaggagaagucaacaaaaucaaaaaugcacuacuaaguacaaacaaagcuguaguaagccuaucagguugcggaguaucaguauuaacauuuaaaguccucgaccuaaaaaauuacauagauaaacaacucuuaccaauacucaauaaacaaaguugcagcaucagcaacauagaaacagucaucgaauuucaacaaaaaaauaauagacuccuagaaauaacacgugaauuuucaguaaaugcuggaguaacaacaccaguaucuacauauaugcuaacaaauagcgaacuacucucacuuauuaacgauaugcccauaacaaacgaccaaaaaaaacuuaugucaaacaauguucaaauaguuagacaacaauccuacagcauaaugugcauaaucaaagaagaaguucuagcuuacguaguacaacuaccacucuaugguguuaucgacacccccuguuggaaacuucacacaucaccacuaugcacaacaaacacaaaagaaggaucaaauauuugcuuaacaagaacagauagaggaugguauugcgauaaugccggaucaguaucauuuuuuccacaagcagaaacauguaaaguacaauccaaccgaguauuuugcgacaccaugaacuccagaacacuaccaucugaagucaaccuauguaauauagauauauuuaacccaaaauaugacuguaaaaucaugacaucaaaaacugauguaaguucuaguguaauaaccagcuuaggcgccauaguaagcuguuacgguaaaacaaaaugcacagcaagcaacaaaugccgcgguauaauaaaaacauucucaaacggaugcgauuauguaaguaacaaaggaguagauacagucuccguaggcaacacauuauacuacguaaacaaacaagaaggaaaaucacuauauguaaaaggagaaccaaucauaaauuucuacgacccacuuguauuccccagcgacgaauuugaugcuuccauuucacaagucaacgaaaaaauaaaccaaucauuagccuucauaagaaaaucagacgaauuauuacauaauguuaaugucggcaaauccacaacuaauauaaugauaacaacaaucauaauaguaauaaucguuauacuacuauuacucauagcaguaggacucuucuuauauuguaaagccagauccaccccaguaacacucucaaaagaccaauuaucaggaauuaauaacaucgcauuuucaaacuaaggacuagucccuguucccagagcccacuuuuuuuucuuuuuuugaaauaaaauagccugucuuucagaucuaaaaaaaaaaaaaaaaaaaaaaaaaaaaaaaaaaaaaaaaaaaaaaaaaaaaaaaaaaaaaaaaugcaucccccccccccccccccccccccccccccccaaaggcucuuuucagagccaccagaauu

SEQ ID NO: 16908 - RNA, 1887 nt, Artificial Sequence
  mRNA product Design a-1 comprising derived and/or modified sequence from HRSV(Memphis-37)__AIY60640.1__F_DSCav1_mut5 (opt11)
gggagagucccgcagucggcguccagcggcucugcuuguucgugugugugucguugcaggccuuauucaagcuuaccauggaacuccccauccuuaaaaccaacgcaaucaccacaauacucgccgccgucacccucugcuuugcguccucccagaacaucaccgaagaguucuaccaaucgaccugcagcgccgucagcaagggcuaccucucagcccuccgaacaggcugguacacauccgucaucaccaucgaacucucaaacauaaaagaaaacaaguguaacggcaccgacgcgaaaguuaaacucaucaaacaagaacucgauaaauacaaaaacgcaguaaccgaacuacaacuccuaaugcaauccacacccgcagccggcagcggcuccgcaaucgccuccggcauagcagucugcaaaguccuccaccucgaaggagaagucaauaaaaucaaaaacgcccuccuauccaccaacaaagcgguugucucccuguccggaugcggaguuagcguccuaaccuucaaggugcucgaccucaaaaacuacauagacaaacaacuacuccccauacucaacaaacaaucaugcuccaucagcaacaucgagaccgucaucgaguuccaacagaaaaacaaccgccuccucgaaaucacacgagaguucuccguaaacgccggcgucacaacccccguuuccacuuacaugcucacaaacagcgaacuccucucccucaucaacgacaugccaaucaccaacgaccaaaagaaacucauguccaacaacguccaaaucguccgccaacaaagcuacagcauaaugugcaucauaaaagaagaaguacucgcguacguaguccaacuaccccuauacggcgucaucgacacccccugcuggaaacugcacacuucuccccucuguacaaccaacacuaaagaaggcucgaacaucugccucaccagaacagaccgaggaugguacugcgacaacgccggcuccgucagcuucuucccccaggccgaaacaugcaaaguacaaucaaaccgagucuucugcgacacaaugaacagcagaacucuacccuccgaaguuaaccuaugcaacaucgacaucuucaaccccaaauacgacugcaaaauaaugaccucaaaaacagacguguccagcuccguuaucaccucucucggagccaucguauccuguuauggaaaaaccaaaugcaccgccucaaacaaaugccgaggcauaaucaaaacauucucaaauggaugcgacuacguauccaacaaaggagucgacaccgucagcgugggcaauacccucuacuacgucaacaaacaggaagggaaaucccucuauguaaagggcgagcccauuauuaacuucuaugacccccucguguucccaagcgacgaguucgacgccuccauaucacaagucaaugagaaaaucaaccaaucacuagcuuucauucgcaaauccgacgaacuccuucacaacgucaacgucggcaaauccaccaccaacaucaugaucaccaccauaauuaucgucauuaucgucauacuacuccuacucaucgccgucggccucuuccucuauugcaaagcacgcucgacacccgucacccuuucaaaagaccaacuuuccggcauaaacaacauagccuucagcaacuagggacuagucccuguucccagagcccacuuuuuuuucuuuuuuugaaauaaaauagccugucuuucagaucuaaaaaaaaaaaaaaaaaaaaaaaaaaaaaaaaaaaaaaaaaaaaaaaaaaaaaaaaaaaaaaaaugcaucccccccccccccccccccccccccccccccaaaggcucuuuucagagccaccagaauu

SEQ ID NO: 16909 - RNA, 1906 nt, Artificial Sequence
  mRNA product Design a-2 comprising derived and/or modified sequence from HRSV(Memphis-37)__AIY60640.1__F_DSCav1_mut5 (opt1)
gggagaguccgcucagccagguugcagaagcggcuuagcguguguccuaaucuucucucugcguguagguaggccugugccgcaaacaagcuuaccauggagcugcccauccucaagaccaacgccaucaccacgauccuggccgcggugacccugugcuucgccagcucccagaacaucaccgaggaguucuaccagagcacgugcuccgccgucagcaagggcuaccucuccgcccugcgcaccgggugguacaccagcgugaucaccaucgagcuguccaacaucaaggagaacaagugcaacggcaccgacgccaaggugaagcucaucaagcaggagcuggacaaguacaagaacgcggucacggagcugcagcuccugaugcagagcaccccggccgccggcuccgggagcgcgaucgccuccggcaucgccgucugcaaggugcugcaccucgagggcgaggugaacaagaucaagaacgcccugcuguccaccaacaaggccgucgugagccucuccggcugcggggugagcguccugaccuucaaggugcuggaccucaagaacuacaucgacaagcagcugcugcccauccugaacaagcagagcugcuccaucagcaacaucgagaccgucaucgaguuccagcagaagaacaaccgccuccuggagaucacgcgggaguucagcgugaacgcgggcgugaccacccccgucuccaccuacaugcugacgaacagcgagcuccugucccugaucaacgacaugccgaucaccaacgaccagaagaagcucaugagcaacaacgugcagaucgugcgccagcaguccuacagcaucaugugcaucaucaaggaggagguccuggccuacguggugcagcugccccucuacggggucaucgacacccccugcuggaagcugcacaccagcccccugugcacgaccaacaccaaggagggcuccaacaucugccucacccggacggaccgcgggugguacugcgacaacgccggcagcguguccuucuucccgcaggccgagaccugcaagguccagagcaaccggguguucugcgacaccaugaacucccggacccugcccagcgaggugaaccucugcaacaucgacaucuucaaccccaaguacgacugcaagaucaugacguccaagaccgacgucagcuccagcgugaucaccucccugggcgccaucgugagcugcuacgggaagaccaagugcacggcgagcaacaagugccgcggcaucaucaagaccuucuccaacgggugcgacuacgucagcaacaagggcguggacaccguguccgucggcaacacccuguacuacgugaacaagcaggagggcaagagccucuacgugaagggggagcccaucaucaacuucuacgacccgcuggucuuccccuccgacgaguucgacgccagcaucucccaggugaacgagaagaucaaccagagccuggccuucauccggaaguccgacgagcuccugcacaacgugaacgucggcaagagcaccacgaacaucaugaucaccaccaucaucaucgugaucaucgugauccugcugcuccugaucgccgucgggcuguuccucuacugcaaggcccgcuccacccccgugacgcugagcaaggaccagcuguccgggaucaacaacaucgcguucagcaacugaggacuagucccuguucccagagcccacuuuuuuuucuuuuuuugaaauaaaauagccugucuuucagaucuaaaaaaaaaaaaaaaaaaaaaaaaaaaaaaaaaaaaaaaaaaaaaaaaaaaaaaaaaaaaaaaaugcaucccccccccccccccccccccccccccccccaaaggcucuuuucagagccaccagaauu

SEQ ID NO: 16910 - RNA, 1906 nt, Artificial Sequence
  mRNA product Design a-2 comprising derived and/or modified sequence from HRSV(Memphis-37)__AIY60640.1__F_DSCav1_mut5 (opt1)
gggagaguccgcucagccagguugcagaagcggcuuagcguguguccuaaucuucucucugcguguagguaggccugugccgcaaacaagcuuaccauggagcugcccauccucaagaccaacgccaucaccacgauccuggccgcggugacccugugcuucgccagcucccagaacaucaccgaggaguucuaccagagcacgugcuccgccgucagcaagggcuaccucuccgcccugcgcaccgggugguacaccagcgugaucaccaucgagcuguccaacaucaaggagaacaagugcaacggcaccgacgccaaggugaagcucaucaagcaggagcuggacaaguacaagaacgcggucacggagcugcagcuccugaugcagagcaccccggccgccggguccggcagcgccaucgcguccgggaucgccgugugcaaggugcugcaccucgagggcgaggucaacaagaucaagaacgcccugcugagcaccaacaaggccguggugucccucagcggcugcggggucuccgugcugaccuucaaggugcuggaccucaagaacuacaucgacaagcagcugcugcccauccucaacaagcagagcugcuccaucagcaacaucgagacggucaucgaguuccagcagaagaacaaccggcugcuggagaucacccgcgaguucuccgugaacgccggcgugaccacccccgucagcacguacaugcucaccaacagcgagcugcugucccucaucaacgacaugcccaucaccaacgaccagaagaagcugaugagcaacaacgugcagaucgugcggcagcaguccuacagcaucaugugcaucaucaaggaggagguccuggcguacguggugcagcucccgcuguacggggucaucgacacccccugcuggaagcugcacacgagcccccucugcaccaccaacaccaaggagggcuccaacaucugccugacgcgcaccgaccgggggugguacugcgacaacgccggcuccgugagcuucuucccccaggccgagaccugcaaggugcaguccaaccgcgucuucugcgacaccaugaacagccggacgcucccguccgaggugaaccugugcaacaucgacaucuucaaccccaaguacgacugcaagaucaugaccagcaagaccgacgucuccagcuccgugaucaccagccugggcgccaucguguccugcuacgggaagacgaagugcaccgccagcaacaagugccggggcaucaucaagaccuucuccaacgggugcgacuacgucagcaacaagggcguggacaccgugagcgucggcaacacgcucuacuacgugaacaagcaggaggggaagucccuguacgugaagggcgagcccaucaucaacuucuacgacccccuggucuucccgagcgacgaguucgacgcguccaucagccaggugaacgagaagaucaaccagucccucgccuucauccgcaagagcgacgagcugcugcacaacgugaacgucgggaaguccaccaccaacaucaugaucaccaccaucaucaucgugaucaucgugauccuccugcugcucaucgccgucggccuguuccuguacugcaaggcccggagcacgcccgugacccuguccaaggaccagcucagcgggaucaacaacaucgccuucuccaacugaggacuagucccuguucccagagcccacuuuuuuuucuuuuuuugaaauaaaauagccugucuuucagaucuaaaaaaaaaaaaaaaaaaaaaaaaaaaaaaaaaaaaaaaaaaaaaaaaaaaaaaaaaaaaaaaaugcaucccccccccccccccccccccccccccccccaaaggcucuuuucagagccaccagaauu

SEQ ID NO: 16911 - RNA, 1906 nt, Artificial Sequence
  mRNA product Design a-2 comprising derived and/or modified sequence from HRSV(Memphis-37)__AIY60640.1__F_DSCav1_mut5 (opt2)
gggagaguccgcucagccagguugcagaagcggcuuagcguguguccuaaucuucucucugcguguagguaggccugugccgcaaacaagcuuaccauggagcuccccauccucaagaccaacgccaucaccaccauccucgccgccgucacccucugcuucgccuccucccagaacaucaccgaggaguucuaccaguccaccugcuccgccgucuccaagggcuaccucuccgcccuccgcaccggcugguacaccuccgucaucaccaucgagcucuccaacaucaaggagaacaagugcaacggcaccgacgccaaggucaagcucaucaagcaggagcucgacaaguacaagaacgccgucaccgagcuccagcuccucaugcaguccacccccgccgccggcuccggcuccgccaucgccuccggcaucgccgucugcaagguccuccaccucgagggcgaggucaacaagaucaagaacgcccuccucuccaccaacaaggccgucgucucccucuccggcugcggcgucuccguccucaccuucaagguccucgaccucaagaacuacaucgacaagcagcuccuccccauccucaacaagcaguccugcuccaucuccaacaucgagaccgucaucgaguuccagcagaagaacaaccgccuccucgagaucacccgcgaguucuccgucaacgccggcgucaccacccccgucuccaccuacaugcucaccaacuccgagcuccucucccucaucaacgacaugcccaucaccaacgaccagaagaagcucauguccaacaacguccagaucguccgccagcaguccuacuccaucaugugcaucaucaaggaggagguccucgccuacgucguccagcucccccucuacggcgucaucgacacccccugcuggaagcuccacaccuccccccucugcaccaccaacaccaaggagggcuccaacaucugccucacccgcaccgaccgcggcugguacugcgacaacgccggcuccgucuccuucuucccccaggccgagaccugcaagguccaguccaaccgcgucuucugcgacaccaugaacucccgcacccuccccuccgaggucaaccucugcaacaucgacaucuucaaccccaaguacgacugcaagaucaugaccuccaagaccgacgucuccuccuccgucaucaccucccucggcgccaucgucuccugcuacggcaagaccaagugcaccgccuccaacaagugccgcggcaucaucaagaccuucuccaacggcugcgacuacgucuccaacaagggcgucgacaccgucuccgucggcaacacccucuacuacgucaacaagcaggagggcaagucccucuacgucaagggcgagcccaucaucaacuucuacgacccccucgucuuccccuccgacgaguucgacgccuccaucucccaggucaacgagaagaucaaccagucccucgccuucauccgcaaguccgacgagcuccuccacaacgucaacgucggcaaguccaccaccaacaucaugaucaccaccaucaucaucgucaucaucgucauccuccuccuccucaucgccgucggccucuuccucuacugcaaggcccgcuccacccccgucacccucuccaaggaccagcucuccggcaucaacaacaucgccuucuccaacugaggacuagucccuguucccagagcccacuuuuuuuucuuuuuuugaaauaaaauagccugucuuucagaucuaaaaaaaaaaaaaaaaaaaaaaaaaaaaaaaaaaaaaaaaaaaaaaaaaaaaaaaaaaaaaaaaugcaucccccccccccccccccccccccccccccccaaaggcucuuuucagagccaccagaauu

SEQ ID NO: 16912 - RNA, 1906 nt, Artificial Sequence
  mRNA product Design a-2 comprising derived and/or modified sequence from HRSV(Memphis-37)__AIY60640.1__F_DSCav1_mut5 (opt3)
gggagaguccgcucagccagguugcagaagcggcuuagcguguguccuaaucuucucucugcguguagguaggccugugccgcaaacaagcuuaccauggagcugcccauccucaagaccaacgccauuacaacuauacuugcugcagugacgcugugcuucgccagcucccagaauaucaccgaagaguuuuaccaaucuacauguucagcggucaguaaaggcuauuugagcgcuuuaagaacugggugguacaccuccguuauuacaaucgaacugucuaacauuaaggagaauaaaugcaacggaaccgacgccaaggugaaacuaaucaagcaggaacucgauaaguauaaaaaugcaguaacugagcugcagcuucugaugcagucgaccccugccgcugguucaggcagcgcaauagccagugggaucgcuguguguaaggucuugcaccucgagggagaagugaacaaaauuaagaaugcccugcuguccacaaacaaagcgguugugucucucagcggcugcggugucuccguguuaacguucaagguacuggaccuuaagaauuacaucgauaaacaauugcugccaauucuaaacaagcagucauguaguaucagcaauauagagacuguuauugaauuucagcagaaaaacaauaggcuccuggagaucacccgggaguucucugugaacgcaggggucacaacuccgguguccaccuauaugcuuacaaauucagaacuguugagccucauuaacgacaugcccaucaccaacgaucaaaagaaacugaugaguaauaacgugcagaucguccgccagcagucuuacuccauuaugugcauaaucaaggaggaaguuuuagccuaugugguacaacugccucucuacggagugauugacacgccauguuggaaacuucauacuagcccccugugcacaaccaauacuaaggagggcucgaacaucuguuugacacgaaccgaucguggcugguacugcgacaaugcugggucugucuccuuuuucccucaggccgaaacguguaaggugcagucaaacagaguguuuugcgauaccaugaauaguagaacacugccaagcgaggugaaccucugcaauauagacauuuucaaccccaaauaugauuguaagaucaugacuuccaaaaccgacgucucuagcucagugaucacaagucugggagcaauuguauccugcuacgguaagacuaaauguaccgcuagcaauaagugcaggggcaucauuaagacauuuucuaacgggugugauuauguuucaaauaaaggaguggacaccgucagugugggcaacacucuuuacuaugucaauaagcaagaggguaaaagccuguacgugaagggggaaccuauaaucaacuucuaugacccauugguuuuuccguccgaugaguucgacgccucuauuucgcagguuaacgagaaaaucaaucagagccucgcguuuauccggaaguccgaugaacuguuacacaacguaaaugucggaaagucaacgacaaacauuaugauaaccacuaucauuaucgugauuaucguuauacugcuacuccugaucgccgugggccuuuucuuguacugcaaagcacgcaguacccccgucacacugucuaaggaccagcucagcggcauuaauaacaucgcuuucuccaauugaggacuagucccuguucccagagcccacuuuuuuuucuuuuuuugaaauaaaauagccugucuuucagaucuaaaaaaaaaaaaaaaaaaaaaaaaaaaaaaaaaaaaaaaaaaaaaaaaaaaaaaaaaaaaaaaaugcaucccccccccccccccccccccccccccccccaaaggcucuuuucagagccaccagaauu

SEQ ID NO: 16913 - RNA, 1906 nt, Artificial Sequence
  mRNA product Design a-2 comprising derived and/or modified sequence from HRSV(Memphis-37)__AIY60640.1__F_DSCav1_mut5 (opt4)
gggagaguccgcucagccagguugcagaagcggcuuagcguguguccuaaucuucucucugcguguagguaggccugugccgcaaacaagcuuaccauggagcugcccauccugaagaccaacgccaucaccaccauccuggccgccgugacccugugcuucgccagcagccagaacaucaccgaggaguucuaccagagcaccugcagcgccgugagcaagggcuaccugagcgcccugagaaccggcugguacaccagcgugaucaccaucgagcugagcaacaucaaggagaacaagugcaacggcaccgacgccaaggugaagcugaucaagcaggagcuggacaaguacaagaacgccgugaccgagcugcagcugcugaugcagagcacccccgccgccggcagcggcagcgccaucgccagcggcaucgccgugugcaaggugcugcaccuggagggcgaggugaacaagaucaagaacgcccugcugagcaccaacaaggccguggugagccugagcggcugcggcgugagcgugcugaccuucaaggugcuggaccugaagaacuacaucgacaagcagcugcugcccauccugaacaagcagagcugcagcaucagcaacaucgagaccgugaucgaguuccagcagaagaacaacagacugcuggagaucaccagagaguucagcgugaacgccggcgugaccacccccgugagcaccuacaugcugaccaacagcgagcugcugagccugaucaacgacaugcccaucaccaacgaccagaagaagcugaugagcaacaacgugcagaucgugagacagcagagcuacagcaucaugugcaucaucaaggaggaggugcuggccuacguggugcagcugccccuguacggcgugaucgacacccccugcuggaagcugcacaccagcccccugugcaccaccaacaccaaggagggcagcaacaucugccugaccagaaccgacagaggcugguacugcgacaacgccggcagcgugagcuucuucccccaggccgagaccugcaaggugcagagcaacagaguguucugcgacaccaugaacagcagaacccugcccagcgaggugaaccugugcaacaucgacaucuucaaccccaaguacgacugcaagaucaugaccagcaagaccgacgugagcagcagcgugaucaccagccugggcgccaucgugagcugcuacggcaagaccaagugcaccgccagcaacaagugcagaggcaucaucaagaccuucagcaacggcugcgacuacgugagcaacaagggcguggacaccgugagcgugggcaacacccuguacuacgugaacaagcaggagggcaagagccuguacgugaagggcgagcccaucaucaacuucuacgacccccugguguuccccagcgacgaguucgacgccagcaucagccaggugaacgagaagaucaaccagagccuggccuucaucagaaagagcgacgagcugcugcacaacgugaacgugggcaagagcaccaccaacaucaugaucaccaccaucaucaucgugaucaucgugauccugcugcugcugaucgccgugggccuguuccuguacugcaaggccagaagcacccccgugacccugagcaaggaccagcugagcggcaucaacaacaucgccuucagcaacugaggacuagucccuguucccagagcccacuuuuuuuucuuuuuuugaaauaaaauagccugucuuucagaucuaaaaaaaaaaaaaaaaaaaaaaaaaaaaaaaaaaaaaaaaaaaaaaaaaaaaaaaaaaaaaaaaugcaucccccccccccccccccccccccccccccccaaaggcucuuuucagagccaccagaauu

SEQ ID NO: 16914 - RNA, 1906 nt, Artificial Sequence
  mRNA product Design a-2 comprising derived and/or modified sequence from HRSV(Memphis-37)__AIY60640.1__F_DSCav1_mut5 (opt5)
gggagaguccgcucagccagguugcagaagcggcuuagcguguguccuaaucuucucucugcguguagguaggccugugccgcaaacaagcuuaccauggagcugcccauccucaagaccaacgccauuacaacgauccuggcugccgugacccuuugcuucgcgagcucccagaauauuacagaagaguuuuaccaaucuaccuguagcgcugucuccaaaggcuaucugucugcccucagaacagggugguacaccagcguuaucacaauugaacuguccaacaucaaggagaauaaaugcaacggaaccgacgccaaggugaaacuuaucaagcaggaacuggauaaguauaaaaaugcugugacggagcuccagcugcugaugcagucuaccccugccgcuggcagcggguccgccauugcgagcggaaucgccgucuguaaggugcuccaccuggagggcgaaguuaacaaaauuaagaaugcccuucugucuacaaacaaagcuguggucucccucagcgggugcggagugucuguucugaccuucaaggugcuugaccugaagaauuacaucgauaaacaacuccugccgauucugaacaagcaguccuguagcaucucuaauauugagacagucaucgaauuucagcagaaaaacaaucggcuccuggagaucacccgcgaguucuccgugaacgcuggcgugacgacacccgucagcaccuauaugcuuacaaauuccgaacugcucucucugauuaacgacaugccuaucaccaacgaucaaaagaaacuuaugagcaauaacguucagauugugagacagcaguccuacagcaucaugugcauuaucaaggaggaagugcuggccuaugucgugcaacucccccuguacggcguuaucgacaccccuuguuggaaacugcauacaucuccccucugcacgaccaauacaaaggagggguccaacauuugucugacccggacagaucgcggaugguacugcgacaaugcgggcagcgugagcuuuuucccucaggccgaaaccuguaagguccagucuaacagaguguuuugcgauacgaugaacuccagaacacugccgucugagguuaaucucugcaauaucgacauuuucaaccccaaauaugauuguaagaucaugaccagcaaaaccgacguguccagcucugucauuacaucccugggggcuaucgugagcugcuacggaaagaccaaauguacagccucuaauaagugccggggcaucauuaagacguuuuccaacgggugugauuaugucagcaauaaaggaguggacaccguuuccgugggcaacacacuuuacuaugucaauaagcaagagggcaaaucucuguacgugaagggggaaccuaucauuaacuucuaugacccccucguuuuuccuagcgaugaguucgacgcuuccaucucucaggugaacgagaaaauuaaucagagccuggccuuuauccgcaaguccgaugaacugcuccacaacgucaaugugggaaagagcaccacaaacauuaugaucaccacgaucauuaucgugauuaucguuauucugcuucugcucaucgccgucggccuguuccuguacugcaaagcuagaucuacccccgugacacuuuccaaggaccagcucagcgggaucaauaacauugcguucucuaauugaggacuagucccuguucccagagcccacuuuuuuuucuuuuuuugaaauaaaauagccugucuuucagaucuaaaaaaaaaaaaaaaaaaaaaaaaaaaaaaaaaaaaaaaaaaaaaaaaaaaaaaaaaaaaaaaaugcaucccccccccccccccccccccccccccccccaaaggcucuuuucagagccaccagaauu

SEQ ID NO: 16915 - RNA, 1906 nt, Artificial Sequence
  mRNA product Design a-2 comprising derived and/or modified sequence from HRSV(Memphis-37)__AIY60640.1__F_DSCav1_mut5 (opt6)
gggagaguccgcucagccagguugcagaagcggcuuagcguguguccuaaucuucucucugcguguagguaggccugugccgcaaacaagcuuaccauggaacucccaaucuuaaaaacaaacgcaauaacuacaauacucgcagcaguaacacuaugcuucgcaucaucacaaaacauaaccgaagaauuuuaccaaaguacaugcucagcaguaucaaaagguuaccucucagcccuaagaaccggaugguacacaucaguaaucacuauagaacuauccaauauaaaagaaaacaaaugcaacggcacugacgcaaaaguuaaauuaauuaaacaagaacucgauaaauauaaaaaugcaguaacagaacuacaacuacuaaugcaaagcaccccagcugcaggaagcggaucagcaaucgcaucaggaauagcaguauguaaaguacuacaccuagaaggagaagucaacaaaaucaaaaaugcacuacuaaguacaaacaaagcuguaguaagccuaucagguugcggaguaucaguauuaacauuuaaaguccucgaccuaaaaaauuacauagauaaacaacucuuaccaauacucaauaaacaaaguugcagcaucagcaacauagaaacagucaucgaauuucaacaaaaaaauaauagacuccuagaaauaacacgugaauuuucaguaaaugcuggaguaacaacaccaguaucuacauauaugcuaacaaauagcgaacuacucucacuuauuaacgauaugcccauaacaaacgaccaaaaaaaacuuaugucaaacaauguucaaauaguuagacaacaauccuacagcauaaugugcauaaucaaagaagaaguucuagcuuacguaguacaacuaccacucuaugguguuaucgacacccccuguuggaaacuucacacaucaccacuaugcacaacaaacacaaaagaaggaucaaauauuugcuuaacaagaacagauagaggaugguauugcgauaaugccggaucaguaucauuuuuuccacaagcagaaacauguaaaguacaauccaaccgaguauuuugcgacaccaugaacuccagaacacuaccaucugaagucaaccuauguaauauagauauauuuaacccaaaauaugacuguaaaaucaugacaucaaaaacugauguaaguucuaguguaauaaccagcuuaggcgccauaguaagcuguuacgguaaaacaaaaugcacagcaagcaacaaaugccgcgguauaauaaaaacauucucaaacggaugcgauuauguaaguaacaaaggaguagauacagucuccguaggcaacacauuauacuacguaaacaaacaagaaggaaaaucacuauauguaaaaggagaaccaaucauaaauuucuacgacccacuuguauuccccagcgacgaauuugaugcuuccauuucacaagucaacgaaaaaauaaaccaaucauuagccuucauaagaaaaucagacgaauuauuacauaauguuaaugucggcaaauccacaacuaauauaaugauaacaacaaucauaauaguaauaaucguuauacuacuauuacucauagcaguaggacucuucuuauauuguaaagccagauccaccccaguaacacucucaaaagaccaauuaucaggaauuaauaacaucgcauuuucaaacuaaggacuagucccuguucccagagcccacuuuuuuuucuuuuuuugaaauaaaauagccugucuuucagaucuaaaaaaaaaaaaaaaaaaaaaaaaaaaaaaaaaaaaaaaaaaaaaaaaaaaaaaaaaaaaaaaaugcaucccccccccccccccccccccccccccccccaaaggcucuuuucagagccaccagaauu

SEQ ID NO: 16916 - RNA, 1906 nt, Artificial Sequence
  mRNA product Design a-2 comprising derived and/or modified sequence from HRSV(Memphis-37)__AIY60640.1__F_DSCav1_mut5 (opt11)
gggagaguccgcucagccagguugcagaagcggcuuagcguguguccuaaucuucucucugcguguagguaggccugugccgcaaacaagcuuaccauggaacuccccauccuuaaaaccaacgcaaucaccacaauacucgccgccgucacccucugcuuugcguccucccagaacaucaccgaagaguucuaccaaucgaccugcagcgccgucagcaagggcuaccucucagcccuccgaacaggcugguacacauccgucaucaccaucgaacucucaaacauaaaagaaaacaaguguaacggcaccgacgcgaaaguuaaacucaucaaacaagaacucgauaaauacaaaaacgcaguaaccgaacuacaacuccuaaugcaauccacacccgcagccggcagcggcuccgcaaucgccuccggcauagcagucugcaaaguccuccaccucgaaggagaagucaauaaaaucaaaaacgcccuccuauccaccaacaaagcgguugucucccuguccggaugcggaguuagcguccuaaccuucaaggugcucgaccucaaaaacuacauagacaaacaacuacuccccauacucaacaaacaaucaugcuccaucagcaacaucgagaccgucaucgaguuccaacagaaaaacaaccgccuccucgaaaucacacgagaguucuccguaaacgccggcgucacaacccccguuuccacuuacaugcucacaaacagcgaacuccucucccucaucaacgacaugccaaucaccaacgaccaaaagaaacucauguccaacaacguccaaaucguccgccaacaaagcuacagcauaaugugcaucauaaaagaagaaguacucgcguacguaguccaacuaccccuauacggcgucaucgacacccccugcuggaaacugcacacuucuccccucuguacaaccaacacuaaagaaggcucgaacaucugccucaccagaacagaccgaggaugguacugcgacaacgccggcuccgucagcuucuucccccaggccgaaacaugcaaaguacaaucaaaccgagucuucugcgacacaaugaacagcagaacucuacccuccgaaguuaaccuaugcaacaucgacaucuucaaccccaaauacgacugcaaaauaaugaccucaaaaacagacguguccagcuccguuaucaccucucucggagccaucguauccuguuauggaaaaaccaaaugcaccgccucaaacaaaugccgaggcauaaucaaaacauucucaaauggaugcgacuacguauccaacaaaggagucgacaccgucagcgugggcaauacccucuacuacgucaacaaacaggaagggaaaucccucuauguaaagggcgagcccauuauuaacuucuaugacccccucguguucccaagcgacgaguucgacgccuccauaucacaagucaaugagaaaaucaaccaaucacuagcuuucauucgcaaauccgacgaacuccuucacaacgucaacgucggcaaauccaccaccaacaucaugaucaccaccauaauuaucgucauuaucgucauacuacuccuacucaucgccgucggccucuuccucuauugcaaagcacgcucgacacccgucacccuuucaaaagaccaacuuuccggcauaaacaacauagccuucagcaacuagggacuagucccuguucccagagcccacuuuuuuuucuuuuuuugaaauaaaauagccugucuuucagaucuaaaaaaaaaaaaaaaaaaaaaaaaaaaaaaaaaaaaaaaaaaaaaaaaaaaaaaaaaaaaaaaaugcaucccccccccccccccccccccccccccccccaaaggcucuuuucagagccaccagaauu

SEQ ID NO: 16917 - RNA, 1984 nt, Artificial Sequence
  mRNA product Design a-3 comprising derived and/or modified sequence from HRSV(Memphis-37)__AIY60640.1__F_DSCav1_mut5 (opt1)
gggagagggcgcuuggcuugcaaggacccugagcugcggcauugaagcacacccaacccaacucgacugaagucagccucacugaaccggaucugagaaucuucucucucugggcuugccagggcucuccgaaccuagcuagcauccucuucaauuccaacuagaaagcuuaccauggagcugcccauccucaagaccaacgccaucaccacgauccuggccgcggugacccugugcuucgccagcucccagaacaucaccgaggaguucuaccagagcacgugcuccgccgucagcaagggcuaccucuccgcccugcgcaccgggugguacaccagcgugaucaccaucgagcuguccaacaucaaggagaacaagugcaacggcaccgacgccaaggugaagcucaucaagcaggagcuggacaaguacaagaacgcggucacggagcugcagcuccugaugcagagcaccccggccgccggcuccgggagcgcgaucgccuccggcaucgccgucugcaaggugcugcaccucgagggcgaggugaacaagaucaagaacgcccugcuguccaccaacaaggccgucgugagccucuccggcugcggggugagcguccugaccuucaaggugcuggaccucaagaacuacaucgacaagcagcugcugcccauccugaacaagcagagcugcuccaucagcaacaucgagaccgucaucgaguuccagcagaagaacaaccgccuccuggagaucacgcgggaguucagcgugaacgcgggcgugaccacccccgucuccaccuacaugcugacgaacagcgagcuccugucccugaucaacgacaugccgaucaccaacgaccagaagaagcucaugagcaacaacgugcagaucgugcgccagcaguccuacagcaucaugugcaucaucaaggaggagguccuggccuacguggugcagcugccccucuacggggucaucgacacccccugcuggaagcugcacaccagcccccugugcacgaccaacaccaaggagggcuccaacaucugccucacccggacggaccgcgggugguacugcgacaacgccggcagcguguccuucuucccgcaggccgagaccugcaagguccagagcaaccggguguucugcgacaccaugaacucccggacccugcccagcgaggugaaccucugcaacaucgacaucuucaaccccaaguacgacugcaagaucaugacguccaagaccgacgucagcuccagcgugaucaccucccugggcgccaucgugagcugcuacgggaagaccaagugcacggcgagcaacaagugccgcggcaucaucaagaccuucuccaacgggugcgacuacgucagcaacaagggcguggacaccguguccgucggcaacacccuguacuacgugaacaagcaggagggcaagagccucuacgugaagggggagcccaucaucaacuucuacgacccgcuggucuuccccuccgacgaguucgacgccagcaucucccaggugaacgagaagaucaaccagagccuggccuucauccggaaguccgacgagcuccugcacaacgugaacgucggcaagagcaccacgaacaucaugaucaccaccaucaucaucgugaucaucgugauccugcugcuccugaucgccgucgggcuguuccucuacugcaaggcccgcuccacccccgugacgcugagcaaggaccagcuguccgggaucaacaacaucgcguucagcaacugaggacuagucccuguucccagagcccacuuuuuuuucuuuuuuugaaauaaaauagccugucuuucagaucuaaaaaaaaaaaaaaaaaaaaaaaaaaaaaaaaaaaaaaaaaaaaaaaaaaaaaaaaaaaaaaaaugcaucccccccccccccccccccccccccccccccaaaggcucuuuucagagccaccagaauu

SEQ ID NO: 16918 - RNA, 1984 nt, Artificial Sequence
  mRNA product Design a-3 comprising derived and/or modified sequence from HRSV(Memphis-37)__AIY60640.1__F_DSCav1_mut5 (opt1)
gggagagggcgcuuggcuugcaaggacccugagcugcggcauugaagcacacccaacccaacucgacugaagucagccucacugaaccggaucugagaaucuucucucucugggcuugccagggcucuccgaaccuagcuagcauccucuucaauuccaacuagaaagcuuaccauggagcugcccauccucaagaccaacgccaucaccacgauccuggccgcggugacccugugcuucgccagcucccagaacaucaccgaggaguucuaccagagcacgugcuccgccgucagcaagggcuaccucuccgcccugcgcaccgggugguacaccagcgugaucaccaucgagcuguccaacaucaaggagaacaagugcaacggcaccgacgccaaggugaagcucaucaagcaggagcuggacaaguacaagaacgcggucacggagcugcagcuccugaugcagagcaccccggccgccggguccggcagcgccaucgcguccgggaucgccgugugcaaggugcugcaccucgagggcgaggucaacaagaucaagaacgcccugcugagcaccaacaaggccguggugucccucagcggcugcggggucuccgugcugaccuucaaggugcuggaccucaagaacuacaucgacaagcagcugcugcccauccucaacaagcagagcugcuccaucagcaacaucgagacggucaucgaguuccagcagaagaacaaccggcugcuggagaucacccgcgaguucuccgugaacgccggcgugaccacccccgucagcacguacaugcucaccaacagcgagcugcugucccucaucaacgacaugcccaucaccaacgaccagaagaagcugaugagcaacaacgugcagaucgugcggcagcaguccuacagcaucaugugcaucaucaaggaggagguccuggcguacguggugcagcucccgcuguacggggucaucgacacccccugcuggaagcugcacacgagcccccucugcaccaccaacaccaaggagggcuccaacaucugccugacgcgcaccgaccgggggugguacugcgacaacgccggcuccgugagcuucuucccccaggccgagaccugcaaggugcaguccaaccgcgucuucugcgacaccaugaacagccggacgcucccguccgaggugaaccugugcaacaucgacaucuucaaccccaaguacgacugcaagaucaugaccagcaagaccgacgucuccagcuccgugaucaccagccugggcgccaucguguccugcuacgggaagacgaagugcaccgccagcaacaagugccggggcaucaucaagaccuucuccaacgggugcgacuacgucagcaacaagggcguggacaccgugagcgucggcaacacgcucuacuacgugaacaagcaggaggggaagucccuguacgugaagggcgagcccaucaucaacuucuacgacccccuggucuucccgagcgacgaguucgacgcguccaucagccaggugaacgagaagaucaaccagucccucgccuucauccgcaagagcgacgagcugcugcacaacgugaacgucgggaaguccaccaccaacaucaugaucaccaccaucaucaucgugaucaucgugauccuccugcugcucaucgccgucggccuguuccuguacugcaaggcccggagcacgcccgugacccuguccaaggaccagcucagcgggaucaacaacaucgccuucuccaacugaggacuagucccuguucccagagcccacuuuuuuuucuuuuuuugaaauaaaauagccugucuuucagaucuaaaaaaaaaaaaaaaaaaaaaaaaaaaaaaaaaaaaaaaaaaaaaaaaaaaaaaaaaaaaaaaaugcaucccccccccccccccccccccccccccccccaaaggcucuuuucagagccaccagaauu

SEQ ID NO: 16919 - RNA, 1984 nt, Artificial Sequence
  mRNA product Design a-3 comprising derived and/or modified sequence from HRSV(Memphis-37)__AIY60640.1__F_DSCav1_mut5 (opt2)
gggagagggcgcuuggcuugcaaggacccugagcugcggcauugaagcacacccaacccaacucgacugaagucagccucacugaaccggaucugagaaucuucucucucugggcuugccagggcucuccgaaccuagcuagcauccucuucaauuccaacuagaaagcuuaccauggagcuccccauccucaagaccaacgccaucaccaccauccucgccgccgucacccucugcuucgccuccucccagaacaucaccgaggaguucuaccaguccaccugcuccgccgucuccaagggcuaccucuccgcccuccgcaccggcugguacaccuccgucaucaccaucgagcucuccaacaucaaggagaacaagugcaacggcaccgacgccaaggucaagcucaucaagcaggagcucgacaaguacaagaacgccgucaccgagcuccagcuccucaugcaguccacccccgccgccggcuccggcuccgccaucgccuccggcaucgccgucugcaagguccuccaccucgagggcgaggucaacaagaucaagaacgcccuccucuccaccaacaaggccgucgucucccucuccggcugcggcgucuccguccucaccuucaagguccucgaccucaagaacuacaucgacaagcagcuccuccccauccucaacaagcaguccugcuccaucuccaacaucgagaccgucaucgaguuccagcagaagaacaaccgccuccucgagaucacccgcgaguucuccgucaacgccggcgucaccacccccgucuccaccuacaugcucaccaacuccgagcuccucucccucaucaacgacaugcccaucaccaacgaccagaagaagcucauguccaacaacguccagaucguccgccagcaguccuacuccaucaugugcaucaucaaggaggagguccucgccuacgucguccagcucccccucuacggcgucaucgacacccccugcuggaagcuccacaccuccccccucugcaccaccaacaccaaggagggcuccaacaucugccucacccgcaccgaccgcggcugguacugcgacaacgccggcuccgucuccuucuucccccaggccgagaccugcaagguccaguccaaccgcgucuucugcgacaccaugaacucccgcacccuccccuccgaggucaaccucugcaacaucgacaucuucaaccccaaguacgacugcaagaucaugaccuccaagaccgacgucuccuccuccgucaucaccucccucggcgccaucgucuccugcuacggcaagaccaagugcaccgccuccaacaagugccgcggcaucaucaagaccuucuccaacggcugcgacuacgucuccaacaagggcgucgacaccgucuccgucggcaacacccucuacuacgucaacaagcaggagggcaagucccucuacgucaagggcgagcccaucaucaacuucuacgacccccucgucuuccccuccgacgaguucgacgccuccaucucccaggucaacgagaagaucaaccagucccucgccuucauccgcaaguccgacgagcuccuccacaacgucaacgucggcaaguccaccaccaacaucaugaucaccaccaucaucaucgucaucaucgucauccuccuccuccucaucgccgucggccucuuccucuacugcaaggcccgcuccacccccgucacccucuccaaggaccagcucuccggcaucaacaacaucgccuucuccaacugaggacuagucccuguucccagagcccacuuuuuuuucuuuuuuugaaauaaaauagccugucuuucagaucuaaaaaaaaaaaaaaaaaaaaaaaaaaaaaaaaaaaaaaaaaaaaaaaaaaaaaaaaaaaaaaaaugcaucccccccccccccccccccccccccccccccaaaggcucuuuucagagccaccagaauu

SEQ ID NO: 16920 - RNA, 1984 nt, Artificial Sequence
  mRNA product Design a-3 comprising derived and/or modified sequence from HRSV(Memphis-37)__AIY60640.1__F_DSCav1_mut5 (opt3)
gggagagggcgcuuggcuugcaaggacccugagcugcggcauugaagcacacccaacccaacucgacugaagucagccucacugaaccggaucugagaaucuucucucucugggcuugccagggcucuccgaaccuagcuagcauccucuucaauuccaacuagaaagcuuaccauggagcugcccauccucaagaccaacgccauuacaacuauacuugcugcagugacgcugugcuucgccagcucccagaauaucaccgaagaguuuuaccaaucuacauguucagcggucaguaaaggcuauuugagcgcuuuaagaacugggugguacaccuccguuauuacaaucgaacugucuaacauuaaggagaauaaaugcaacggaaccgacgccaaggugaaacuaaucaagcaggaacucgauaaguauaaaaaugcaguaacugagcugcagcuucugaugcagucgaccccugccgcugguucaggcagcgcaauagccagugggaucgcuguguguaaggucuugcaccucgagggagaagugaacaaaauuaagaaugcccugcuguccacaaacaaagcgguugugucucucagcggcugcggugucuccguguuaacguucaagguacuggaccuuaagaauuacaucgauaaacaauugcugccaauucuaaacaagcagucauguaguaucagcaauauagagacuguuauugaauuucagcagaaaaacaauaggcuccuggagaucacccgggaguucucugugaacgcaggggucacaacuccgguguccaccuauaugcuuacaaauucagaacuguugagccucauuaacgacaugcccaucaccaacgaucaaaagaaacugaugaguaauaacgugcagaucguccgccagcagucuuacuccauuaugugcauaaucaaggaggaaguuuuagccuaugugguacaacugccucucuacggagugauugacacgccauguuggaaacuucauacuagcccccugugcacaaccaauacuaaggagggcucgaacaucuguuugacacgaaccgaucguggcugguacugcgacaaugcugggucugucuccuuuuucccucaggccgaaacguguaaggugcagucaaacagaguguuuugcgauaccaugaauaguagaacacugccaagcgaggugaaccucugcaauauagacauuuucaaccccaaauaugauuguaagaucaugacuuccaaaaccgacgucucuagcucagugaucacaagucugggagcaauuguauccugcuacgguaagacuaaauguaccgcuagcaauaagugcaggggcaucauuaagacauuuucuaacgggugugauuauguuucaaauaaaggaguggacaccgucagugugggcaacacucuuuacuaugucaauaagcaagaggguaaaagccuguacgugaagggggaaccuauaaucaacuucuaugacccauugguuuuuccguccgaugaguucgacgccucuauuucgcagguuaacgagaaaaucaaucagagccucgcguuuauccggaaguccgaugaacuguuacacaacguaaaugucggaaagucaacgacaaacauuaugauaaccacuaucauuaucgugauuaucguuauacugcuacuccugaucgccgugggccuuuucuuguacugcaaagcacgcaguacccccgucacacugucuaaggaccagcucagcggcauuaauaacaucgcuuucuccaauugaggacuagucccuguucccagagcccacuuuuuuuucuuuuuuugaaauaaaauagccugucuuucagaucuaaaaaaaaaaaaaaaaaaaaaaaaaaaaaaaaaaaaaaaaaaaaaaaaaaaaaaaaaaaaaaaaugcaucccccccccccccccccccccccccccccccaaaggcucuuuucagagccaccagaauu

SEQ ID NO: 16921 - RNA, 1984 nt, Artificial Sequence
  mRNA product Design a-3 comprising derived and/or modified sequence from HRSV(Memphis-37)__AIY60640.1__F_DSCav1_mut5 (opt4)
gggagagggcgcuuggcuugcaaggacccugagcugcggcauugaagcacacccaacccaacucgacugaagucagccucacugaaccggaucugagaaucuucucucucugggcuugccagggcucuccgaaccuagcuagcauccucuucaauuccaacuagaaagcuuaccauggagcugcccauccugaagaccaacgccaucaccaccauccuggccgccgugacccugugcuucgccagcagccagaacaucaccgaggaguucuaccagagcaccugcagcgccgugagcaagggcuaccugagcgcccugagaaccggcugguacaccagcgugaucaccaucgagcugagcaacaucaaggagaacaagugcaacggcaccgacgccaaggugaagcugaucaagcaggagcuggacaaguacaagaacgccgugaccgagcugcagcugcugaugcagagcacccccgccgccggcagcggcagcgccaucgccagcggcaucgccgugugcaaggugcugcaccuggagggcgaggugaacaagaucaagaacgcccugcugagcaccaacaaggccguggugagccugagcggcugcggcgugagcgugcugaccuucaaggugcuggaccugaagaacuacaucgacaagcagcugcugcccauccugaacaagcagagcugcagcaucagcaacaucgagaccgugaucgaguuccagcagaagaacaacagacugcuggagaucaccagagaguucagcgugaacgccggcgugaccacccccgugagcaccuacaugcugaccaacagcgagcugcugagccugaucaacgacaugcccaucaccaacgaccagaagaagcugaugagcaacaacgugcagaucgugagacagcagagcuacagcaucaugugcaucaucaaggaggaggugcuggccuacguggugcagcugccccuguacggcgugaucgacacccccugcuggaagcugcacaccagcccccugugcaccaccaacaccaaggagggcagcaacaucugccugaccagaaccgacagaggcugguacugcgacaacgccggcagcgugagcuucuucccccaggccgagaccugcaaggugcagagcaacagaguguucugcgacaccaugaacagcagaacccugcccagcgaggugaaccugugcaacaucgacaucuucaaccccaaguacgacugcaagaucaugaccagcaagaccgacgugagcagcagcgugaucaccagccugggcgccaucgugagcugcuacggcaagaccaagugcaccgccagcaacaagugcagaggcaucaucaagaccuucagcaacggcugcgacuacgugagcaacaagggcguggacaccgugagcgugggcaacacccuguacuacgugaacaagcaggagggcaagagccuguacgugaagggcgagcccaucaucaacuucuacgacccccugguguuccccagcgacgaguucgacgccagcaucagccaggugaacgagaagaucaaccagagccuggccuucaucagaaagagcgacgagcugcugcacaacgugaacgugggcaagagcaccaccaacaucaugaucaccaccaucaucaucgugaucaucgugauccugcugcugcugaucgccgugggccuguuccuguacugcaaggccagaagcacccccgugacccugagcaaggaccagcugagcggcaucaacaacaucgccuucagcaacugaggacuagucccuguucccagagcccacuuuuuuuucuuuuuuugaaauaaaauagccugucuuucagaucuaaaaaaaaaaaaaaaaaaaaaaaaaaaaaaaaaaaaaaaaaaaaaaaaaaaaaaaaaaaaaaaaugcaucccccccccccccccccccccccccccccccaaaggcucuuuucagagccaccagaauu

SEQ ID NO: 16922 - RNA, 1984 nt, Artificial Sequence
  mRNA product Design a-3 comprising derived and/or modified sequence from HRSV(Memphis-37)__AIY60640.1__F_DSCav1_mut5 (opt5)
gggagagggcgcuuggcuugcaaggacccugagcugcggcauugaagcacacccaacccaacucgacugaagucagccucacugaaccggaucugagaaucuucucucucugggcuugccagggcucuccgaaccuagcuagcauccucuucaauuccaacuagaaagcuuaccauggagcugcccauccucaagaccaacgccauuacaacgauccuggcugccgugacccuuugcuucgcgagcucccagaauauuacagaagaguuuuaccaaucuaccuguagcgcugucuccaaaggcuaucugucugcccucagaacagggugguacaccagcguuaucacaauugaacuguccaacaucaaggagaauaaaugcaacggaaccgacgccaaggugaaacuuaucaagcaggaacuggauaaguauaaaaaugcugugacggagcuccagcugcugaugcagucuaccccugccgcuggcagcggguccgccauugcgagcggaaucgccgucuguaaggugcuccaccuggagggcgaaguuaacaaaauuaagaaugcccuucugucuacaaacaaagcuguggucucccucagcgggugcggagugucuguucugaccuucaaggugcuugaccugaagaauuacaucgauaaacaacuccugccgauucugaacaagcaguccuguagcaucucuaauauugagacagucaucgaauuucagcagaaaaacaaucggcuccuggagaucacccgcgaguucuccgugaacgcuggcgugacgacacccgucagcaccuauaugcuuacaaauuccgaacugcucucucugauuaacgacaugccuaucaccaacgaucaaaagaaacuuaugagcaauaacguucagauugugagacagcaguccuacagcaucaugugcauuaucaaggaggaagugcuggccuaugucgugcaacucccccuguacggcguuaucgacaccccuuguuggaaacugcauacaucuccccucugcacgaccaauacaaaggagggguccaacauuugucugacccggacagaucgcggaugguacugcgacaaugcgggcagcgugagcuuuuucccucaggccgaaaccuguaagguccagucuaacagaguguuuugcgauacgaugaacuccagaacacugccgucugagguuaaucucugcaauaucgacauuuucaaccccaaauaugauuguaagaucaugaccagcaaaaccgacguguccagcucugucauuacaucccugggggcuaucgugagcugcuacggaaagaccaaauguacagccucuaauaagugccggggcaucauuaagacguuuuccaacgggugugauuaugucagcaauaaaggaguggacaccguuuccgugggcaacacacuuuacuaugucaauaagcaagagggcaaaucucuguacgugaagggggaaccuaucauuaacuucuaugacccccucguuuuuccuagcgaugaguucgacgcuuccaucucucaggugaacgagaaaauuaaucagagccuggccuuuauccgcaaguccgaugaacugcuccacaacgucaaugugggaaagagcaccacaaacauuaugaucaccacgaucauuaucgugauuaucguuauucugcuucugcucaucgccgucggccuguuccuguacugcaaagcuagaucuacccccgugacacuuuccaaggaccagcucagcgggaucaauaacauugcguucucuaauugaggacuagucccuguucccagagcccacuuuuuuuucuuuuuuugaaauaaaauagccugucuuucagaucuaaaaaaaaaaaaaaaaaaaaaaaaaaaaaaaaaaaaaaaaaaaaaaaaaaaaaaaaaaaaaaaaugcaucccccccccccccccccccccccccccccccaaaggcucuuuucagagccaccagaauu

SEQ ID NO: 16923 - RNA, 1984 nt, Artificial Sequence
  mRNA product Design a-3 comprising derived and/or modified sequence from HRSV(Memphis-37)__AIY60640.1__F_DSCav1_mut5 (opt6)
gggagagggcgcuuggcuugcaaggacccugagcugcggcauugaagcacacccaacccaacucgacugaagucagccucacugaaccggaucugagaaucuucucucucugggcuugccagggcucuccgaaccuagcuagcauccucuucaauuccaacuagaaagcuuaccauggaacucccaaucuuaaaaacaaacgcaauaacuacaauacucgcagcaguaacacuaugcuucgcaucaucacaaaacauaaccgaagaauuuuaccaaaguacaugcucagcaguaucaaaagguuaccucucagcccuaagaaccggaugguacacaucaguaaucacuauagaacuauccaauauaaaagaaaacaaaugcaacggcacugacgcaaaaguuaaauuaauuaaacaagaacucgauaaauauaaaaaugcaguaacagaacuacaacuacuaaugcaaagcaccccagcugcaggaagcggaucagcaaucgcaucaggaauagcaguauguaaaguacuacaccuagaaggagaagucaacaaaaucaaaaaugcacuacuaaguacaaacaaagcuguaguaagccuaucagguugcggaguaucaguauuaacauuuaaaguccucgaccuaaaaaauuacauagauaaacaacucuuaccaauacucaauaaacaaaguugcagcaucagcaacauagaaacagucaucgaauuucaacaaaaaaauaauagacuccuagaaauaacacgugaauuuucaguaaaugcuggaguaacaacaccaguaucuacauauaugcuaacaaauagcgaacuacucucacuuauuaacgauaugcccauaacaaacgaccaaaaaaaacuuaugucaaacaauguucaaauaguuagacaacaauccuacagcauaaugugcauaaucaaagaagaaguucuagcuuacguaguacaacuaccacucuaugguguuaucgacacccccuguuggaaacuucacacaucaccacuaugcacaacaaacacaaaagaaggaucaaauauuugcuuaacaagaacagauagaggaugguauugcgauaaugccggaucaguaucauuuuuuccacaagcagaaacauguaaaguacaauccaaccgaguauuuugcgacaccaugaacuccagaacacuaccaucugaagucaaccuauguaauauagauauauuuaacccaaaauaugacuguaaaaucaugacaucaaaaacugauguaaguucuaguguaauaaccagcuuaggcgccauaguaagcuguuacgguaaaacaaaaugcacagcaagcaacaaaugccgcgguauaauaaaaacauucucaaacggaugcgauuauguaaguaacaaaggaguagauacagucuccguaggcaacacauuauacuacguaaacaaacaagaaggaaaaucacuauauguaaaaggagaaccaaucauaaauuucuacgacccacuuguauuccccagcgacgaauuugaugcuuccauuucacaagucaacgaaaaaauaaaccaaucauuagccuucauaagaaaaucagacgaauuauuacauaauguuaaugucggcaaauccacaacuaauauaaugauaacaacaaucauaauaguaauaaucguuauacuacuauuacucauagcaguaggacucuucuuauauuguaaagccagauccaccccaguaacacucucaaaagaccaauuaucaggaauuaauaacaucgcauuuucaaacuaaggacuagucccuguucccagagcccacuuuuuuuucuuuuuuugaaauaaaauagccugucuuucagaucuaaaaaaaaaaaaaaaaaaaaaaaaaaaaaaaaaaaaaaaaaaaaaaaaaaaaaaaaaaaaaaaaugcaucccccccccccccccccccccccccccccccaaaggcucuuuucagagccaccagaauu

SEQ ID NO: 16924 - RNA, 1984 nt, Artificial Sequence
  mRNA product Design a-3 comprising derived and/or modified sequence from HRSV(Memphis-37)__AIY60640.1__F_DSCav1_mut5 (opt11)
gggagagggcgcuuggcuugcaaggacccugagcugcggcauugaagcacacccaacccaacucgacugaagucagccucacugaaccggaucugagaaucuucucucucugggcuugccagggcucuccgaaccuagcuagcauccucuucaauuccaacuagaaagcuuaccauggaacuccccauccuuaaaaccaacgcaaucaccacaauacucgccgccgucacccucugcuuugcguccucccagaacaucaccgaagaguucuaccaaucgaccugcagcgccgucagcaagggcuaccucucagcccuccgaacaggcugguacacauccgucaucaccaucgaacucucaaacauaaaagaaaacaaguguaacggcaccgacgcgaaaguuaaacucaucaaacaagaacucgauaaauacaaaaacgcaguaaccgaacuacaacuccuaaugcaauccacacccgcagccggcagcggcuccgcaaucgccuccggcauagcagucugcaaaguccuccaccucgaaggagaagucaauaaaaucaaaaacgcccuccuauccaccaacaaagcgguugucucccuguccggaugcggaguuagcguccuaaccuucaaggugcucgaccucaaaaacuacauagacaaacaacuacuccccauacucaacaaacaaucaugcuccaucagcaacaucgagaccgucaucgaguuccaacagaaaaacaaccgccuccucgaaaucacacgagaguucuccguaaacgccggcgucacaacccccguuuccacuuacaugcucacaaacagcgaacuccucucccucaucaacgacaugccaaucaccaacgaccaaaagaaacucauguccaacaacguccaaaucguccgccaacaaagcuacagcauaaugugcaucauaaaagaagaaguacucgcguacguaguccaacuaccccuauacggcgucaucgacacccccugcuggaaacugcacacuucuccccucuguacaaccaacacuaaagaaggcucgaacaucugccucaccagaacagaccgaggaugguacugcgacaacgccggcuccgucagcuucuucccccaggccgaaacaugcaaaguacaaucaaaccgagucuucugcgacacaaugaacagcagaacucuacccuccgaaguuaaccuaugcaacaucgacaucuucaaccccaaauacgacugcaaaauaaugaccucaaaaacagacguguccagcuccguuaucaccucucucggagccaucguauccuguuauggaaaaaccaaaugcaccgccucaaacaaaugccgaggcauaaucaaaacauucucaaauggaugcgacuacguauccaacaaaggagucgacaccgucagcgugggcaauacccucuacuacgucaacaaacaggaagggaaaucccucuauguaaagggcgagcccauuauuaacuucuaugacccccucguguucccaagcgacgaguucgacgccuccauaucacaagucaaugagaaaaucaaccaaucacuagcuuucauucgcaaauccgacgaacuccuucacaacgucaacgucggcaaauccaccaccaacaucaugaucaccaccauaauuaucgucauuaucgucauacuacuccuacucaucgccgucggccucuuccucuauugcaaagcacgcucgacacccgucacccuuucaaaagaccaacuuuccggcauaaacaacauagccuucagcaacuagggacuagucccuguucccagagcccacuuuuuuuucuuuuuuugaaauaaaauagccugucuuucagaucuaaaaaaaaaaaaaaaaaaaaaaaaaaaaaaaaaaaaaaaaaaaaaaaaaaaaaaaaaaaaaaaaugcaucccccccccccccccccccccccccccccccaaaggcucuuuucagagccaccagaauu

SEQ ID NO: 16925 - RNA, 1933 nt, Artificial Sequence
  mRNA product Design a-4 comprising derived and/or modified sequence from HRSV(Memphis-37)__AIY60640.1__F_DSCav1_mut5 (opt1)
gggagacuccugucgggcggaaguaggaggaguagaguuuaaaaacaguacucuuuuuccgguucgggacguaguugaagcaacgacaagccggauaaccgcucuugagacaggaagcuuaccauggagcugcccauccucaagaccaacgccaucaccacgauccuggccgcggugacccugugcuucgccagcucccagaacaucaccgaggaguucuaccagagcacgugcuccgccgucagcaagggcuaccucuccgcccugcgcaccgggugguacaccagcgugaucaccaucgagcuguccaacaucaaggagaacaagugcaacggcaccgacgccaaggugaagcucaucaagcaggagcuggacaaguacaagaacgcggucacggagcugcagcuccugaugcagagcaccccggccgccggcuccgggagcgcgaucgccuccggcaucgccgucugcaaggugcugcaccucgagggcgaggugaacaagaucaagaacgcccugcuguccaccaacaaggccgucgugagccucuccggcugcggggugagcguccugaccuucaaggugcuggaccucaagaacuacaucgacaagcagcugcugcccauccugaacaagcagagcugcuccaucagcaacaucgagaccgucaucgaguuccagcagaagaacaaccgccuccuggagaucacgcgggaguucagcgugaacgcgggcgugaccacccccgucuccaccuacaugcugacgaacagcgagcuccugucccugaucaacgacaugccgaucaccaacgaccagaagaagcucaugagcaacaacgugcagaucgugcgccagcaguccuacagcaucaugugcaucaucaaggaggagguccuggccuacguggugcagcugccccucuacggggucaucgacacccccugcuggaagcugcacaccagcccccugugcacgaccaacaccaaggagggcuccaacaucugccucacccggacggaccgcgggugguacugcgacaacgccggcagcguguccuucuucccgcaggccgagaccugcaagguccagagcaaccggguguucugcgacaccaugaacucccggacccugcccagcgaggugaaccucugcaacaucgacaucuucaaccccaaguacgacugcaagaucaugacguccaagaccgacgucagcuccagcgugaucaccucccugggcgccaucgugagcugcuacgggaagaccaagugcacggcgagcaacaagugccgcggcaucaucaagaccuucuccaacgggugcgacuacgucagcaacaagggcguggacaccguguccgucggcaacacccuguacuacgugaacaagcaggagggcaagagccucuacgugaagggggagcccaucaucaacuucuacgacccgcuggucuuccccuccgacgaguucgacgccagcaucucccaggugaacgagaagaucaaccagagccuggccuucauccggaaguccgacgagcuccugcacaacgugaacgucggcaagagcaccacgaacaucaugaucaccaccaucaucaucgugaucaucgugauccugcugcuccugaucgccgucgggcuguuccucuacugcaaggcccgcuccacccccgugacgcugagcaaggaccagcuguccgggaucaacaacaucgcguucagcaacugaggacuagucccuguucccagagcccacuuuuuuuucuuuuuuugaaauaaaauagccugucuuucagaucuaaaaaaaaaaaaaaaaaaaaaaaaaaaaaaaaaaaaaaaaaaaaaaaaaaaaaaaaaaaaaaaaugcaucccccccccccccccccccccccccccccccaaaggcucuuuucagagccaccagaauu

SEQ ID NO: 16926 - RNA, 1933 nt, Artificial Sequence
  mRNA product Design a-4 comprising derived and/or modified sequence from HRSV(Memphis-37)__AIY60640.1__F_DSCav1_mut5 (opt1)
gggagacuccugucgggcggaaguaggaggaguagaguuuaaaaacaguacucuuuuuccgguucgggacguaguugaagcaacgacaagccggauaaccgcucuugagacaggaagcuuaccauggagcugcccauccucaagaccaacgccaucaccacgauccuggccgcggugacccugugcuucgccagcucccagaacaucaccgaggaguucuaccagagcacgugcuccgccgucagcaagggcuaccucuccgcccugcgcaccgggugguacaccagcgugaucaccaucgagcuguccaacaucaaggagaacaagugcaacggcaccgacgccaaggugaagcucaucaagcaggagcuggacaaguacaagaacgcggucacggagcugcagcuccugaugcagagcaccccggccgccggguccggcagcgccaucgcguccgggaucgccgugugcaaggugcugcaccucgagggcgaggucaacaagaucaagaacgcccugcugagcaccaacaaggccguggugucccucagcggcugcggggucuccgugcugaccuucaaggugcuggaccucaagaacuacaucgacaagcagcugcugcccauccucaacaagcagagcugcuccaucagcaacaucgagacggucaucgaguuccagcagaagaacaaccggcugcuggagaucacccgcgaguucuccgugaacgccggcgugaccacccccgucagcacguacaugcucaccaacagcgagcugcugucccucaucaacgacaugcccaucaccaacgaccagaagaagcugaugagcaacaacgugcagaucgugcggcagcaguccuacagcaucaugugcaucaucaaggaggagguccuggcguacguggugcagcucccgcuguacggggucaucgacacccccugcuggaagcugcacacgagcccccucugcaccaccaacaccaaggagggcuccaacaucugccugacgcgcaccgaccgggggugguacugcgacaacgccggcuccgugagcuucuucccccaggccgagaccugcaaggugcaguccaaccgcgucuucugcgacaccaugaacagccggacgcucccguccgaggugaaccugugcaacaucgacaucuucaaccccaaguacgacugcaagaucaugaccagcaagaccgacgucuccagcuccgugaucaccagccugggcgccaucguguccugcuacgggaagacgaagugcaccgccagcaacaagugccggggcaucaucaagaccuucuccaacgggugcgacuacgucagcaacaagggcguggacaccgugagcgucggcaacacgcucuacuacgugaacaagcaggaggggaagucccuguacgugaagggcgagcccaucaucaacuucuacgacccccuggucuucccgagcgacgaguucgacgcguccaucagccaggugaacgagaagaucaaccagucccucgccuucauccgcaagagcgacgagcugcugcacaacgugaacgucgggaaguccaccaccaacaucaugaucaccaccaucaucaucgugaucaucgugauccuccugcugcucaucgccgucggccuguuccuguacugcaaggcccggagcacgcccgugacccuguccaaggaccagcucagcgggaucaacaacaucgccuucuccaacugaggacuagucccuguucccagagcccacuuuuuuuucuuuuuuugaaauaaaauagccugucuuucagaucuaaaaaaaaaaaaaaaaaaaaaaaaaaaaaaaaaaaaaaaaaaaaaaaaaaaaaaaaaaaaaaaaugcaucccccccccccccccccccccccccccccccaaaggcucuuuucagagccaccagaauu

SEQ ID NO: 16927 - RNA, 1933 nt, Artificial Sequence
  mRNA product Design a-4 comprising derived and/or modified sequence from HRSV(Memphis-37)__AIY60640.1__F_DSCav1_mut5 (opt2)
gggagacuccugucgggcggaaguaggaggaguagaguuuaaaaacaguacucuuuuuccgguucgggacguaguugaagcaacgacaagccggauaaccgcucuugagacaggaagcuuaccauggagcuccccauccucaagaccaacgccaucaccaccauccucgccgccgucacccucugcuucgccuccucccagaacaucaccgaggaguucuaccaguccaccugcuccgccgucuccaagggcuaccucuccgcccuccgcaccggcugguacaccuccgucaucaccaucgagcucuccaacaucaaggagaacaagugcaacggcaccgacgccaaggucaagcucaucaagcaggagcucgacaaguacaagaacgccgucaccgagcuccagcuccucaugcaguccacccccgccgccggcuccggcuccgccaucgccuccggcaucgccgucugcaagguccuccaccucgagggcgaggucaacaagaucaagaacgcccuccucuccaccaacaaggccgucgucucccucuccggcugcggcgucuccguccucaccuucaagguccucgaccucaagaacuacaucgacaagcagcuccuccccauccucaacaagcaguccugcuccaucuccaacaucgagaccgucaucgaguuccagcagaagaacaaccgccuccucgagaucacccgcgaguucuccgucaacgccggcgucaccacccccgucuccaccuacaugcucaccaacuccgagcuccucucccucaucaacgacaugcccaucaccaacgaccagaagaagcucauguccaacaacguccagaucguccgccagcaguccuacuccaucaugugcaucaucaaggaggagguccucgccuacgucguccagcucccccucuacggcgucaucgacacccccugcuggaagcuccacaccuccccccucugcaccaccaacaccaaggagggcuccaacaucugccucacccgcaccgaccgcggcugguacugcgacaacgccggcuccgucuccuucuucccccaggccgagaccugcaagguccaguccaaccgcgucuucugcgacaccaugaacucccgcacccuccccuccgaggucaaccucugcaacaucgacaucuucaaccccaaguacgacugcaagaucaugaccuccaagaccgacgucuccuccuccgucaucaccucccucggcgccaucgucuccugcuacggcaagaccaagugcaccgccuccaacaagugccgcggcaucaucaagaccuucuccaacggcugcgacuacgucuccaacaagggcgucgacaccgucuccgucggcaacacccucuacuacgucaacaagcaggagggcaagucccucuacgucaagggcgagcccaucaucaacuucuacgacccccucgucuuccccuccgacgaguucgacgccuccaucucccaggucaacgagaagaucaaccagucccucgccuucauccgcaaguccgacgagcuccuccacaacgucaacgucggcaaguccaccaccaacaucaugaucaccaccaucaucaucgucaucaucgucauccuccuccuccucaucgccgucggccucuuccucuacugcaaggcccgcuccacccccgucacccucuccaaggaccagcucuccggcaucaacaacaucgccuucuccaacugaggacuagucccuguucccagagcccacuuuuuuuucuuuuuuugaaauaaaauagccugucuuucagaucuaaaaaaaaaaaaaaaaaaaaaaaaaaaaaaaaaaaaaaaaaaaaaaaaaaaaaaaaaaaaaaaaugcaucccccccccccccccccccccccccccccccaaaggcucuuuucagagccaccagaauu

SEQ ID NO: 16928 - RNA, 1933 nt, Artificial Sequence
  mRNA product Design a-4 comprising derived and/or modified sequence from HRSV(Memphis-37)__AIY60640.1__F_DSCav1_mut5 (opt3)
gggagacuccugucgggcggaaguaggaggaguagaguuuaaaaacaguacucuuuuuccgguucgggacguaguugaagcaacgacaagccggauaaccgcucuugagacaggaagcuuaccauggagcugcccauccucaagaccaacgccauuacaacuauacuugcugcagugacgcugugcuucgccagcucccagaauaucaccgaagaguuuuaccaaucuacauguucagcggucaguaaaggcuauuugagcgcuuuaagaacugggugguacaccuccguuauuacaaucgaacugucuaacauuaaggagaauaaaugcaacggaaccgacgccaaggugaaacuaaucaagcaggaacucgauaaguauaaaaaugcaguaacugagcugcagcuucugaugcagucgaccccugccgcugguucaggcagcgcaauagccagugggaucgcuguguguaaggucuugcaccucgagggagaagugaacaaaauuaagaaugcccugcuguccacaaacaaagcgguugugucucucagcggcugcggugucuccguguuaacguucaagguacuggaccuuaagaauuacaucgauaaacaauugcugccaauucuaaacaagcagucauguaguaucagcaauauagagacuguuauugaauuucagcagaaaaacaauaggcuccuggagaucacccgggaguucucugugaacgcaggggucacaacuccgguguccaccuauaugcuuacaaauucagaacuguugagccucauuaacgacaugcccaucaccaacgaucaaaagaaacugaugaguaauaacgugcagaucguccgccagcagucuuacuccauuaugugcauaaucaaggaggaaguuuuagccuaugugguacaacugccucucuacggagugauugacacgccauguuggaaacuucauacuagcccccugugcacaaccaauacuaaggagggcucgaacaucuguuugacacgaaccgaucguggcugguacugcgacaaugcugggucugucuccuuuuucccucaggccgaaacguguaaggugcagucaaacagaguguuuugcgauaccaugaauaguagaacacugccaagcgaggugaaccucugcaauauagacauuuucaaccccaaauaugauuguaagaucaugacuuccaaaaccgacgucucuagcucagugaucacaagucugggagcaauuguauccugcuacgguaagacuaaauguaccgcuagcaauaagugcaggggcaucauuaagacauuuucuaacgggugugauuauguuucaaauaaaggaguggacaccgucagugugggcaacacucuuuacuaugucaauaagcaagaggguaaaagccuguacgugaagggggaaccuauaaucaacuucuaugacccauugguuuuuccguccgaugaguucgacgccucuauuucgcagguuaacgagaaaaucaaucagagccucgcguuuauccggaaguccgaugaacuguuacacaacguaaaugucggaaagucaacgacaaacauuaugauaaccacuaucauuaucgugauuaucguuauacugcuacuccugaucgccgugggccuuuucuuguacugcaaagcacgcaguacccccgucacacugucuaaggaccagcucagcggcauuaauaacaucgcuuucuccaauugaggacuagucccuguucccagagcccacuuuuuuuucuuuuuuugaaauaaaauagccugucuuucagaucuaaaaaaaaaaaaaaaaaaaaaaaaaaaaaaaaaaaaaaaaaaaaaaaaaaaaaaaaaaaaaaaaugcaucccccccccccccccccccccccccccccccaaaggcucuuuucagagccaccagaauu

SEQ ID NO: 16929 - RNA, 1933 nt, Artificial Sequence
  mRNA product Design a-4 comprising derived and/or modified sequence from HRSV(Memphis-37)__AIY60640.1__F_DSCav1_mut5 (opt4)
gggagacuccugucgggcggaaguaggaggaguagaguuuaaaaacaguacucuuuuuccgguucgggacguaguugaagcaacgacaagccggauaaccgcucuugagacaggaagcuuaccauggagcugcccauccugaagaccaacgccaucaccaccauccuggccgccgugacccugugcuucgccagcagccagaacaucaccgaggaguucuaccagagcaccugcagcgccgugagcaagggcuaccugagcgcccugagaaccggcugguacaccagcgugaucaccaucgagcugagcaacaucaaggagaacaagugcaacggcaccgacgccaaggugaagcugaucaagcaggagcuggacaaguacaagaacgccgugaccgagcugcagcugcugaugcagagcacccccgccgccggcagcggcagcgccaucgccagcggcaucgccgugugcaaggugcugcaccuggagggcgaggugaacaagaucaagaacgcccugcugagcaccaacaaggccguggugagccugagcggcugcggcgugagcgugcugaccuucaaggugcuggaccugaagaacuacaucgacaagcagcugcugcccauccugaacaagcagagcugcagcaucagcaacaucgagaccgugaucgaguuccagcagaagaacaacagacugcuggagaucaccagagaguucagcgugaacgccggcgugaccacccccgugagcaccuacaugcugaccaacagcgagcugcugagccugaucaacgacaugcccaucaccaacgaccagaagaagcugaugagcaacaacgugcagaucgugagacagcagagcuacagcaucaugugcaucaucaaggaggaggugcuggccuacguggugcagcugccccuguacggcgugaucgacacccccugcuggaagcugcacaccagcccccugugcaccaccaacaccaaggagggcagcaacaucugccugaccagaaccgacagaggcugguacugcgacaacgccggcagcgugagcuucuucccccaggccgagaccugcaaggugcagagcaacagaguguucugcgacaccaugaacagcagaacccugcccagcgaggugaaccugugcaacaucgacaucuucaaccccaaguacgacugcaagaucaugaccagcaagaccgacgugagcagcagcgugaucaccagccugggcgccaucgugagcugcuacggcaagaccaagugcaccgccagcaacaagugcagaggcaucaucaagaccuucagcaacggcugcgacuacgugagcaacaagggcguggacaccgugagcgugggcaacacccuguacuacgugaacaagcaggagggcaagagccuguacgugaagggcgagcccaucaucaacuucuacgacccccugguguuccccagcgacgaguucgacgccagcaucagccaggugaacgagaagaucaaccagagccuggccuucaucagaaagagcgacgagcugcugcacaacgugaacgugggcaagagcaccaccaacaucaugaucaccaccaucaucaucgugaucaucgugauccugcugcugcugaucgccgugggccuguuccuguacugcaaggccagaagcacccccgugacccugagcaaggaccagcugagcggcaucaacaacaucgccuucagcaacugaggacuagucccuguucccagagcccacuuuuuuuucuuuuuuugaaauaaaauagccugucuuucagaucuaaaaaaaaaaaaaaaaaaaaaaaaaaaaaaaaaaaaaaaaaaaaaaaaaaaaaaaaaaaaaaaaugcaucccccccccccccccccccccccccccccccaaaggcucuuuucagagccaccagaauu

SEQ ID NO: 16930 - RNA, 1933 nt, Artificial Sequence
  mRNA product Design a-4 comprising derived and/or modified sequence from HRSV(Memphis-37)__AIY60640.1__F_DSCav1_mut5 (opt5)
gggagacuccugucgggcggaaguaggaggaguagaguuuaaaaacaguacucuuuuuccgguucgggacguaguugaagcaacgacaagccggauaaccgcucuugagacaggaagcuuaccauggagcugcccauccucaagaccaacgccauuacaacgauccuggcugccgugacccuuugcuucgcgagcucccagaauauuacagaagaguuuuaccaaucuaccuguagcgcugucuccaaaggcuaucugucugcccucagaacagggugguacaccagcguuaucacaauugaacuguccaacaucaaggagaauaaaugcaacggaaccgacgccaaggugaaacuuaucaagcaggaacuggauaaguauaaaaaugcugugacggagcuccagcugcugaugcagucuaccccugccgcuggcagcggguccgccauugcgagcggaaucgccgucuguaaggugcuccaccuggagggcgaaguuaacaaaauuaagaaugcccuucugucuacaaacaaagcuguggucucccucagcgggugcggagugucuguucugaccuucaaggugcuugaccugaagaauuacaucgauaaacaacuccugccgauucugaacaagcaguccuguagcaucucuaauauugagacagucaucgaauuucagcagaaaaacaaucggcuccuggagaucacccgcgaguucuccgugaacgcuggcgugacgacacccgucagcaccuauaugcuuacaaauuccgaacugcucucucugauuaacgacaugccuaucaccaacgaucaaaagaaacuuaugagcaauaacguucagauugugagacagcaguccuacagcaucaugugcauuaucaaggaggaagugcuggccuaugucgugcaacucccccuguacggcguuaucgacaccccuuguuggaaacugcauacaucuccccucugcacgaccaauacaaaggagggguccaacauuugucugacccggacagaucgcggaugguacugcgacaaugcgggcagcgugagcuuuuucccucaggccgaaaccuguaagguccagucuaacagaguguuuugcgauacgaugaacuccagaacacugccgucugagguuaaucucugcaauaucgacauuuucaaccccaaauaugauuguaagaucaugaccagcaaaaccgacguguccagcucugucauuacaucccugggggcuaucgugagcugcuacggaaagaccaaauguacagccucuaauaagugccggggcaucauuaagacguuuuccaacgggugugauuaugucagcaauaaaggaguggacaccguuuccgugggcaacacacuuuacuaugucaauaagcaagagggcaaaucucuguacgugaagggggaaccuaucauuaacuucuaugacccccucguuuuuccuagcgaugaguucgacgcuuccaucucucaggugaacgagaaaauuaaucagagccuggccuuuauccgcaaguccgaugaacugcuccacaacgucaaugugggaaagagcaccacaaacauuaugaucaccacgaucauuaucgugauuaucguuauucugcuucugcucaucgccgucggccuguuccuguacugcaaagcuagaucuacccccgugacacuuuccaaggaccagcucagcgggaucaauaacauugcguucucuaauugaggacuagucccuguucccagagcccacuuuuuuuucuuuuuuugaaauaaaauagccugucuuucagaucuaaaaaaaaaaaaaaaaaaaaaaaaaaaaaaaaaaaaaaaaaaaaaaaaaaaaaaaaaaaaaaaaugcaucccccccccccccccccccccccccccccccaaaggcucuuuucagagccaccagaauu

SEQ ID NO: 16931 - RNA, 1933 nt, Artificial Sequence
  mRNA product Design a-4 comprising derived and/or modified sequence from HRSV(Memphis-37)__AIY60640.1__F_DSCav1_mut5 (opt6)
gggagacuccugucgggcggaaguaggaggaguagaguuuaaaaacaguacucuuuuuccgguucgggacguaguugaagcaacgacaagccggauaaccgcucuugagacaggaagcuuaccauggaacucccaaucuuaaaaacaaacgcaauaacuacaauacucgcagcaguaacacuaugcuucgcaucaucacaaaacauaaccgaagaauuuuaccaaaguacaugcucagcaguaucaaaagguuaccucucagcccuaagaaccggaugguacacaucaguaaucacuauagaacuauccaauauaaaagaaaacaaaugcaacggcacugacgcaaaaguuaaauuaauuaaacaagaacucgauaaauauaaaaaugcaguaacagaacuacaacuacuaaugcaaagcaccccagcugcaggaagcggaucagcaaucgcaucaggaauagcaguauguaaaguacuacaccuagaaggagaagucaacaaaaucaaaaaugcacuacuaaguacaaacaaagcuguaguaagccuaucagguugcggaguaucaguauuaacauuuaaaguccucgaccuaaaaaauuacauagauaaacaacucuuaccaauacucaauaaacaaaguugcagcaucagcaacauagaaacagucaucgaauuucaacaaaaaaauaauagacuccuagaaauaacacgugaauuuucaguaaaugcuggaguaacaacaccaguaucuacauauaugcuaacaaauagcgaacuacucucacuuauuaacgauaugcccauaacaaacgaccaaaaaaaacuuaugucaaacaauguucaaauaguuagacaacaauccuacagcauaaugugcauaaucaaagaagaaguucuagcuuacguaguacaacuaccacucuaugguguuaucgacacccccuguuggaaacuucacacaucaccacuaugcacaacaaacacaaaagaaggaucaaauauuugcuuaacaagaacagauagaggaugguauugcgauaaugccggaucaguaucauuuuuuccacaagcagaaacauguaaaguacaauccaaccgaguauuuugcgacaccaugaacuccagaacacuaccaucugaagucaaccuauguaauauagauauauuuaacccaaaauaugacuguaaaaucaugacaucaaaaacugauguaaguucuaguguaauaaccagcuuaggcgccauaguaagcuguuacgguaaaacaaaaugcacagcaagcaacaaaugccgcgguauaauaaaaacauucucaaacggaugcgauuauguaaguaacaaaggaguagauacagucuccguaggcaacacauuauacuacguaaacaaacaagaaggaaaaucacuauauguaaaaggagaaccaaucauaaauuucuacgacccacuuguauuccccagcgacgaauuugaugcuuccauuucacaagucaacgaaaaaauaaaccaaucauuagccuucauaagaaaaucagacgaauuauuacauaauguuaaugucggcaaauccacaacuaauauaaugauaacaacaaucauaauaguaauaaucguuauacuacuauuacucauagcaguaggacucuucuuauauuguaaagccagauccaccccaguaacacucucaaaagaccaauuaucaggaauuaauaacaucgcauuuucaaacuaaggacuagucccuguucccagagcccacuuuuuuuucuuuuuuugaaauaaaauagccugucuuucagaucuaaaaaaaaaaaaaaaaaaaaaaaaaaaaaaaaaaaaaaaaaaaaaaaaaaaaaaaaaaaaaaaaugcaucccccccccccccccccccccccccccccccaaaggcucuuuucagagccaccagaauu

SEQ ID NO: 16932 - RNA, 1933 nt, Artificial Sequence
  mRNA product Design a-4 comprising derived and/or modified sequence from HRSV(Memphis-37)__AIY60640.1__F_DSCav1_mut5 (opt11)
gggagacuccugucgggcggaaguaggaggaguagaguuuaaaaacaguacucuuuuuccgguucgggacguaguugaagcaacgacaagccggauaaccgcucuugagacaggaagcuuaccauggaacuccccauccuuaaaaccaacgcaaucaccacaauacucgccgccgucacccucugcuuugcguccucccagaacaucaccgaagaguucuaccaaucgaccugcagcgccgucagcaagggcuaccucucagcccuccgaacaggcugguacacauccgucaucaccaucgaacucucaaacauaaaagaaaacaaguguaacggcaccgacgcgaaaguuaaacucaucaaacaagaacucgauaaauacaaaaacgcaguaaccgaacuacaacuccuaaugcaauccacacccgcagccggcagcggcuccgcaaucgccuccggcauagcagucugcaaaguccuccaccucgaaggagaagucaauaaaaucaaaaacgcccuccuauccaccaacaaagcgguugucucccuguccggaugcggaguuagcguccuaaccuucaaggugcucgaccucaaaaacuacauagacaaacaacuacuccccauacucaacaaacaaucaugcuccaucagcaacaucgagaccgucaucgaguuccaacagaaaaacaaccgccuccucgaaaucacacgagaguucuccguaaacgccggcgucacaacccccguuuccacuuacaugcucacaaacagcgaacuccucucccucaucaacgacaugccaaucaccaacgaccaaaagaaacucauguccaacaacguccaaaucguccgccaacaaagcuacagcauaaugugcaucauaaaagaagaaguacucgcguacguaguccaacuaccccuauacggcgucaucgacacccccugcuggaaacugcacacuucuccccucuguacaaccaacacuaaagaaggcucgaacaucugccucaccagaacagaccgaggaugguacugcgacaacgccggcuccgucagcuucuucccccaggccgaaacaugcaaaguacaaucaaaccgagucuucugcgacacaaugaacagcagaacucuacccuccgaaguuaaccuaugcaacaucgacaucuucaaccccaaauacgacugcaaaauaaugaccucaaaaacagacguguccagcuccguuaucaccucucucggagccaucguauccuguuauggaaaaaccaaaugcaccgccucaaacaaaugccgaggcauaaucaaaacauucucaaauggaugcgacuacguauccaacaaaggagucgacaccgucagcgugggcaauacccucuacuacgucaacaaacaggaagggaaaucccucuauguaaagggcgagcccauuauuaacuucuaugacccccucguguucccaagcgacgaguucgacgccuccauaucacaagucaaugagaaaaucaaccaaucacuagcuuucauucgcaaauccgacgaacuccuucacaacgucaacgucggcaaauccaccaccaacaucaugaucaccaccauaauuaucgucauuaucgucauacuacuccuacucaucgccgucggccucuuccucuauugcaaagcacgcucgacacccgucacccuuucaaaagaccaacuuuccggcauaaacaacauagccuucagcaacuagggacuagucccuguucccagagcccacuuuuuuuucuuuuuuugaaauaaaauagccugucuuucagaucuaaaaaaaaaaaaaaaaaaaaaaaaaaaaaaaaaaaaaaaaaaaaaaaaaaaaaaaaaaaaaaaaugcaucccccccccccccccccccccccccccccccaaaggcucuuuucagagccaccagaauu

SEQ ID NO: 16933 - RNA, 1879 nt, Artificial Sequence
  mRNA product Design a-5 comprising derived and/or modified sequence from HRSV(Memphis-37)__AIY60640.1__F_DSCav1_mut5 (opt1)
gggagacuuucccauucuguagcagaauuugguguugccuguggucuuggucccgcggagaagcuuaccauggagcugcccauccucaagaccaacgccaucaccacgauccuggccgcggugacccugugcuucgccagcucccagaacaucaccgaggaguucuaccagagcacgugcuccgccgucagcaagggcuaccucuccgcccugcgcaccgggugguacaccagcgugaucaccaucgagcuguccaacaucaaggagaacaagugcaacggcaccgacgccaaggugaagcucaucaagcaggagcuggacaaguacaagaacgcggucacggagcugcagcuccugaugcagagcaccccggccgccggcuccgggagcgcgaucgccuccggcaucgccgucugcaaggugcugcaccucgagggcgaggugaacaagaucaagaacgcccugcuguccaccaacaaggccgucgugagccucuccggcugcggggugagcguccugaccuucaaggugcuggaccucaagaacuacaucgacaagcagcugcugcccauccugaacaagcagagcugcuccaucagcaacaucgagaccgucaucgaguuccagcagaagaacaaccgccuccuggagaucacgcgggaguucagcgugaacgcgggcgugaccacccccgucuccaccuacaugcugacgaacagcgagcuccugucccugaucaacgacaugccgaucaccaacgaccagaagaagcucaugagcaacaacgugcagaucgugcgccagcaguccuacagcaucaugugcaucaucaaggaggagguccuggccuacguggugcagcugccccucuacggggucaucgacacccccugcuggaagcugcacaccagcccccugugcacgaccaacaccaaggagggcuccaacaucugccucacccggacggaccgcgggugguacugcgacaacgccggcagcguguccuucuucccgcaggccgagaccugcaagguccagagcaaccggguguucugcgacaccaugaacucccggacccugcccagcgaggugaaccucugcaacaucgacaucuucaaccccaaguacgacugcaagaucaugacguccaagaccgacgucagcuccagcgugaucaccucccugggcgccaucgugagcugcuacgggaagaccaagugcacggcgagcaacaagugccgcggcaucaucaagaccuucuccaacgggugcgacuacgucagcaacaagggcguggacaccguguccgucggcaacacccuguacuacgugaacaagcaggagggcaagagccucuacgugaagggggagcccaucaucaacuucuacgacccgcuggucuuccccuccgacgaguucgacgccagcaucucccaggugaacgagaagaucaaccagagccuggccuucauccggaaguccgacgagcuccugcacaacgugaacgucggcaagagcaccacgaacaucaugaucaccaccaucaucaucgugaucaucgugauccugcugcuccugaucgccgucgggcuguuccucuacugcaaggcccgcuccacccccgugacgcugagcaaggaccagcuguccgggaucaacaacaucgcguucagcaacugaggacuagucccuguucccagagcccacuuuuuuuucuuuuuuugaaauaaaauagccugucuuucagaucuaaaaaaaaaaaaaaaaaaaaaaaaaaaaaaaaaaaaaaaaaaaaaaaaaaaaaaaaaaaaaaaaugcaucccccccccccccccccccccccccccccccaaaggcucuuuucagagccaccagaauu

SEQ ID NO: 16934 - RNA, 1879 nt, Artificial Sequence
  mRNA product Design a-5 comprising derived and/or modified sequence from HRSV(Memphis-37)__AIY60640.1__F_DSCav1_mut5 (opt1)
gggagacuuucccauucuguagcagaauuugguguugccuguggucuuggucccgcggagaagcuuaccauggagcugcccauccucaagaccaacgccaucaccacgauccuggccgcggugacccugugcuucgccagcucccagaacaucaccgaggaguucuaccagagcacgugcuccgccgucagcaagggcuaccucuccgcccugcgcaccgggugguacaccagcgugaucaccaucgagcuguccaacaucaaggagaacaagugcaacggcaccgacgccaaggugaagcucaucaagcaggagcuggacaaguacaagaacgcggucacggagcugcagcuccugaugcagagcaccccggccgccggguccggcagcgccaucgcguccgggaucgccgugugcaaggugcugcaccucgagggcgaggucaacaagaucaagaacgcccugcugagcaccaacaaggccguggugucccucagcggcugcggggucuccgugcugaccuucaaggugcuggaccucaagaacuacaucgacaagcagcugcugcccauccucaacaagcagagcugcuccaucagcaacaucgagacggucaucgaguuccagcagaagaacaaccggcugcuggagaucacccgcgaguucuccgugaacgccggcgugaccacccccgucagcacguacaugcucaccaacagcgagcugcugucccucaucaacgacaugcccaucaccaacgaccagaagaagcugaugagcaacaacgugcagaucgugcggcagcaguccuacagcaucaugugcaucaucaaggaggagguccuggcguacguggugcagcucccgcuguacggggucaucgacacccccugcuggaagcugcacacgagcccccucugcaccaccaacaccaaggagggcuccaacaucugccugacgcgcaccgaccgggggugguacugcgacaacgccggcuccgugagcuucuucccccaggccgagaccugcaaggugcaguccaaccgcgucuucugcgacaccaugaacagccggacgcucccguccgaggugaaccugugcaacaucgacaucuucaaccccaaguacgacugcaagaucaugaccagcaagaccgacgucuccagcuccgugaucaccagccugggcgccaucguguccugcuacgggaagacgaagugcaccgccagcaacaagugccggggcaucaucaagaccuucuccaacgggugcgacuacgucagcaacaagggcguggacaccgugagcgucggcaacacgcucuacuacgugaacaagcaggaggggaagucccuguacgugaagggcgagcccaucaucaacuucuacgacccccuggucuucccgagcgacgaguucgacgcguccaucagccaggugaacgagaagaucaaccagucccucgccuucauccgcaagagcgacgagcugcugcacaacgugaacgucgggaaguccaccaccaacaucaugaucaccaccaucaucaucgugaucaucgugauccuccugcugcucaucgccgucggccuguuccuguacugcaaggcccggagcacgcccgugacccuguccaaggaccagcucagcgggaucaacaacaucgccuucuccaacugaggacuagucccuguucccagagcccacuuuuuuuucuuuuuuugaaauaaaauagccugucuuucagaucuaaaaaaaaaaaaaaaaaaaaaaaaaaaaaaaaaaaaaaaaaaaaaaaaaaaaaaaaaaaaaaaaugcaucccccccccccccccccccccccccccccccaaaggcucuuuucagagccaccagaauu

SEQ ID NO: 16935 - RNA, 1879 nt, Artificial Sequence
  mRNA product Design a-5 comprising derived and/or modified sequence from HRSV(Memphis-37)__AIY60640.1__F_DSCav1_mut5 (opt2)
gggagacuuucccauucuguagcagaauuugguguugccuguggucuuggucccgcggagaagcuuaccauggagcuccccauccucaagaccaacgccaucaccaccauccucgccgccgucacccucugcuucgccuccucccagaacaucaccgaggaguucuaccaguccaccugcuccgccgucuccaagggcuaccucuccgcccuccgcaccggcugguacaccuccgucaucaccaucgagcucuccaacaucaaggagaacaagugcaacggcaccgacgccaaggucaagcucaucaagcaggagcucgacaaguacaagaacgccgucaccgagcuccagcuccucaugcaguccacccccgccgccggcuccggcuccgccaucgccuccggcaucgccgucugcaagguccuccaccucgagggcgaggucaacaagaucaagaacgcccuccucuccaccaacaaggccgucgucucccucuccggcugcggcgucuccguccucaccuucaagguccucgaccucaagaacuacaucgacaagcagcuccuccccauccucaacaagcaguccugcuccaucuccaacaucgagaccgucaucgaguuccagcagaagaacaaccgccuccucgagaucacccgcgaguucuccgucaacgccggcgucaccacccccgucuccaccuacaugcucaccaacuccgagcuccucucccucaucaacgacaugcccaucaccaacgaccagaagaagcucauguccaacaacguccagaucguccgccagcaguccuacuccaucaugugcaucaucaaggaggagguccucgccuacgucguccagcucccccucuacggcgucaucgacacccccugcuggaagcuccacaccuccccccucugcaccaccaacaccaaggagggcuccaacaucugccucacccgcaccgaccgcggcugguacugcgacaacgccggcuccgucuccuucuucccccaggccgagaccugcaagguccaguccaaccgcgucuucugcgacaccaugaacucccgcacccuccccuccgaggucaaccucugcaacaucgacaucuucaaccccaaguacgacugcaagaucaugaccuccaagaccgacgucuccuccuccgucaucaccucccucggcgccaucgucuccugcuacggcaagaccaagugcaccgccuccaacaagugccgcggcaucaucaagaccuucuccaacggcugcgacuacgucuccaacaagggcgucgacaccgucuccgucggcaacacccucuacuacgucaacaagcaggagggcaagucccucuacgucaagggcgagcccaucaucaacuucuacgacccccucgucuuccccuccgacgaguucgacgccuccaucucccaggucaacgagaagaucaaccagucccucgccuucauccgcaaguccgacgagcuccuccacaacgucaacgucggcaaguccaccaccaacaucaugaucaccaccaucaucaucgucaucaucgucauccuccuccuccucaucgccgucggccucuuccucuacugcaaggcccgcuccacccccgucacccucuccaaggaccagcucuccggcaucaacaacaucgccuucuccaacugaggacuagucccuguucccagagcccacuuuuuuuucuuuuuuugaaauaaaauagccugucuuucagaucuaaaaaaaaaaaaaaaaaaaaaaaaaaaaaaaaaaaaaaaaaaaaaaaaaaaaaaaaaaaaaaaaugcaucccccccccccccccccccccccccccccccaaaggcucuuuucagagccaccagaauu

SEQ ID NO: 16936 - RNA, 1879 nt, Artificial Sequence
  mRNA product Design a-5 comprising derived and/or modified sequence from HRSV(Memphis-37)__AIY60640.1__F_DSCav1_mut5 (opt3)
gggagacuuucccauucuguagcagaauuugguguugccuguggucuuggucccgcggagaagcuuaccauggagcugcccauccucaagaccaacgccauuacaacuauacuugcugcagugacgcugugcuucgccagcucccagaauaucaccgaagaguuuuaccaaucuacauguucagcggucaguaaaggcuauuugagcgcuuuaagaacugggugguacaccuccguuauuacaaucgaacugucuaacauuaaggagaauaaaugcaacggaaccgacgccaaggugaaacuaaucaagcaggaacucgauaaguauaaaaaugcaguaacugagcugcagcuucugaugcagucgaccccugccgcugguucaggcagcgcaauagccagugggaucgcuguguguaaggucuugcaccucgagggagaagugaacaaaauuaagaaugcccugcuguccacaaacaaagcgguugugucucucagcggcugcggugucuccguguuaacguucaagguacuggaccuuaagaauuacaucgauaaacaauugcugccaauucuaaacaagcagucauguaguaucagcaauauagagacuguuauugaauuucagcagaaaaacaauaggcuccuggagaucacccgggaguucucugugaacgcaggggucacaacuccgguguccaccuauaugcuuacaaauucagaacuguugagccucauuaacgacaugcccaucaccaacgaucaaaagaaacugaugaguaauaacgugcagaucguccgccagcagucuuacuccauuaugugcauaaucaaggaggaaguuuuagccuaugugguacaacugccucucuacggagugauugacacgccauguuggaaacuucauacuagcccccugugcacaaccaauacuaaggagggcucgaacaucuguuugacacgaaccgaucguggcugguacugcgacaaugcugggucugucuccuuuuucccucaggccgaaacguguaaggugcagucaaacagaguguuuugcgauaccaugaauaguagaacacugccaagcgaggugaaccucugcaauauagacauuuucaaccccaaauaugauuguaagaucaugacuuccaaaaccgacgucucuagcucagugaucacaagucugggagcaauuguauccugcuacgguaagacuaaauguaccgcuagcaauaagugcaggggcaucauuaagacauuuucuaacgggugugauuauguuucaaauaaaggaguggacaccgucagugugggcaacacucuuuacuaugucaauaagcaagaggguaaaagccuguacgugaagggggaaccuauaaucaacuucuaugacccauugguuuuuccguccgaugaguucgacgccucuauuucgcagguuaacgagaaaaucaaucagagccucgcguuuauccggaaguccgaugaacuguuacacaacguaaaugucggaaagucaacgacaaacauuaugauaaccacuaucauuaucgugauuaucguuauacugcuacuccugaucgccgugggccuuuucuuguacugcaaagcacgcaguacccccgucacacugucuaaggaccagcucagcggcauuaauaacaucgcuuucuccaauugaggacuagucccuguucccagagcccacuuuuuuuucuuuuuuugaaauaaaauagccugucuuucagaucuaaaaaaaaaaaaaaaaaaaaaaaaaaaaaaaaaaaaaaaaaaaaaaaaaaaaaaaaaaaaaaaaugcaucccccccccccccccccccccccccccccccaaaggcucuuuucagagccaccagaauu

SEQ ID NO: 16937 - RNA, 1879 nt, Artificial Sequence
  mRNA product Design a-5 comprising derived and/or modified sequence from HRSV(Memphis-37)__AIY60640.1__F_DSCav1_mut5 (opt4)
gggagacuuucccauucuguagcagaauuugguguugccuguggucuuggucccgcggagaagcuuaccauggagcugcccauccugaagaccaacgccaucaccaccauccuggccgccgugacccugugcuucgccagcagccagaacaucaccgaggaguucuaccagagcaccugcagcgccgugagcaagggcuaccugagcgcccugagaaccggcugguacaccagcgugaucaccaucgagcugagcaacaucaaggagaacaagugcaacggcaccgacgccaaggugaagcugaucaagcaggagcuggacaaguacaagaacgccgugaccgagcugcagcugcugaugcagagcacccccgccgccggcagcggcagcgccaucgccagcggcaucgccgugugcaaggugcugcaccuggagggcgaggugaacaagaucaagaacgcccugcugagcaccaacaaggccguggugagccugagcggcugcggcgugagcgugcugaccuucaaggugcuggaccugaagaacuacaucgacaagcagcugcugcccauccugaacaagcagagcugcagcaucagcaacaucgagaccgugaucgaguuccagcagaagaacaacagacugcuggagaucaccagagaguucagcgugaacgccggcgugaccacccccgugagcaccuacaugcugaccaacagcgagcugcugagccugaucaacgacaugcccaucaccaacgaccagaagaagcugaugagcaacaacgugcagaucgugagacagcagagcuacagcaucaugugcaucaucaaggaggaggugcuggccuacguggugcagcugccccuguacggcgugaucgacacccccugcuggaagcugcacaccagcccccugugcaccaccaacaccaaggagggcagcaacaucugccugaccagaaccgacagaggcugguacugcgacaacgccggcagcgugagcuucuucccccaggccgagaccugcaaggugcagagcaacagaguguucugcgacaccaugaacagcagaacccugcccagcgaggugaaccugugcaacaucgacaucuucaaccccaaguacgacugcaagaucaugaccagcaagaccgacgugagcagcagcgugaucaccagccugggcgccaucgugagcugcuacggcaagaccaagugcaccgccagcaacaagugcagaggcaucaucaagaccuucagcaacggcugcgacuacgugagcaacaagggcguggacaccgugagcgugggcaacacccuguacuacgugaacaagcaggagggcaagagccuguacgugaagggcgagcccaucaucaacuucuacgacccccugguguuccccagcgacgaguucgacgccagcaucagccaggugaacgagaagaucaaccagagccuggccuucaucagaaagagcgacgagcugcugcacaacgugaacgugggcaagagcaccaccaacaucaugaucaccaccaucaucaucgugaucaucgugauccugcugcugcugaucgccgugggccuguuccuguacugcaaggccagaagcacccccgugacccugagcaaggaccagcugagcggcaucaacaacaucgccuucagcaacugaggacuagucccuguucccagagcccacuuuuuuuucuuuuuuugaaauaaaauagccugucuuucagaucuaaaaaaaaaaaaaaaaaaaaaaaaaaaaaaaaaaaaaaaaaaaaaaaaaaaaaaaaaaaaaaaaugcaucccccccccccccccccccccccccccccccaaaggcucuuuucagagccaccagaauu

SEQ ID NO: 16938 - RNA, 1879 nt, Artificial Sequence
  mRNA product Design a-5 comprising derived and/or modified sequence from HRSV(Memphis-37)__AIY60640.1__F_DSCav1_mut5 (opt5)
gggagacuuucccauucuguagcagaauuugguguugccuguggucuuggucccgcggagaagcuuaccauggagcugcccauccucaagaccaacgccauuacaacgauccuggcugccgugacccuuugcuucgcgagcucccagaauauuacagaagaguuuuaccaaucuaccuguagcgcugucuccaaaggcuaucugucugcccucagaacagggugguacaccagcguuaucacaauugaacuguccaacaucaaggagaauaaaugcaacggaaccgacgccaaggugaaacuuaucaagcaggaacuggauaaguauaaaaaugcugugacggagcuccagcugcugaugcagucuaccccugccgcuggcagcggguccgccauugcgagcggaaucgccgucuguaaggugcuccaccuggagggcgaaguuaacaaaauuaagaaugcccuucugucuacaaacaaagcuguggucucccucagcgggugcggagugucuguucugaccuucaaggugcuugaccugaagaauuacaucgauaaacaacuccugccgauucugaacaagcaguccuguagcaucucuaauauugagacagucaucgaauuucagcagaaaaacaaucggcuccuggagaucacccgcgaguucuccgugaacgcuggcgugacgacacccgucagcaccuauaugcuuacaaauuccgaacugcucucucugauuaacgacaugccuaucaccaacgaucaaaagaaacuuaugagcaauaacguucagauugugagacagcaguccuacagcaucaugugcauuaucaaggaggaagugcuggccuaugucgugcaacucccccuguacggcguuaucgacaccccuuguuggaaacugcauacaucuccccucugcacgaccaauacaaaggagggguccaacauuugucugacccggacagaucgcggaugguacugcgacaaugcgggcagcgugagcuuuuucccucaggccgaaaccuguaagguccagucuaacagaguguuuugcgauacgaugaacuccagaacacugccgucugagguuaaucucugcaauaucgacauuuucaaccccaaauaugauuguaagaucaugaccagcaaaaccgacguguccagcucugucauuacaucccugggggcuaucgugagcugcuacggaaagaccaaauguacagccucuaauaagugccggggcaucauuaagacguuuuccaacgggugugauuaugucagcaauaaaggaguggacaccguuuccgugggcaacacacuuuacuaugucaauaagcaagagggcaaaucucuguacgugaagggggaaccuaucauuaacuucuaugacccccucguuuuuccuagcgaugaguucgacgcuuccaucucucaggugaacgagaaaauuaaucagagccuggccuuuauccgcaaguccgaugaacugcuccacaacgucaaugugggaaagagcaccacaaacauuaugaucaccacgaucauuaucgugauuaucguuauucugcuucugcucaucgccgucggccuguuccuguacugcaaagcuagaucuacccccgugacacuuuccaaggaccagcucagcgggaucaauaacauugcguucucuaauugaggacuagucccuguucccagagcccacuuuuuuuucuuuuuuugaaauaaaauagccugucuuucagaucuaaaaaaaaaaaaaaaaaaaaaaaaaaaaaaaaaaaaaaaaaaaaaaaaaaaaaaaaaaaaaaaaugcaucccccccccccccccccccccccccccccccaaaggcucuuuucagagccaccagaauu

SEQ ID NO: 16939 - RNA, 1879 nt, Artificial Sequence
  mRNA product Design a-5 comprising derived and/or modified sequence from HRSV(Memphis-37)__AIY60640.1__F_DSCav1_mut5 (opt6)
gggagacuuucccauucuguagcagaauuugguguugccuguggucuuggucccgcggagaagcuuaccauggaacucccaaucuuaaaaacaaacgcaauaacuacaauacucgcagcaguaacacuaugcuucgcaucaucacaaaacauaaccgaagaauuuuaccaaaguacaugcucagcaguaucaaaagguuaccucucagcccuaagaaccggaugguacacaucaguaaucacuauagaacuauccaauauaaaagaaaacaaaugcaacggcacugacgcaaaaguuaaauuaauuaaacaagaacucgauaaauauaaaaaugcaguaacagaacuacaacuacuaaugcaaagcaccccagcugcaggaagcggaucagcaaucgcaucaggaauagcaguauguaaaguacuacaccuagaaggagaagucaacaaaaucaaaaaugcacuacuaaguacaaacaaagcuguaguaagccuaucagguugcggaguaucaguauuaacauuuaaaguccucgaccuaaaaaauuacauagauaaacaacucuuaccaauacucaauaaacaaaguugcagcaucagcaacauagaaacagucaucgaauuucaacaaaaaaauaauagacuccuagaaauaacacgugaauuuucaguaaaugcuggaguaacaacaccaguaucuacauauaugcuaacaaauagcgaacuacucucacuuauuaacgauaugcccauaacaaacgaccaaaaaaaacuuaugucaaacaauguucaaauaguuagacaacaauccuacagcauaaugugcauaaucaaagaagaaguucuagcuuacguaguacaacuaccacucuaugguguuaucgacacccccuguuggaaacuucacacaucaccacuaugcacaacaaacacaaaagaaggaucaaauauuugcuuaacaagaacagauagaggaugguauugcgauaaugccggaucaguaucauuuuuuccacaagcagaaacauguaaaguacaauccaaccgaguauuuugcgacaccaugaacuccagaacacuaccaucugaagucaaccuauguaauauagauauauuuaacccaaaauaugacuguaaaaucaugacaucaaaaacugauguaaguucuaguguaauaaccagcuuaggcgccauaguaagcuguuacgguaaaacaaaaugcacagcaagcaacaaaugccgcgguauaauaaaaacauucucaaacggaugcgauuauguaaguaacaaaggaguagauacagucuccguaggcaacacauuauacuacguaaacaaacaagaaggaaaaucacuauauguaaaaggagaaccaaucauaaauuucuacgacccacuuguauuccccagcgacgaauuugaugcuuccauuucacaagucaacgaaaaaauaaaccaaucauuagccuucauaagaaaaucagacgaauuauuacauaauguuaaugucggcaaauccacaacuaauauaaugauaacaacaaucauaauaguaauaaucguuauacuacuauuacucauagcaguaggacucuucuuauauuguaaagccagauccaccccaguaacacucucaaaagaccaauuaucaggaauuaauaacaucgcauuuucaaacuaaggacuagucccuguucccagagcccacuuuuuuuucuuuuuuugaaauaaaauagccugucuuucagaucuaaaaaaaaaaaaaaaaaaaaaaaaaaaaaaaaaaaaaaaaaaaaaaaaaaaaaaaaaaaaaaaaugcaucccccccccccccccccccccccccccccccaaaggcucuuuucagagccaccagaauu

SEQ ID NO: 16940 - RNA, 1879 nt, Artificial Sequence
  mRNA product Design a-5 comprising derived and/or modified sequence from HRSV(Memphis-37)__AIY60640.1__F_DSCav1_mut5 (opt11)
gggagacuuucccauucuguagcagaauuugguguugccuguggucuuggucccgcggagaagcuuaccauggaacuccccauccuuaaaaccaacgcaaucaccacaauacucgccgccgucacccucugcuuugcguccucccagaacaucaccgaagaguucuaccaaucgaccugcagcgccgucagcaagggcuaccucucagcccuccgaacaggcugguacacauccgucaucaccaucgaacucucaaacauaaaagaaaacaaguguaacggcaccgacgcgaaaguuaaacucaucaaacaagaacucgauaaauacaaaaacgcaguaaccgaacuacaacuccuaaugcaauccacacccgcagccggcagcggcuccgcaaucgccuccggcauagcagucugcaaaguccuccaccucgaaggagaagucaauaaaaucaaaaacgcccuccuauccaccaacaaagcgguugucucccuguccggaugcggaguuagcguccuaaccuucaaggugcucgaccucaaaaacuacauagacaaacaacuacuccccauacucaacaaacaaucaugcuccaucagcaacaucgagaccgucaucgaguuccaacagaaaaacaaccgccuccucgaaaucacacgagaguucuccguaaacgccggcgucacaacccccguuuccacuuacaugcucacaaacagcgaacuccucucccucaucaacgacaugccaaucaccaacgaccaaaagaaacucauguccaacaacguccaaaucguccgccaacaaagcuacagcauaaugugcaucauaaaagaagaaguacucgcguacguaguccaacuaccccuauacggcgucaucgacacccccugcuggaaacugcacacuucuccccucuguacaaccaacacuaaagaaggcucgaacaucugccucaccagaacagaccgaggaugguacugcgacaacgccggcuccgucagcuucuucccccaggccgaaacaugcaaaguacaaucaaaccgagucuucugcgacacaaugaacagcagaacucuacccuccgaaguuaaccuaugcaacaucgacaucuucaaccccaaauacgacugcaaaauaaugaccucaaaaacagacguguccagcuccguuaucaccucucucggagccaucguauccuguuauggaaaaaccaaaugcaccgccucaaacaaaugccgaggcauaaucaaaacauucucaaauggaugcgacuacguauccaacaaaggagucgacaccgucagcgugggcaauacccucuacuacgucaacaaacaggaagggaaaucccucuauguaaagggcgagcccauuauuaacuucuaugacccccucguguucccaagcgacgaguucgacgccuccauaucacaagucaaugagaaaaucaaccaaucacuagcuuucauucgcaaauccgacgaacuccuucacaacgucaacgucggcaaauccaccaccaacaucaugaucaccaccauaauuaucgucauuaucgucauacuacuccuacucaucgccgucggccucuuccucuauugcaaagcacgcucgacacccgucacccuuucaaaagaccaacuuuccggcauaaacaacauagccuucagcaacuagggacuagucccuguucccagagcccacuuuuuuuucuuuuuuugaaauaaaauagccugucuuucagaucuaaaaaaaaaaaaaaaaaaaaaaaaaaaaaaaaaaaaaaaaaaaaaaaaaaaaaaaaaaaaaaaaugcaucccccccccccccccccccccccccccccccaaaggcucuuuucagagccaccagaauu

SEQ ID NO: 16941 - RNA, 2060 nt, Artificial Sequence
  mRNA product Design b-1 comprising derived and/or modified sequence from HRSV(Memphis-37)__AIY60640.1__F_DSCav1_mut5 (opt1)
gggagacggagacggccugcaggaccugcucucucagcccucagccgaggccuacgccgagccgagugcgcagccgacgaccgggaggagccgcagccuucaacucugagguacugugauccgcgcugcccgccgggccgccccaguccgcugcugcggcaccuccuucccucgcgcccucuucgcucgccagcgccuucccugugagccugcgucaccgcggccgccaagcuuaccauggagcugcccauccucaagaccaacgccaucaccacgauccuggccgcggugacccugugcuucgccagcucccagaacaucaccgaggaguucuaccagagcacgugcuccgccgucagcaagggcuaccucuccgcccugcgcaccgggugguacaccagcgugaucaccaucgagcuguccaacaucaaggagaacaagugcaacggcaccgacgccaaggugaagcucaucaagcaggagcuggacaaguacaagaacgcggucacggagcugcagcuccugaugcagagcaccccggccgccggcuccgggagcgcgaucgccuccggcaucgccgucugcaaggugcugcaccucgagggcgaggugaacaagaucaagaacgcccugcuguccaccaacaaggccgucgugagccucuccggcugcggggugagcguccugaccuucaaggugcuggaccucaagaacuacaucgacaagcagcugcugcccauccugaacaagcagagcugcuccaucagcaacaucgagaccgucaucgaguuccagcagaagaacaaccgccuccuggagaucacgcgggaguucagcgugaacgcgggcgugaccacccccgucuccaccuacaugcugacgaacagcgagcuccugucccugaucaacgacaugccgaucaccaacgaccagaagaagcucaugagcaacaacgugcagaucgugcgccagcaguccuacagcaucaugugcaucaucaaggaggagguccuggccuacguggugcagcugccccucuacggggucaucgacacccccugcuggaagcugcacaccagcccccugugcacgaccaacaccaaggagggcuccaacaucugccucacccggacggaccgcgggugguacugcgacaacgccggcagcguguccuucuucccgcaggccgagaccugcaagguccagagcaaccggguguucugcgacaccaugaacucccggacccugcccagcgaggugaaccucugcaacaucgacaucuucaaccccaaguacgacugcaagaucaugacguccaagaccgacgucagcuccagcgugaucaccucccugggcgccaucgugagcugcuacgggaagaccaagugcacggcgagcaacaagugccgcggcaucaucaagaccuucuccaacgggugcgacuacgucagcaacaagggcguggacaccguguccgucggcaacacccuguacuacgugaacaagcaggagggcaagagccucuacgugaagggggagcccaucaucaacuucuacgacccgcuggucuuccccuccgacgaguucgacgccagcaucucccaggugaacgagaagaucaaccagagccuggccuucauccggaaguccgacgagcuccugcacaacgugaacgucggcaagagcaccacgaacaucaugaucaccaccaucaucaucgugaucaucgugauccugcugcuccugaucgccgucgggcuguuccucuacugcaaggcccgcuccacccccgugacgcugagcaaggaccagcuguccgggaucaacaacaucgcguucagcaacugaggacuaguguccaccugucccuccugggcugcuggauugucucguuuuccugccaaauaaacaggaucagcgcuuuacagaucuaaaaaaaaaaaaaaaaaaaaaaaaaaaaaaaaaaaaaaaaaaaaaaaaaaaaaaaaaaaaaaaaugcaucccccccccccccccccccccccccccccccaaaggcucuuuucagagccaccagaauu

SEQ ID NO: 16942 - RNA, 2060 nt, Artificial Sequence
  mRNA product Design b-1 comprising derived and/or modified sequence from HRSV(Memphis-37)__AIY60640.1__F_DSCav1_mut5 (opt1)
gggagacggagacggccugcaggaccugcucucucagcccucagccgaggccuacgccgagccgagugcgcagccgacgaccgggaggagccgcagccuucaacucugagguacugugauccgcgcugcccgccgggccgccccaguccgcugcugcggcaccuccuucccucgcgcccucuucgcucgccagcgccuucccugugagccugcgucaccgcggccgccaagcuuaccauggagcugcccauccucaagaccaacgccaucaccacgauccuggccgcggugacccugugcuucgccagcucccagaacaucaccgaggaguucuaccagagcacgugcuccgccgucagcaagggcuaccucuccgcccugcgcaccgggugguacaccagcgugaucaccaucgagcuguccaacaucaaggagaacaagugcaacggcaccgacgccaaggugaagcucaucaagcaggagcuggacaaguacaagaacgcggucacggagcugcagcuccugaugcagagcaccccggccgccggguccggcagcgccaucgcguccgggaucgccgugugcaaggugcugcaccucgagggcgaggucaacaagaucaagaacgcccugcugagcaccaacaaggccguggugucccucagcggcugcggggucuccgugcugaccuucaaggugcuggaccucaagaacuacaucgacaagcagcugcugcccauccucaacaagcagagcugcuccaucagcaacaucgagacggucaucgaguuccagcagaagaacaaccggcugcuggagaucacccgcgaguucuccgugaacgccggcgugaccacccccgucagcacguacaugcucaccaacagcgagcugcugucccucaucaacgacaugcccaucaccaacgaccagaagaagcugaugagcaacaacgugcagaucgugcggcagcaguccuacagcaucaugugcaucaucaaggaggagguccuggcguacguggugcagcucccgcuguacggggucaucgacacccccugcuggaagcugcacacgagcccccucugcaccaccaacaccaaggagggcuccaacaucugccugacgcgcaccgaccgggggugguacugcgacaacgccggcuccgugagcuucuucccccaggccgagaccugcaaggugcaguccaaccgcgucuucugcgacaccaugaacagccggacgcucccguccgaggugaaccugugcaacaucgacaucuucaaccccaaguacgacugcaagaucaugaccagcaagaccgacgucuccagcuccgugaucaccagccugggcgccaucguguccugcuacgggaagacgaagugcaccgccagcaacaagugccggggcaucaucaagaccuucuccaacgggugcgacuacgucagcaacaagggcguggacaccgugagcgucggcaacacgcucuacuacgugaacaagcaggaggggaagucccuguacgugaagggcgagcccaucaucaacuucuacgacccccuggucuucccgagcgacgaguucgacgcguccaucagccaggugaacgagaagaucaaccagucccucgccuucauccgcaagagcgacgagcugcugcacaacgugaacgucgggaaguccaccaccaacaucaugaucaccaccaucaucaucgugaucaucgugauccuccugcugcucaucgccgucggccuguuccuguacugcaaggcccggagcacgcccgugacccuguccaaggaccagcucagcgggaucaacaacaucgccuucuccaacugaggacuaguguccaccugucccuccugggcugcuggauugucucguuuuccugccaaauaaacaggaucagcgcuuuacagaucuaaaaaaaaaaaaaaaaaaaaaaaaaaaaaaaaaaaaaaaaaaaaaaaaaaaaaaaaaaaaaaaaugcaucccccccccccccccccccccccccccccccaaaggcucuuuucagagccaccagaauu

SEQ ID NO: 16943 - RNA, 2060 nt, Artificial Sequence
  mRNA product Design b-1 comprising derived and/or modified sequence from HRSV(Memphis-37)__AIY60640.1__F_DSCav1_mut5 (opt2)
gggagacggagacggccugcaggaccugcucucucagcccucagccgaggccuacgccgagccgagugcgcagccgacgaccgggaggagccgcagccuucaacucugagguacugugauccgcgcugcccgccgggccgccccaguccgcugcugcggcaccuccuucccucgcgcccucuucgcucgccagcgccuucccugugagccugcgucaccgcggccgccaagcuuaccauggagcuccccauccucaagaccaacgccaucaccaccauccucgccgccgucacccucugcuucgccuccucccagaacaucaccgaggaguucuaccaguccaccugcuccgccgucuccaagggcuaccucuccgcccuccgcaccggcugguacaccuccgucaucaccaucgagcucuccaacaucaaggagaacaagugcaacggcaccgacgccaaggucaagcucaucaagcaggagcucgacaaguacaagaacgccgucaccgagcuccagcuccucaugcaguccacccccgccgccggcuccggcuccgccaucgccuccggcaucgccgucugcaagguccuccaccucgagggcgaggucaacaagaucaagaacgcccuccucuccaccaacaaggccgucgucucccucuccggcugcggcgucuccguccucaccuucaagguccucgaccucaagaacuacaucgacaagcagcuccuccccauccucaacaagcaguccugcuccaucuccaacaucgagaccgucaucgaguuccagcagaagaacaaccgccuccucgagaucacccgcgaguucuccgucaacgccggcgucaccacccccgucuccaccuacaugcucaccaacuccgagcuccucucccucaucaacgacaugcccaucaccaacgaccagaagaagcucauguccaacaacguccagaucguccgccagcaguccuacuccaucaugugcaucaucaaggaggagguccucgccuacgucguccagcucccccucuacggcgucaucgacacccccugcuggaagcuccacaccuccccccucugcaccaccaacaccaaggagggcuccaacaucugccucacccgcaccgaccgcggcugguacugcgacaacgccggcuccgucuccuucuucccccaggccgagaccugcaagguccaguccaaccgcgucuucugcgacaccaugaacucccgcacccuccccuccgaggucaaccucugcaacaucgacaucuucaaccccaaguacgacugcaagaucaugaccuccaagaccgacgucuccuccuccgucaucaccucccucggcgccaucgucuccugcuacggcaagaccaagugcaccgccuccaacaagugccgcggcaucaucaagaccuucuccaacggcugcgacuacgucuccaacaagggcgucgacaccgucuccgucggcaacacccucuacuacgucaacaagcaggagggcaagucccucuacgucaagggcgagcccaucaucaacuucuacgacccccucgucuuccccuccgacgaguucgacgccuccaucucccaggucaacgagaagaucaaccagucccucgccuucauccgcaaguccgacgagcuccuccacaacgucaacgucggcaaguccaccaccaacaucaugaucaccaccaucaucaucgucaucaucgucauccuccuccuccucaucgccgucggccucuuccucuacugcaaggcccgcuccacccccgucacccucuccaaggaccagcucuccggcaucaacaacaucgccuucuccaacugaggacuaguguccaccugucccuccugggcugcuggauugucucguuuuccugccaaauaaacaggaucagcgcuuuacagaucuaaaaaaaaaaaaaaaaaaaaaaaaaaaaaaaaaaaaaaaaaaaaaaaaaaaaaaaaaaaaaaaaugcaucccccccccccccccccccccccccccccccaaaggcucuuuucagagccaccagaauu

SEQ ID NO: 16944 - RNA, 2060 nt, Artificial Sequence
  mRNA product Design b-1 comprising derived and/or modified sequence from HRSV(Memphis-37)__AIY60640.1__F_DSCav1_mut5 (opt3)
gggagacggagacggccugcaggaccugcucucucagcccucagccgaggccuacgccgagccgagugcgcagccgacgaccgggaggagccgcagccuucaacucugagguacugugauccgcgcugcccgccgggccgccccaguccgcugcugcggcaccuccuucccucgcgcccucuucgcucgccagcgccuucccugugagccugcgucaccgcggccgccaagcuuaccauggagcugcccauccucaagaccaacgccauuacaacuauacuugcugcagugacgcugugcuucgccagcucccagaauaucaccgaagaguuuuaccaaucuacauguucagcggucaguaaaggcuauuugagcgcuuuaagaacugggugguacaccuccguuauuacaaucgaacugucuaacauuaaggagaauaaaugcaacggaaccgacgccaaggugaaacuaaucaagcaggaacucgauaaguauaaaaaugcaguaacugagcugcagcuucugaugcagucgaccccugccgcugguucaggcagcgcaauagccagugggaucgcuguguguaaggucuugcaccucgagggagaagugaacaaaauuaagaaugcccugcuguccacaaacaaagcgguugugucucucagcggcugcggugucuccguguuaacguucaagguacuggaccuuaagaauuacaucgauaaacaauugcugccaauucuaaacaagcagucauguaguaucagcaauauagagacuguuauugaauuucagcagaaaaacaauaggcuccuggagaucacccgggaguucucugugaacgcaggggucacaacuccgguguccaccuauaugcuuacaaauucagaacuguugagccucauuaacgacaugcccaucaccaacgaucaaaagaaacugaugaguaauaacgugcagaucguccgccagcagucuuacuccauuaugugcauaaucaaggaggaaguuuuagccuaugugguacaacugccucucuacggagugauugacacgccauguuggaaacuucauacuagcccccugugcacaaccaauacuaaggagggcucgaacaucuguuugacacgaaccgaucguggcugguacugcgacaaugcugggucugucuccuuuuucccucaggccgaaacguguaaggugcagucaaacagaguguuuugcgauaccaugaauaguagaacacugccaagcgaggugaaccucugcaauauagacauuuucaaccccaaauaugauuguaagaucaugacuuccaaaaccgacgucucuagcucagugaucacaagucugggagcaauuguauccugcuacgguaagacuaaauguaccgcuagcaauaagugcaggggcaucauuaagacauuuucuaacgggugugauuauguuucaaauaaaggaguggacaccgucagugugggcaacacucuuuacuaugucaauaagcaagaggguaaaagccuguacgugaagggggaaccuauaaucaacuucuaugacccauugguuuuuccguccgaugaguucgacgccucuauuucgcagguuaacgagaaaaucaaucagagccucgcguuuauccggaaguccgaugaacuguuacacaacguaaaugucggaaagucaacgacaaacauuaugauaaccacuaucauuaucgugauuaucguuauacugcuacuccugaucgccgugggccuuuucuuguacugcaaagcacgcaguacccccgucacacugucuaaggaccagcucagcggcauuaauaacaucgcuuucuccaauugaggacuaguguccaccugucccuccugggcugcuggauugucucguuuuccugccaaauaaacaggaucagcgcuuuacagaucuaaaaaaaaaaaaaaaaaaaaaaaaaaaaaaaaaaaaaaaaaaaaaaaaaaaaaaaaaaaaaaaaugcaucccccccccccccccccccccccccccccccaaaggcucuuuucagagccaccagaauu

SEQ ID NO: 16945 - RNA, 2060 nt, Artificial Sequence
  mRNA product Design b-1 comprising derived and/or modified sequence from HRSV(Memphis-37)__AIY60640.1__F_DSCav1_mut5 (opt4)
gggagacggagacggccugcaggaccugcucucucagcccucagccgaggccuacgccgagccgagugcgcagccgacgaccgggaggagccgcagccuucaacucugagguacugugauccgcgcugcccgccgggccgccccaguccgcugcugcggcaccuccuucccucgcgcccucuucgcucgccagcgccuucccugugagccugcgucaccgcggccgccaagcuuaccauggagcugcccauccugaagaccaacgccaucaccaccauccuggccgccgugacccugugcuucgccagcagccagaacaucaccgaggaguucuaccagagcaccugcagcgccgugagcaagggcuaccugagcgcccugagaaccggcugguacaccagcgugaucaccaucgagcugagcaacaucaaggagaacaagugcaacggcaccgacgccaaggugaagcugaucaagcaggagcuggacaaguacaagaacgccgugaccgagcugcagcugcugaugcagagcacccccgccgccggcagcggcagcgccaucgccagcggcaucgccgugugcaaggugcugcaccuggagggcgaggugaacaagaucaagaacgcccugcugagcaccaacaaggccguggugagccugagcggcugcggcgugagcgugcugaccuucaaggugcuggaccugaagaacuacaucgacaagcagcugcugcccauccugaacaagcagagcugcagcaucagcaacaucgagaccgugaucgaguuccagcagaagaacaacagacugcuggagaucaccagagaguucagcgugaacgccggcgugaccacccccgugagcaccuacaugcugaccaacagcgagcugcugagccugaucaacgacaugcccaucaccaacgaccagaagaagcugaugagcaacaacgugcagaucgugagacagcagagcuacagcaucaugugcaucaucaaggaggaggugcuggccuacguggugcagcugccccuguacggcgugaucgacacccccugcuggaagcugcacaccagcccccugugcaccaccaacaccaaggagggcagcaacaucugccugaccagaaccgacagaggcugguacugcgacaacgccggcagcgugagcuucuucccccaggccgagaccugcaaggugcagagcaacagaguguucugcgacaccaugaacagcagaacccugcccagcgaggugaaccugugcaacaucgacaucuucaaccccaaguacgacugcaagaucaugaccagcaagaccgacgugagcagcagcgugaucaccagccugggcgccaucgugagcugcuacggcaagaccaagugcaccgccagcaacaagugcagaggcaucaucaagaccuucagcaacggcugcgacuacgugagcaacaagggcguggacaccgugagcgugggcaacacccuguacuacgugaacaagcaggagggcaagagccuguacgugaagggcgagcccaucaucaacuucuacgacccccugguguuccccagcgacgaguucgacgccagcaucagccaggugaacgagaagaucaaccagagccuggccuucaucagaaagagcgacgagcugcugcacaacgugaacgugggcaagagcaccaccaacaucaugaucaccaccaucaucaucgugaucaucgugauccugcugcugcugaucgccgugggccuguuccuguacugcaaggccagaagcacccccgugacccugagcaaggaccagcugagcggcaucaacaacaucgccuucagcaacugaggacuaguguccaccugucccuccugggcugcuggauugucucguuuuccugccaaauaaacaggaucagcgcuuuacagaucuaaaaaaaaaaaaaaaaaaaaaaaaaaaaaaaaaaaaaaaaaaaaaaaaaaaaaaaaaaaaaaaaugcaucccccccccccccccccccccccccccccccaaaggcucuuuucagagccaccagaauu

SEQ ID NO: 16946 - RNA, 2060 nt, Artificial Sequence
  mRNA product Design b-1 comprising derived and/or modified sequence from HRSV(Memphis-37)__AIY60640.1__F_DSCav1_mut5 (opt5)
gggagacggagacggccugcaggaccugcucucucagcccucagccgaggccuacgccgagccgagugcgcagccgacgaccgggaggagccgcagccuucaacucugagguacugugauccgcgcugcccgccgggccgccccaguccgcugcugcggcaccuccuucccucgcgcccucuucgcucgccagcgccuucccugugagccugcgucaccgcggccgccaagcuuaccauggagcugcccauccucaagaccaacgccauuacaacgauccuggcugccgugacccuuugcuucgcgagcucccagaauauuacagaagaguuuuaccaaucuaccuguagcgcugucuccaaaggcuaucugucugcccucagaacagggugguacaccagcguuaucacaauugaacuguccaacaucaaggagaauaaaugcaacggaaccgacgccaaggugaaacuuaucaagcaggaacuggauaaguauaaaaaugcugugacggagcuccagcugcugaugcagucuaccccugccgcuggcagcggguccgccauugcgagcggaaucgccgucuguaaggugcuccaccuggagggcgaaguuaacaaaauuaagaaugcccuucugucuacaaacaaagcuguggucucccucagcgggugcggagugucuguucugaccuucaaggugcuugaccugaagaauuacaucgauaaacaacuccugccgauucugaacaagcaguccuguagcaucucuaauauugagacagucaucgaauuucagcagaaaaacaaucggcuccuggagaucacccgcgaguucuccgugaacgcuggcgugacgacacccgucagcaccuauaugcuuacaaauuccgaacugcucucucugauuaacgacaugccuaucaccaacgaucaaaagaaacuuaugagcaauaacguucagauugugagacagcaguccuacagcaucaugugcauuaucaaggaggaagugcuggccuaugucgugcaacucccccuguacggcguuaucgacaccccuuguuggaaacugcauacaucuccccucugcacgaccaauacaaaggagggguccaacauuugucugacccggacagaucgcggaugguacugcgacaaugcgggcagcgugagcuuuuucccucaggccgaaaccuguaagguccagucuaacagaguguuuugcgauacgaugaacuccagaacacugccgucugagguuaaucucugcaauaucgacauuuucaaccccaaauaugauuguaagaucaugaccagcaaaaccgacguguccagcucugucauuacaucccugggggcuaucgugagcugcuacggaaagaccaaauguacagccucuaauaagugccggggcaucauuaagacguuuuccaacgggugugauuaugucagcaauaaaggaguggacaccguuuccgugggcaacacacuuuacuaugucaauaagcaagagggcaaaucucuguacgugaagggggaaccuaucauuaacuucuaugacccccucguuuuuccuagcgaugaguucgacgcuuccaucucucaggugaacgagaaaauuaaucagagccuggccuuuauccgcaaguccgaugaacugcuccacaacgucaaugugggaaagagcaccacaaacauuaugaucaccacgaucauuaucgugauuaucguuauucugcuucugcucaucgccgucggccuguuccuguacugcaaagcuagaucuacccccgugacacuuuccaaggaccagcucagcgggaucaauaacauugcguucucuaauugaggacuaguguccaccugucccuccugggcugcuggauugucucguuuuccugccaaauaaacaggaucagcgcuuuacagaucuaaaaaaaaaaaaaaaaaaaaaaaaaaaaaaaaaaaaaaaaaaaaaaaaaaaaaaaaaaaaaaaaugcaucccccccccccccccccccccccccccccccaaaggcucuuuucagagccaccagaauu

SEQ ID NO: 16947 - RNA, 2060 nt, Artificial Sequence
  mRNA product Design b-1 comprising derived and/or modified sequence from HRSV(Memphis-37)__AIY60640.1__F_DSCav1_mut5 (opt6)
gggagacggagacggccugcaggaccugcucucucagcccucagccgaggccuacgccgagccgagugcgcagccgacgaccgggaggagccgcagccuucaacucugagguacugugauccgcgcugcccgccgggccgccccaguccgcugcugcggcaccuccuucccucgcgcccucuucgcucgccagcgccuucccugugagccugcgucaccgcggccgccaagcuuaccauggaacucccaaucuuaaaaacaaacgcaauaacuacaauacucgcagcaguaacacuaugcuucgcaucaucacaaaacauaaccgaagaauuuuaccaaaguacaugcucagcaguaucaaaagguuaccucucagcccuaagaaccggaugguacacaucaguaaucacuauagaacuauccaauauaaaagaaaacaaaugcaacggcacugacgcaaaaguuaaauuaauuaaacaagaacucgauaaauauaaaaaugcaguaacagaacuacaacuacuaaugcaaagcaccccagcugcaggaagcggaucagcaaucgcaucaggaauagcaguauguaaaguacuacaccuagaaggagaagucaacaaaaucaaaaaugcacuacuaaguacaaacaaagcuguaguaagccuaucagguugcggaguaucaguauuaacauuuaaaguccucgaccuaaaaaauuacauagauaaacaacucuuaccaauacucaauaaacaaaguugcagcaucagcaacauagaaacagucaucgaauuucaacaaaaaaauaauagacuccuagaaauaacacgugaauuuucaguaaaugcuggaguaacaacaccaguaucuacauauaugcuaacaaauagcgaacuacucucacuuauuaacgauaugcccauaacaaacgaccaaaaaaaacuuaugucaaacaauguucaaauaguuagacaacaauccuacagcauaaugugcauaaucaaagaagaaguucuagcuuacguaguacaacuaccacucuaugguguuaucgacacccccuguuggaaacuucacacaucaccacuaugcacaacaaacacaaaagaaggaucaaauauuugcuuaacaagaacagauagaggaugguauugcgauaaugccggaucaguaucauuuuuuccacaagcagaaacauguaaaguacaauccaaccgaguauuuugcgacaccaugaacuccagaacacuaccaucugaagucaaccuauguaauauagauauauuuaacccaaaauaugacuguaaaaucaugacaucaaaaacugauguaaguucuaguguaauaaccagcuuaggcgccauaguaagcuguuacgguaaaacaaaaugcacagcaagcaacaaaugccgcgguauaauaaaaacauucucaaacggaugcgauuauguaaguaacaaaggaguagauacagucuccguaggcaacacauuauacuacguaaacaaacaagaaggaaaaucacuauauguaaaaggagaaccaaucauaaauuucuacgacccacuuguauuccccagcgacgaauuugaugcuuccauuucacaagucaacgaaaaaauaaaccaaucauuagccuucauaagaaaaucagacgaauuauuacauaauguuaaugucggcaaauccacaacuaauauaaugauaacaacaaucauaauaguaauaaucguuauacuacuauuacucauagcaguaggacucuucuuauauuguaaagccagauccaccccaguaacacucucaaaagaccaauuaucaggaauuaauaacaucgcauuuucaaacuaaggacuaguguccaccugucccuccugggcugcuggauugucucguuuuccugccaaauaaacaggaucagcgcuuuacagaucuaaaaaaaaaaaaaaaaaaaaaaaaaaaaaaaaaaaaaaaaaaaaaaaaaaaaaaaaaaaaaaaaugcaucccccccccccccccccccccccccccccccaaaggcucuuuucagagccaccagaauu

SEQ ID NO: 16948 - RNA, 2060 nt, Artificial Sequence
  mRNA product Design b-1 comprising derived and/or modified sequence from HRSV(Memphis-37)__AIY60640.1__F_DSCav1_mut5 (opt11)
gggagacggagacggccugcaggaccugcucucucagcccucagccgaggccuacgccgagccgagugcgcagccgacgaccgggaggagccgcagccuucaacucugagguacugugauccgcgcugcccgccgggccgccccaguccgcugcugcggcaccuccuucccucgcgcccucuucgcucgccagcgccuucccugugagccugcgucaccgcggccgccaagcuuaccauggaacuccccauccuuaaaaccaacgcaaucaccacaauacucgccgccgucacccucugcuuugcguccucccagaacaucaccgaagaguucuaccaaucgaccugcagcgccgucagcaagggcuaccucucagcccuccgaacaggcugguacacauccgucaucaccaucgaacucucaaacauaaaagaaaacaaguguaacggcaccgacgcgaaaguuaaacucaucaaacaagaacucgauaaauacaaaaacgcaguaaccgaacuacaacuccuaaugcaauccacacccgcagccggcagcggcuccgcaaucgccuccggcauagcagucugcaaaguccuccaccucgaaggagaagucaauaaaaucaaaaacgcccuccuauccaccaacaaagcgguugucucccuguccggaugcggaguuagcguccuaaccuucaaggugcucgaccucaaaaacuacauagacaaacaacuacuccccauacucaacaaacaaucaugcuccaucagcaacaucgagaccgucaucgaguuccaacagaaaaacaaccgccuccucgaaaucacacgagaguucuccguaaacgccggcgucacaacccccguuuccacuuacaugcucacaaacagcgaacuccucucccucaucaacgacaugccaaucaccaacgaccaaaagaaacucauguccaacaacguccaaaucguccgccaacaaagcuacagcauaaugugcaucauaaaagaagaaguacucgcguacguaguccaacuaccccuauacggcgucaucgacacccccugcuggaaacugcacacuucuccccucuguacaaccaacacuaaagaaggcucgaacaucugccucaccagaacagaccgaggaugguacugcgacaacgccggcuccgucagcuucuucccccaggccgaaacaugcaaaguacaaucaaaccgagucuucugcgacacaaugaacagcagaacucuacccuccgaaguuaaccuaugcaacaucgacaucuucaaccccaaauacgacugcaaaauaaugaccucaaaaacagacguguccagcuccguuaucaccucucucggagccaucguauccuguuauggaaaaaccaaaugcaccgccucaaacaaaugccgaggcauaaucaaaacauucucaaauggaugcgacuacguauccaacaaaggagucgacaccgucagcgugggcaauacccucuacuacgucaacaaacaggaagggaaaucccucuauguaaagggcgagcccauuauuaacuucuaugacccccucguguucccaagcgacgaguucgacgccuccauaucacaagucaaugagaaaaucaaccaaucacuagcuuucauucgcaaauccgacgaacuccuucacaacgucaacgucggcaaauccaccaccaacaucaugaucaccaccauaauuaucgucauuaucgucauacuacuccuacucaucgccgucggccucuuccucuauugcaaagcacgcucgacacccgucacccuuucaaaagaccaacuuuccggcauaaacaacauagccuucagcaacuagggacuaguguccaccugucccuccugggcugcuggauugucucguuuuccugccaaauaaacaggaucagcgcuuuacagaucuaaaaaaaaaaaaaaaaaaaaaaaaaaaaaaaaaaaaaaaaaaaaaaaaaaaaaaaaaaaaaaaaugcaucccccccccccccccccccccccccccccccaaaggcucuuuucagagccaccagaauu

SEQ ID NO: 16949 - RNA, 1880 nt, Artificial Sequence
  mRNA product Design b-2 comprising derived and/or modified sequence from HRSV(Memphis-37)__AIY60640.1__F_DSCav1_mut5 (opt1)
gggagagccucugcuggaguccggggaguggcguuggcugcuagagcgaagcuuaccauggagcugcccauccucaagaccaacgccaucaccacgauccuggccgcggugacccugugcuucgccagcucccagaacaucaccgaggaguucuaccagagcacgugcuccgccgucagcaagggcuaccucuccgcccugcgcaccgggugguacaccagcgugaucaccaucgagcuguccaacaucaaggagaacaagugcaacggcaccgacgccaaggugaagcucaucaagcaggagcuggacaaguacaagaacgcggucacggagcugcagcuccugaugcagagcaccccggccgccggcuccgggagcgcgaucgccuccggcaucgccgucugcaaggugcugcaccucgagggcgaggugaacaagaucaagaacgcccugcuguccaccaacaaggccgucgugagccucuccggcugcggggugagcguccugaccuucaaggugcuggaccucaagaacuacaucgacaagcagcugcugcccauccugaacaagcagagcugcuccaucagcaacaucgagaccgucaucgaguuccagcagaagaacaaccgccuccuggagaucacgcgggaguucagcgugaacgcgggcgugaccacccccgucuccaccuacaugcugacgaacagcgagcuccugucccugaucaacgacaugccgaucaccaacgaccagaagaagcucaugagcaacaacgugcagaucgugcgccagcaguccuacagcaucaugugcaucaucaaggaggagguccuggccuacguggugcagcugccccucuacggggucaucgacacccccugcuggaagcugcacaccagcccccugugcacgaccaacaccaaggagggcuccaacaucugccucacccggacggaccgcgggugguacugcgacaacgccggcagcguguccuucuucccgcaggccgagaccugcaagguccagagcaaccggguguucugcgacaccaugaacucccggacccugcccagcgaggugaaccucugcaacaucgacaucuucaaccccaaguacgacugcaagaucaugacguccaagaccgacgucagcuccagcgugaucaccucccugggcgccaucgugagcugcuacgggaagaccaagugcacggcgagcaacaagugccgcggcaucaucaagaccuucuccaacgggugcgacuacgucagcaacaagggcguggacaccguguccgucggcaacacccuguacuacgugaacaagcaggagggcaagagccucuacgugaagggggagcccaucaucaacuucuacgacccgcuggucuuccccuccgacgaguucgacgccagcaucucccaggugaacgagaagaucaaccagagccuggccuucauccggaaguccgacgagcuccugcacaacgugaacgucggcaagagcaccacgaacaucaugaucaccaccaucaucaucgugaucaucgugauccugcugcuccugaucgccgucgggcuguuccucuacugcaaggcccgcuccacccccgugacgcugagcaaggaccagcuguccgggaucaacaacaucgcguucagcaacugaggacuaguguccaccugucccuccugggcugcuggauugucucguuuuccugccaaauaaacaggaucagcgcuuuacagaucuaaaaaaaaaaaaaaaaaaaaaaaaaaaaaaaaaaaaaaaaaaaaaaaaaaaaaaaaaaaaaaaaugcaucccccccccccccccccccccccccccccccaaaggcucuuuucagagccaccagaauu

SEQ ID NO: 16950 - RNA, 1880 nt, Artificial Sequence
  mRNA product Design b-2 comprising derived and/or modified sequence from HRSV(Memphis-37)__AIY60640.1__F_DSCav1_mut5 (opt1)
gggagagccucugcuggaguccggggaguggcguuggcugcuagagcgaagcuuaccauggagcugcccauccucaagaccaacgccaucaccacgauccuggccgcggugacccugugcuucgccagcucccagaacaucaccgaggaguucuaccagagcacgugcuccgccgucagcaagggcuaccucuccgcccugcgcaccgggugguacaccagcgugaucaccaucgagcuguccaacaucaaggagaacaagugcaacggcaccgacgccaaggugaagcucaucaagcaggagcuggacaaguacaagaacgcggucacggagcugcagcuccugaugcagagcaccccggccgccggguccggcagcgccaucgcguccgggaucgccgugugcaaggugcugcaccucgagggcgaggucaacaagaucaagaacgcccugcugagcaccaacaaggccguggugucccucagcggcugcggggucuccgugcugaccuucaaggugcuggaccucaagaacuacaucgacaagcagcugcugcccauccucaacaagcagagcugcuccaucagcaacaucgagacggucaucgaguuccagcagaagaacaaccggcugcuggagaucacccgcgaguucuccgugaacgccggcgugaccacccccgucagcacguacaugcucaccaacagcgagcugcugucccucaucaacgacaugcccaucaccaacgaccagaagaagcugaugagcaacaacgugcagaucgugcggcagcaguccuacagcaucaugugcaucaucaaggaggagguccuggcguacguggugcagcucccgcuguacggggucaucgacacccccugcuggaagcugcacacgagcccccucugcaccaccaacaccaaggagggcuccaacaucugccugacgcgcaccgaccgggggugguacugcgacaacgccggcuccgugagcuucuucccccaggccgagaccugcaaggugcaguccaaccgcgucuucugcgacaccaugaacagccggacgcucccguccgaggugaaccugugcaacaucgacaucuucaaccccaaguacgacugcaagaucaugaccagcaagaccgacgucuccagcuccgugaucaccagccugggcgccaucguguccugcuacgggaagacgaagugcaccgccagcaacaagugccggggcaucaucaagaccuucuccaacgggugcgacuacgucagcaacaagggcguggacaccgugagcgucggcaacacgcucuacuacgugaacaagcaggaggggaagucccuguacgugaagggcgagcccaucaucaacuucuacgacccccuggucuucccgagcgacgaguucgacgcguccaucagccaggugaacgagaagaucaaccagucccucgccuucauccgcaagagcgacgagcugcugcacaacgugaacgucgggaaguccaccaccaacaucaugaucaccaccaucaucaucgugaucaucgugauccuccugcugcucaucgccgucggccuguuccuguacugcaaggcccggagcacgcccgugacccuguccaaggaccagcucagcgggaucaacaacaucgccuucuccaacugaggacuaguguccaccugucccuccugggcugcuggauugucucguuuuccugccaaauaaacaggaucagcgcuuuacagaucuaaaaaaaaaaaaaaaaaaaaaaaaaaaaaaaaaaaaaaaaaaaaaaaaaaaaaaaaaaaaaaaaugcaucccccccccccccccccccccccccccccccaaaggcucuuuucagagccaccagaauu

SEQ ID NO: 16951 - RNA, 1880 nt, Artificial Sequence
  mRNA product Design b-2 comprising derived and/or modified sequence from HRSV(Memphis-37)__AIY60640.1__F_DSCav1_mut5 (opt2)
gggagagccucugcuggaguccggggaguggcguuggcugcuagagcgaagcuuaccauggagcuccccauccucaagaccaacgccaucaccaccauccucgccgccgucacccucugcuucgccuccucccagaacaucaccgaggaguucuaccaguccaccugcuccgccgucuccaagggcuaccucuccgcccuccgcaccggcugguacaccuccgucaucaccaucgagcucuccaacaucaaggagaacaagugcaacggcaccgacgccaaggucaagcucaucaagcaggagcucgacaaguacaagaacgccgucaccgagcuccagcuccucaugcaguccacccccgccgccggcuccggcuccgccaucgccuccggcaucgccgucugcaagguccuccaccucgagggcgaggucaacaagaucaagaacgcccuccucuccaccaacaaggccgucgucucccucuccggcugcggcgucuccguccucaccuucaagguccucgaccucaagaacuacaucgacaagcagcuccuccccauccucaacaagcaguccugcuccaucuccaacaucgagaccgucaucgaguuccagcagaagaacaaccgccuccucgagaucacccgcgaguucuccgucaacgccggcgucaccacccccgucuccaccuacaugcucaccaacuccgagcuccucucccucaucaacgacaugcccaucaccaacgaccagaagaagcucauguccaacaacguccagaucguccgccagcaguccuacuccaucaugugcaucaucaaggaggagguccucgccuacgucguccagcucccccucuacggcgucaucgacacccccugcuggaagcuccacaccuccccccucugcaccaccaacaccaaggagggcuccaacaucugccucacccgcaccgaccgcggcugguacugcgacaacgccggcuccgucuccuucuucccccaggccgagaccugcaagguccaguccaaccgcgucuucugcgacaccaugaacucccgcacccuccccuccgaggucaaccucugcaacaucgacaucuucaaccccaaguacgacugcaagaucaugaccuccaagaccgacgucuccuccuccgucaucaccucccucggcgccaucgucuccugcuacggcaagaccaagugcaccgccuccaacaagugccgcggcaucaucaagaccuucuccaacggcugcgacuacgucuccaacaagggcgucgacaccgucuccgucggcaacacccucuacuacgucaacaagcaggagggcaagucccucuacgucaagggcgagcccaucaucaacuucuacgacccccucgucuuccccuccgacgaguucgacgccuccaucucccaggucaacgagaagaucaaccagucccucgccuucauccgcaaguccgacgagcuccuccacaacgucaacgucggcaaguccaccaccaacaucaugaucaccaccaucaucaucgucaucaucgucauccuccuccuccucaucgccgucggccucuuccucuacugcaaggcccgcuccacccccgucacccucuccaaggaccagcucuccggcaucaacaacaucgccuucuccaacugaggacuaguguccaccugucccuccugggcugcuggauugucucguuuuccugccaaauaaacaggaucagcgcuuuacagaucuaaaaaaaaaaaaaaaaaaaaaaaaaaaaaaaaaaaaaaaaaaaaaaaaaaaaaaaaaaaaaaaaugcaucccccccccccccccccccccccccccccccaaaggcucuuuucagagccaccagaauu

SEQ ID NO: 16952 - RNA, 1880 nt, Artificial Sequence
  mRNA product Design b-2 comprising derived and/or modified sequence from HRSV(Memphis-37)__AIY60640.1__F_DSCav1_mut5 (opt3)
gggagagccucugcuggaguccggggaguggcguuggcugcuagagcgaagcuuaccauggagcugcccauccucaagaccaacgccauuacaacuauacuugcugcagugacgcugugcuucgccagcucccagaauaucaccgaagaguuuuaccaaucuacauguucagcggucaguaaaggcuauuugagcgcuuuaagaacugggugguacaccuccguuauuacaaucgaacugucuaacauuaaggagaauaaaugcaacggaaccgacgccaaggugaaacuaaucaagcaggaacucgauaaguauaaaaaugcaguaacugagcugcagcuucugaugcagucgaccccugccgcugguucaggcagcgcaauagccagugggaucgcuguguguaaggucuugcaccucgagggagaagugaacaaaauuaagaaugcccugcuguccacaaacaaagcgguugugucucucagcggcugcggugucuccguguuaacguucaagguacuggaccuuaagaauuacaucgauaaacaauugcugccaauucuaaacaagcagucauguaguaucagcaauauagagacuguuauugaauuucagcagaaaaacaauaggcuccuggagaucacccgggaguucucugugaacgcaggggucacaacuccgguguccaccuauaugcuuacaaauucagaacuguugagccucauuaacgacaugcccaucaccaacgaucaaaagaaacugaugaguaauaacgugcagaucguccgccagcagucuuacuccauuaugugcauaaucaaggaggaaguuuuagccuaugugguacaacugccucucuacggagugauugacacgccauguuggaaacuucauacuagcccccugugcacaaccaauacuaaggagggcucgaacaucuguuugacacgaaccgaucguggcugguacugcgacaaugcugggucugucuccuuuuucccucaggccgaaacguguaaggugcagucaaacagaguguuuugcgauaccaugaauaguagaacacugccaagcgaggugaaccucugcaauauagacauuuucaaccccaaauaugauuguaagaucaugacuuccaaaaccgacgucucuagcucagugaucacaagucugggagcaauuguauccugcuacgguaagacuaaauguaccgcuagcaauaagugcaggggcaucauuaagacauuuucuaacgggugugauuauguuucaaauaaaggaguggacaccgucagugugggcaacacucuuuacuaugucaauaagcaagaggguaaaagccuguacgugaagggggaaccuauaaucaacuucuaugacccauugguuuuuccguccgaugaguucgacgccucuauuucgcagguuaacgagaaaaucaaucagagccucgcguuuauccggaaguccgaugaacuguuacacaacguaaaugucggaaagucaacgacaaacauuaugauaaccacuaucauuaucgugauuaucguuauacugcuacuccugaucgccgugggccuuuucuuguacugcaaagcacgcaguacccccgucacacugucuaaggaccagcucagcggcauuaauaacaucgcuuucuccaauugaggacuaguguccaccugucccuccugggcugcuggauugucucguuuuccugccaaauaaacaggaucagcgcuuuacagaucuaaaaaaaaaaaaaaaaaaaaaaaaaaaaaaaaaaaaaaaaaaaaaaaaaaaaaaaaaaaaaaaaugcaucccccccccccccccccccccccccccccccaaaggcucuuuucagagccaccagaauu

SEQ ID NO: 16953 - RNA, 1880 nt, Artificial Sequence
  mRNA product Design b-2 comprising derived and/or modified sequence from HRSV(Memphis-37)__AIY60640.1__F_DSCav1_mut5 (opt4)
gggagagccucugcuggaguccggggaguggcguuggcugcuagagcgaagcuuaccauggagcugcccauccugaagaccaacgccaucaccaccauccuggccgccgugacccugugcuucgccagcagccagaacaucaccgaggaguucuaccagagcaccugcagcgccgugagcaagggcuaccugagcgcccugagaaccggcugguacaccagcgugaucaccaucgagcugagcaacaucaaggagaacaagugcaacggcaccgacgccaaggugaagcugaucaagcaggagcuggacaaguacaagaacgccgugaccgagcugcagcugcugaugcagagcacccccgccgccggcagcggcagcgccaucgccagcggcaucgccgugugcaaggugcugcaccuggagggcgaggugaacaagaucaagaacgcccugcugagcaccaacaaggccguggugagccugagcggcugcggcgugagcgugcugaccuucaaggugcuggaccugaagaacuacaucgacaagcagcugcugcccauccugaacaagcagagcugcagcaucagcaacaucgagaccgugaucgaguuccagcagaagaacaacagacugcuggagaucaccagagaguucagcgugaacgccggcgugaccacccccgugagcaccuacaugcugaccaacagcgagcugcugagccugaucaacgacaugcccaucaccaacgaccagaagaagcugaugagcaacaacgugcagaucgugagacagcagagcuacagcaucaugugcaucaucaaggaggaggugcuggccuacguggugcagcugccccuguacggcgugaucgacacccccugcuggaagcugcacaccagcccccugugcaccaccaacaccaaggagggcagcaacaucugccugaccagaaccgacagaggcugguacugcgacaacgccggcagcgugagcuucuucccccaggccgagaccugcaaggugcagagcaacagaguguucugcgacaccaugaacagcagaacccugcccagcgaggugaaccugugcaacaucgacaucuucaaccccaaguacgacugcaagaucaugaccagcaagaccgacgugagcagcagcgugaucaccagccugggcgccaucgugagcugcuacggcaagaccaagugcaccgccagcaacaagugcagaggcaucaucaagaccuucagcaacggcugcgacuacgugagcaacaagggcguggacaccgugagcgugggcaacacccuguacuacgugaacaagcaggagggcaagagccuguacgugaagggcgagcccaucaucaacuucuacgacccccugguguuccccagcgacgaguucgacgccagcaucagccaggugaacgagaagaucaaccagagccuggccuucaucagaaagagcgacgagcugcugcacaacgugaacgugggcaagagcaccaccaacaucaugaucaccaccaucaucaucgugaucaucgugauccugcugcugcugaucgccgugggccuguuccuguacugcaaggccagaagcacccccgugacccugagcaaggaccagcugagcggcaucaacaacaucgccuucagcaacugaggacuaguguccaccugucccuccugggcugcuggauugucucguuuuccugccaaauaaacaggaucagcgcuuuacagaucuaaaaaaaaaaaaaaaaaaaaaaaaaaaaaaaaaaaaaaaaaaaaaaaaaaaaaaaaaaaaaaaaugcaucccccccccccccccccccccccccccccccaaaggcucuuuucagagccaccagaauu

SEQ ID NO: 16954 - RNA, 1880 nt, Artificial Sequence
  mRNA product Design b-2 comprising derived and/or modified sequence from HRSV(Memphis-37)__AIY60640.1__F_DSCav1_mut5 (opt5)
gggagagccucugcuggaguccggggaguggcguuggcugcuagagcgaagcuuaccauggagcugcccauccucaagaccaacgccauuacaacgauccuggcugccgugacccuuugcuucgcgagcucccagaauauuacagaagaguuuuaccaaucuaccuguagcgcugucuccaaaggcuaucugucugcccucagaacagggugguacaccagcguuaucacaauugaacuguccaacaucaaggagaauaaaugcaacggaaccgacgccaaggugaaacuuaucaagcaggaacuggauaaguauaaaaaugcugugacggagcuccagcugcugaugcagucuaccccugccgcuggcagcggguccgccauugcgagcggaaucgccgucuguaaggugcuccaccuggagggcgaaguuaacaaaauuaagaaugcccuucugucuacaaacaaagcuguggucucccucagcgggugcggagugucuguucugaccuucaaggugcuugaccugaagaauuacaucgauaaacaacuccugccgauucugaacaagcaguccuguagcaucucuaauauugagacagucaucgaauuucagcagaaaaacaaucggcuccuggagaucacccgcgaguucuccgugaacgcuggcgugacgacacccgucagcaccuauaugcuuacaaauuccgaacugcucucucugauuaacgacaugccuaucaccaacgaucaaaagaaacuuaugagcaauaacguucagauugugagacagcaguccuacagcaucaugugcauuaucaaggaggaagugcuggccuaugucgugcaacucccccuguacggcguuaucgacaccccuuguuggaaacugcauacaucuccccucugcacgaccaauacaaaggagggguccaacauuugucugacccggacagaucgcggaugguacugcgacaaugcgggcagcgugagcuuuuucccucaggccgaaaccuguaagguccagucuaacagaguguuuugcgauacgaugaacuccagaacacugccgucugagguuaaucucugcaauaucgacauuuucaaccccaaauaugauuguaagaucaugaccagcaaaaccgacguguccagcucugucauuacaucccugggggcuaucgugagcugcuacggaaagaccaaauguacagccucuaauaagugccggggcaucauuaagacguuuuccaacgggugugauuaugucagcaauaaaggaguggacaccguuuccgugggcaacacacuuuacuaugucaauaagcaagagggcaaaucucuguacgugaagggggaaccuaucauuaacuucuaugacccccucguuuuuccuagcgaugaguucgacgcuuccaucucucaggugaacgagaaaauuaaucagagccuggccuuuauccgcaaguccgaugaacugcuccacaacgucaaugugggaaagagcaccacaaacauuaugaucaccacgaucauuaucgugauuaucguuauucugcuucugcucaucgccgucggccuguuccuguacugcaaagcuagaucuacccccgugacacuuuccaaggaccagcucagcgggaucaauaacauugcguucucuaauugaggacuaguguccaccugucccuccugggcugcuggauugucucguuuuccugccaaauaaacaggaucagcgcuuuacagaucuaaaaaaaaaaaaaaaaaaaaaaaaaaaaaaaaaaaaaaaaaaaaaaaaaaaaaaaaaaaaaaaaugcaucccccccccccccccccccccccccccccccaaaggcucuuuucagagccaccagaauu

SEQ ID NO: 16955 - RNA, 1880 nt, Artificial Sequence
  mRNA product Design b-2 comprising derived and/or modified sequence from HRSV(Memphis-37)__AIY60640.1__F_DSCav1_mut5 (opt6)
gggagagccucugcuggaguccggggaguggcguuggcugcuagagcgaagcuuaccauggaacucccaaucuuaaaaacaaacgcaauaacuacaauacucgcagcaguaacacuaugcuucgcaucaucacaaaacauaaccgaagaauuuuaccaaaguacaugcucagcaguaucaaaagguuaccucucagcccuaagaaccggaugguacacaucaguaaucacuauagaacuauccaauauaaaagaaaacaaaugcaacggcacugacgcaaaaguuaaauuaauuaaacaagaacucgauaaauauaaaaaugcaguaacagaacuacaacuacuaaugcaaagcaccccagcugcaggaagcggaucagcaaucgcaucaggaauagcaguauguaaaguacuacaccuagaaggagaagucaacaaaaucaaaaaugcacuacuaaguacaaacaaagcuguaguaagccuaucagguugcggaguaucaguauuaacauuuaaaguccucgaccuaaaaaauuacauagauaaacaacucuuaccaauacucaauaaacaaaguugcagcaucagcaacauagaaacagucaucgaauuucaacaaaaaaauaauagacuccuagaaauaacacgugaauuuucaguaaaugcuggaguaacaacaccaguaucuacauauaugcuaacaaauagcgaacuacucucacuuauuaacgauaugcccauaacaaacgaccaaaaaaaacuuaugucaaacaauguucaaauaguuagacaacaauccuacagcauaaugugcauaaucaaagaagaaguucuagcuuacguaguacaacuaccacucuaugguguuaucgacacccccuguuggaaacuucacacaucaccacuaugcacaacaaacacaaaagaaggaucaaauauuugcuuaacaagaacagauagaggaugguauugcgauaaugccggaucaguaucauuuuuuccacaagcagaaacauguaaaguacaauccaaccgaguauuuugcgacaccaugaacuccagaacacuaccaucugaagucaaccuauguaauauagauauauuuaacccaaaauaugacuguaaaaucaugacaucaaaaacugauguaaguucuaguguaauaaccagcuuaggcgccauaguaagcuguuacgguaaaacaaaaugcacagcaagcaacaaaugccgcgguauaauaaaaacauucucaaacggaugcgauuauguaaguaacaaaggaguagauacagucuccguaggcaacacauuauacuacguaaacaaacaagaaggaaaaucacuauauguaaaaggagaaccaaucauaaauuucuacgacccacuuguauuccccagcgacgaauuugaugcuuccauuucacaagucaacgaaaaaauaaaccaaucauuagccuucauaagaaaaucagacgaauuauuacauaauguuaaugucggcaaauccacaacuaauauaaugauaacaacaaucauaauaguaauaaucguuauacuacuauuacucauagcaguaggacucuucuuauauuguaaagccagauccaccccaguaacacucucaaaagaccaauuaucaggaauuaauaacaucgcauuuucaaacuaaggacuaguguccaccugucccuccugggcugcuggauugucucguuuuccugccaaauaaacaggaucagcgcuuuacagaucuaaaaaaaaaaaaaaaaaaaaaaaaaaaaaaaaaaaaaaaaaaaaaaaaaaaaaaaaaaaaaaaaugcaucccccccccccccccccccccccccccccccaaaggcucuuuucagagccaccagaauu

SEQ ID NO: 16956 - RNA, 1880 nt, Artificial Sequence
  mRNA product Design b-2 comprising derived and/or modified sequence from HRSV(Memphis-37)__AIY60640.1__F_DSCav1_mut5 (opt11)
gggagagccucugcuggaguccggggaguggcguuggcugcuagagcgaagcuuaccauggaacuccccauccuuaaaaccaacgcaaucaccacaauacucgccgccgucacccucugcuuugcguccucccagaacaucaccgaagaguucuaccaaucgaccugcagcgccgucagcaagggcuaccucucagcccuccgaacaggcugguacacauccgucaucaccaucgaacucucaaacauaaaagaaaacaaguguaacggcaccgacgcgaaaguuaaacucaucaaacaagaacucgauaaauacaaaaacgcaguaaccgaacuacaacuccuaaugcaauccacacccgcagccggcagcggcuccgcaaucgccuccggcauagcagucugcaaaguccuccaccucgaaggagaagucaauaaaaucaaaaacgcccuccuauccaccaacaaagcgguugucucccuguccggaugcggaguuagcguccuaaccuucaaggugcucgaccucaaaaacuacauagacaaacaacuacuccccauacucaacaaacaaucaugcuccaucagcaacaucgagaccgucaucgaguuccaacagaaaaacaaccgccuccucgaaaucacacgagaguucuccguaaacgccggcgucacaacccccguuuccacuuacaugcucacaaacagcgaacuccucucccucaucaacgacaugccaaucaccaacgaccaaaagaaacucauguccaacaacguccaaaucguccgccaacaaagcuacagcauaaugugcaucauaaaagaagaaguacucgcguacguaguccaacuaccccuauacggcgucaucgacacccccugcuggaaacugcacacuucuccccucuguacaaccaacacuaaagaaggcucgaacaucugccucaccagaacagaccgaggaugguacugcgacaacgccggcuccgucagcuucuucccccaggccgaaacaugcaaaguacaaucaaaccgagucuucugcgacacaaugaacagcagaacucuacccuccgaaguuaaccuaugcaacaucgacaucuucaaccccaaauacgacugcaaaauaaugaccucaaaaacagacguguccagcuccguuaucaccucucucggagccaucguauccuguuauggaaaaaccaaaugcaccgccucaaacaaaugccgaggcauaaucaaaacauucucaaauggaugcgacuacguauccaacaaaggagucgacaccgucagcgugggcaauacccucuacuacgucaacaaacaggaagggaaaucccucuauguaaagggcgagcccauuauuaacuucuaugacccccucguguucccaagcgacgaguucgacgccuccauaucacaagucaaugagaaaaucaaccaaucacuagcuuucauucgcaaauccgacgaacuccuucacaacgucaacgucggcaaauccaccaccaacaucaugaucaccaccauaauuaucgucauuaucgucauacuacuccuacucaucgccgucggccucuuccucuauugcaaagcacgcucgacacccgucacccuuucaaaagaccaacuuuccggcauaaacaacauagccuucagcaacuagggacuaguguccaccugucccuccugggcugcuggauugucucguuuuccugccaaauaaacaggaucagcgcuuuacagaucuaaaaaaaaaaaaaaaaaaaaaaaaaaaaaaaaaaaaaaaaaaaaaaaaaaaaaaaaaaaaaaaaugcaucccccccccccccccccccccccccccccccaaaggcucuuuucagagccaccagaauu

SEQ ID NO: 16957 - RNA, 1900 nt, Artificial Sequence
  mRNA product Design b-3 comprising derived and/or modified sequence from HRSV(Memphis-37)__AIY60640.1__F_DSCav1_mut5 (opt1)
gggagagucccgcagucggcguccagcggcucugcuuguucgugugugugucguugcaggccuuauucaagcuuaccauggagcugcccauccucaagaccaacgccaucaccacgauccuggccgcggugacccugugcuucgccagcucccagaacaucaccgaggaguucuaccagagcacgugcuccgccgucagcaagggcuaccucuccgcccugcgcaccgggugguacaccagcgugaucaccaucgagcuguccaacaucaaggagaacaagugcaacggcaccgacgccaaggugaagcucaucaagcaggagcuggacaaguacaagaacgcggucacggagcugcagcuccugaugcagagcaccccggccgccggcuccgggagcgcgaucgccuccggcaucgccgucugcaaggugcugcaccucgagggcgaggugaacaagaucaagaacgcccugcuguccaccaacaaggccgucgugagccucuccggcugcggggugagcguccugaccuucaaggugcuggaccucaagaacuacaucgacaagcagcugcugcccauccugaacaagcagagcugcuccaucagcaacaucgagaccgucaucgaguuccagcagaagaacaaccgccuccuggagaucacgcgggaguucagcgugaacgcgggcgugaccacccccgucuccaccuacaugcugacgaacagcgagcuccugucccugaucaacgacaugccgaucaccaacgaccagaagaagcucaugagcaacaacgugcagaucgugcgccagcaguccuacagcaucaugugcaucaucaaggaggagguccuggccuacguggugcagcugccccucuacggggucaucgacacccccugcuggaagcugcacaccagcccccugugcacgaccaacaccaaggagggcuccaacaucugccucacccggacggaccgcgggugguacugcgacaacgccggcagcguguccuucuucccgcaggccgagaccugcaagguccagagcaaccggguguucugcgacaccaugaacucccggacccugcccagcgaggugaaccucugcaacaucgacaucuucaaccccaaguacgacugcaagaucaugacguccaagaccgacgucagcuccagcgugaucaccucccugggcgccaucgugagcugcuacgggaagaccaagugcacggcgagcaacaagugccgcggcaucaucaagaccuucuccaacgggugcgacuacgucagcaacaagggcguggacaccguguccgucggcaacacccuguacuacgugaacaagcaggagggcaagagccucuacgugaagggggagcccaucaucaacuucuacgacccgcuggucuuccccuccgacgaguucgacgccagcaucucccaggugaacgagaagaucaaccagagccuggccuucauccggaaguccgacgagcuccugcacaacgugaacgucggcaagagcaccacgaacaucaugaucaccaccaucaucaucgugaucaucgugauccugcugcuccugaucgccgucgggcuguuccucuacugcaaggcccgcuccacccccgugacgcugagcaaggaccagcuguccgggaucaacaacaucgcguucagcaacugaggacuaguguccaccugucccuccugggcugcuggauugucucguuuuccugccaaauaaacaggaucagcgcuuuacagaucuaaaaaaaaaaaaaaaaaaaaaaaaaaaaaaaaaaaaaaaaaaaaaaaaaaaaaaaaaaaaaaaaugcaucccccccccccccccccccccccccccccccaaaggcucuuuucagagccaccagaauu

SEQ ID NO: 16958 - RNA, 1900 nt, Artificial Sequence
  mRNA product Design b-3 comprising derived and/or modified sequence from HRSV(Memphis-37)__AIY60640.1__F_DSCav1_mut5 (opt1)
gggagagucccgcagucggcguccagcggcucugcuuguucgugugugugucguugcaggccuuauucaagcuuaccauggagcugcccauccucaagaccaacgccaucaccacgauccuggccgcggugacccugugcuucgccagcucccagaacaucaccgaggaguucuaccagagcacgugcuccgccgucagcaagggcuaccucuccgcccugcgcaccgggugguacaccagcgugaucaccaucgagcuguccaacaucaaggagaacaagugcaacggcaccgacgccaaggugaagcucaucaagcaggagcuggacaaguacaagaacgcggucacggagcugcagcuccugaugcagagcaccccggccgccggguccggcagcgccaucgcguccgggaucgccgugugcaaggugcugcaccucgagggcgaggucaacaagaucaagaacgcccugcugagcaccaacaaggccguggugucccucagcggcugcggggucuccgugcugaccuucaaggugcuggaccucaagaacuacaucgacaagcagcugcugcccauccucaacaagcagagcugcuccaucagcaacaucgagacggucaucgaguuccagcagaagaacaaccggcugcuggagaucacccgcgaguucuccgugaacgccggcgugaccacccccgucagcacguacaugcucaccaacagcgagcugcugucccucaucaacgacaugcccaucaccaacgaccagaagaagcugaugagcaacaacgugcagaucgugcggcagcaguccuacagcaucaugugcaucaucaaggaggagguccuggcguacguggugcagcucccgcuguacggggucaucgacacccccugcuggaagcugcacacgagcccccucugcaccaccaacaccaaggagggcuccaacaucugccugacgcgcaccgaccgggggugguacugcgacaacgccggcuccgugagcuucuucccccaggccgagaccugcaaggugcaguccaaccgcgucuucugcgacaccaugaacagccggacgcucccguccgaggugaaccugugcaacaucgacaucuucaaccccaaguacgacugcaagaucaugaccagcaagaccgacgucuccagcuccgugaucaccagccugggcgccaucguguccugcuacgggaagacgaagugcaccgccagcaacaagugccggggcaucaucaagaccuucuccaacgggugcgacuacgucagcaacaagggcguggacaccgugagcgucggcaacacgcucuacuacgugaacaagcaggaggggaagucccuguacgugaagggcgagcccaucaucaacuucuacgacccccuggucuucccgagcgacgaguucgacgcguccaucagccaggugaacgagaagaucaaccagucccucgccuucauccgcaagagcgacgagcugcugcacaacgugaacgucgggaaguccaccaccaacaucaugaucaccaccaucaucaucgugaucaucgugauccuccugcugcucaucgccgucggccuguuccuguacugcaaggcccggagcacgcccgugacccuguccaaggaccagcucagcgggaucaacaacaucgccuucuccaacugaggacuaguguccaccugucccuccugggcugcuggauugucucguuuuccugccaaauaaacaggaucagcgcuuuacagaucuaaaaaaaaaaaaaaaaaaaaaaaaaaaaaaaaaaaaaaaaaaaaaaaaaaaaaaaaaaaaaaaaugcaucccccccccccccccccccccccccccccccaaaggcucuuuucagagccaccagaauu

SEQ ID NO: 16959 - RNA, 1900 nt, Artificial Sequence
  mRNA product Design b-3 comprising derived and/or modified sequence from HRSV(Memphis-37)__AIY60640.1__F_DSCav1_mut5 (opt2)
gggagagucccgcagucggcguccagcggcucugcuuguucgugugugugucguugcaggccuuauucaagcuuaccauggagcuccccauccucaagaccaacgccaucaccaccauccucgccgccgucacccucugcuucgccuccucccagaacaucaccgaggaguucuaccaguccaccugcuccgccgucuccaagggcuaccucuccgcccuccgcaccggcugguacaccuccgucaucaccaucgagcucuccaacaucaaggagaacaagugcaacggcaccgacgccaaggucaagcucaucaagcaggagcucgacaaguacaagaacgccgucaccgagcuccagcuccucaugcaguccacccccgccgccggcuccggcuccgccaucgccuccggcaucgccgucugcaagguccuccaccucgagggcgaggucaacaagaucaagaacgcccuccucuccaccaacaaggccgucgucucccucuccggcugcggcgucuccguccucaccuucaagguccucgaccucaagaacuacaucgacaagcagcuccuccccauccucaacaagcaguccugcuccaucuccaacaucgagaccgucaucgaguuccagcagaagaacaaccgccuccucgagaucacccgcgaguucuccgucaacgccggcgucaccacccccgucuccaccuacaugcucaccaacuccgagcuccucucccucaucaacgacaugcccaucaccaacgaccagaagaagcucauguccaacaacguccagaucguccgccagcaguccuacuccaucaugugcaucaucaaggaggagguccucgccuacgucguccagcucccccucuacggcgucaucgacacccccugcuggaagcuccacaccuccccccucugcaccaccaacaccaaggagggcuccaacaucugccucacccgcaccgaccgcggcugguacugcgacaacgccggcuccgucuccuucuucccccaggccgagaccugcaagguccaguccaaccgcgucuucugcgacaccaugaacucccgcacccuccccuccgaggucaaccucugcaacaucgacaucuucaaccccaaguacgacugcaagaucaugaccuccaagaccgacgucuccuccuccgucaucaccucccucggcgccaucgucuccugcuacggcaagaccaagugcaccgccuccaacaagugccgcggcaucaucaagaccuucuccaacggcugcgacuacgucuccaacaagggcgucgacaccgucuccgucggcaacacccucuacuacgucaacaagcaggagggcaagucccucuacgucaagggcgagcccaucaucaacuucuacgacccccucgucuuccccuccgacgaguucgacgccuccaucucccaggucaacgagaagaucaaccagucccucgccuucauccgcaaguccgacgagcuccuccacaacgucaacgucggcaaguccaccaccaacaucaugaucaccaccaucaucaucgucaucaucgucauccuccuccuccucaucgccgucggccucuuccucuacugcaaggcccgcuccacccccgucacccucuccaaggaccagcucuccggcaucaacaacaucgccuucuccaacugaggacuaguguccaccugucccuccugggcugcuggauugucucguuuuccugccaaauaaacaggaucagcgcuuuacagaucuaaaaaaaaaaaaaaaaaaaaaaaaaaaaaaaaaaaaaaaaaaaaaaaaaaaaaaaaaaaaaaaaugcaucccccccccccccccccccccccccccccccaaaggcucuuuucagagccaccagaauu

SEQ ID NO: 16960 - RNA, 1900 nt, Artificial Sequence
  mRNA product Design b-3 comprising derived and/or modified sequence from HRSV(Memphis-37)__AIY60640.1__F_DSCav1_mut5 (opt3)
gggagagucccgcagucggcguccagcggcucugcuuguucgugugugugucguugcaggccuuauucaagcuuaccauggagcugcccauccucaagaccaacgccauuacaacuauacuugcugcagugacgcugugcuucgccagcucccagaauaucaccgaagaguuuuaccaaucuacauguucagcggucaguaaaggcuauuugagcgcuuuaagaacugggugguacaccuccguuauuacaaucgaacugucuaacauuaaggagaauaaaugcaacggaaccgacgccaaggugaaacuaaucaagcaggaacucgauaaguauaaaaaugcaguaacugagcugcagcuucugaugcagucgaccccugccgcugguucaggcagcgcaauagccagugggaucgcuguguguaaggucuugcaccucgagggagaagugaacaaaauuaagaaugcccugcuguccacaaacaaagcgguugugucucucagcggcugcggugucuccguguuaacguucaagguacuggaccuuaagaauuacaucgauaaacaauugcugccaauucuaaacaagcagucauguaguaucagcaauauagagacuguuauugaauuucagcagaaaaacaauaggcuccuggagaucacccgggaguucucugugaacgcaggggucacaacuccgguguccaccuauaugcuuacaaauucagaacuguugagccucauuaacgacaugcccaucaccaacgaucaaaagaaacugaugaguaauaacgugcagaucguccgccagcagucuuacuccauuaugugcauaaucaaggaggaaguuuuagccuaugugguacaacugccucucuacggagugauugacacgccauguuggaaacuucauacuagcccccugugcacaaccaauacuaaggagggcucgaacaucuguuugacacgaaccgaucguggcugguacugcgacaaugcugggucugucuccuuuuucccucaggccgaaacguguaaggugcagucaaacagaguguuuugcgauaccaugaauaguagaacacugccaagcgaggugaaccucugcaauauagacauuuucaaccccaaauaugauuguaagaucaugacuuccaaaaccgacgucucuagcucagugaucacaagucugggagcaauuguauccugcuacgguaagacuaaauguaccgcuagcaauaagugcaggggcaucauuaagacauuuucuaacgggugugauuauguuucaaauaaaggaguggacaccgucagugugggcaacacucuuuacuaugucaauaagcaagaggguaaaagccuguacgugaagggggaaccuauaaucaacuucuaugacccauugguuuuuccguccgaugaguucgacgccucuauuucgcagguuaacgagaaaaucaaucagagccucgcguuuauccggaaguccgaugaacuguuacacaacguaaaugucggaaagucaacgacaaacauuaugauaaccacuaucauuaucgugauuaucguuauacugcuacuccugaucgccgugggccuuuucuuguacugcaaagcacgcaguacccccgucacacugucuaaggaccagcucagcggcauuaauaacaucgcuuucuccaauugaggacuaguguccaccugucccuccugggcugcuggauugucucguuuuccugccaaauaaacaggaucagcgcuuuacagaucuaaaaaaaaaaaaaaaaaaaaaaaaaaaaaaaaaaaaaaaaaaaaaaaaaaaaaaaaaaaaaaaaugcaucccccccccccccccccccccccccccccccaaaggcucuuuucagagccaccagaauu

SEQ ID NO: 16961 - RNA, 1900 nt, Artificial Sequence
  mRNA product Design b-3 comprising derived and/or modified sequence from HRSV(Memphis-37)__AIY60640.1__F_DSCav1_mut5 (opt4)
gggagagucccgcagucggcguccagcggcucugcuuguucgugugugugucguugcaggccuuauucaagcuuaccauggagcugcccauccugaagaccaacgccaucaccaccauccuggccgccgugacccugugcuucgccagcagccagaacaucaccgaggaguucuaccagagcaccugcagcgccgugagcaagggcuaccugagcgcccugagaaccggcugguacaccagcgugaucaccaucgagcugagcaacaucaaggagaacaagugcaacggcaccgacgccaaggugaagcugaucaagcaggagcuggacaaguacaagaacgccgugaccgagcugcagcugcugaugcagagcacccccgccgccggcagcggcagcgccaucgccagcggcaucgccgugugcaaggugcugcaccuggagggcgaggugaacaagaucaagaacgcccugcugagcaccaacaaggccguggugagccugagcggcugcggcgugagcgugcugaccuucaaggugcuggaccugaagaacuacaucgacaagcagcugcugcccauccugaacaagcagagcugcagcaucagcaacaucgagaccgugaucgaguuccagcagaagaacaacagacugcuggagaucaccagagaguucagcgugaacgccggcgugaccacccccgugagcaccuacaugcugaccaacagcgagcugcugagccugaucaacgacaugcccaucaccaacgaccagaagaagcugaugagcaacaacgugcagaucgugagacagcagagcuacagcaucaugugcaucaucaaggaggaggugcuggccuacguggugcagcugccccuguacggcgugaucgacacccccugcuggaagcugcacaccagcccccugugcaccaccaacaccaaggagggcagcaacaucugccugaccagaaccgacagaggcugguacugcgacaacgccggcagcgugagcuucuucccccaggccgagaccugcaaggugcagagcaacagaguguucugcgacaccaugaacagcagaacccugcccagcgaggugaaccugugcaacaucgacaucuucaaccccaaguacgacugcaagaucaugaccagcaagaccgacgugagcagcagcgugaucaccagccugggcgccaucgugagcugcuacggcaagaccaagugcaccgccagcaacaagugcagaggcaucaucaagaccuucagcaacggcugcgacuacgugagcaacaagggcguggacaccgugagcgugggcaacacccuguacuacgugaacaagcaggagggcaagagccuguacgugaagggcgagcccaucaucaacuucuacgacccccugguguuccccagcgacgaguucgacgccagcaucagccaggugaacgagaagaucaaccagagccuggccuucaucagaaagagcgacgagcugcugcacaacgugaacgugggcaagagcaccaccaacaucaugaucaccaccaucaucaucgugaucaucgugauccugcugcugcugaucgccgugggccuguuccuguacugcaaggccagaagcacccccgugacccugagcaaggaccagcugagcggcaucaacaacaucgccuucagcaacugaggacuaguguccaccugucccuccugggcugcuggauugucucguuuuccugccaaauaaacaggaucagcgcuuuacagaucuaaaaaaaaaaaaaaaaaaaaaaaaaaaaaaaaaaaaaaaaaaaaaaaaaaaaaaaaaaaaaaaaugcaucccccccccccccccccccccccccccccccaaaggcucuuuucagagccaccagaauu

SEQ ID NO: 16962 - RNA, 1900 nt, Artificial Sequence
  mRNA product Design b-3 comprising derived and/or modified sequence from HRSV(Memphis-37)__AIY60640.1__F_DSCav1_mut5 (opt5)
gggagagucccgcagucggcguccagcggcucugcuuguucgugugugugucguugcaggccuuauucaagcuuaccauggagcugcccauccucaagaccaacgccauuacaacgauccuggcugccgugacccuuugcuucgcgagcucccagaauauuacagaagaguuuuaccaaucuaccuguagcgcugucuccaaaggcuaucugucugcccucagaacagggugguacaccagcguuaucacaauugaacuguccaacaucaaggagaauaaaugcaacggaaccgacgccaaggugaaacuuaucaagcaggaacuggauaaguauaaaaaugcugugacggagcuccagcugcugaugcagucuaccccugccgcuggcagcggguccgccauugcgagcggaaucgccgucuguaaggugcuccaccuggagggcgaaguuaacaaaauuaagaaugcccuucugucuacaaacaaagcuguggucucccucagcgggugcggagugucuguucugaccuucaaggugcuugaccugaagaauuacaucgauaaacaacuccugccgauucugaacaagcaguccuguagcaucucuaauauugagacagucaucgaauuucagcagaaaaacaaucggcuccuggagaucacccgcgaguucuccgugaacgcuggcgugacgacacccgucagcaccuauaugcuuacaaauuccgaacugcucucucugauuaacgacaugccuaucaccaacgaucaaaagaaacuuaugagcaauaacguucagauugugagacagcaguccuacagcaucaugugcauuaucaaggaggaagugcuggccuaugucgugcaacucccccuguacggcguuaucgacaccccuuguuggaaacugcauacaucuccccucugcacgaccaauacaaaggagggguccaacauuugucugacccggacagaucgcggaugguacugcgacaaugcgggcagcgugagcuuuuucccucaggccgaaaccuguaagguccagucuaacagaguguuuugcgauacgaugaacuccagaacacugccgucugagguuaaucucugcaauaucgacauuuucaaccccaaauaugauuguaagaucaugaccagcaaaaccgacguguccagcucugucauuacaucccugggggcuaucgugagcugcuacggaaagaccaaauguacagccucuaauaagugccggggcaucauuaagacguuuuccaacgggugugauuaugucagcaauaaaggaguggacaccguuuccgugggcaacacacuuuacuaugucaauaagcaagagggcaaaucucuguacgugaagggggaaccuaucauuaacuucuaugacccccucguuuuuccuagcgaugaguucgacgcuuccaucucucaggugaacgagaaaauuaaucagagccuggccuuuauccgcaaguccgaugaacugcuccacaacgucaaugugggaaagagcaccacaaacauuaugaucaccacgaucauuaucgugauuaucguuauucugcuucugcucaucgccgucggccuguuccuguacugcaaagcuagaucuacccccgugacacuuuccaaggaccagcucagcgggaucaauaacauugcguucucuaauugaggacuaguguccaccugucccuccugggcugcuggauugucucguuuuccugccaaauaaacaggaucagcgcuuuacagaucuaaaaaaaaaaaaaaaaaaaaaaaaaaaaaaaaaaaaaaaaaaaaaaaaaaaaaaaaaaaaaaaaugcaucccccccccccccccccccccccccccccccaaaggcucuuuucagagccaccagaauu

SEQ ID NO: 16963 - RNA, 1900 nt, Artificial Sequence
  mRNA product Design b-3 comprising derived and/or modified sequence from HRSV(Memphis-37)__AIY60640.1__F_DSCav1_mut5 (opt6)
gggagagucccgcagucggcguccagcggcucugcuuguucgugugugugucguugcaggccuuauucaagcuuaccauggaacucccaaucuuaaaaacaaacgcaauaacuacaauacucgcagcaguaacacuaugcuucgcaucaucacaaaacauaaccgaagaauuuuaccaaaguacaugcucagcaguaucaaaagguuaccucucagcccuaagaaccggaugguacacaucaguaaucacuauagaacuauccaauauaaaagaaaacaaaugcaacggcacugacgcaaaaguuaaauuaauuaaacaagaacucgauaaauauaaaaaugcaguaacagaacuacaacuacuaaugcaaagcaccccagcugcaggaagcggaucagcaaucgcaucaggaauagcaguauguaaaguacuacaccuagaaggagaagucaacaaaaucaaaaaugcacuacuaaguacaaacaaagcuguaguaagccuaucagguugcggaguaucaguauuaacauuuaaaguccucgaccuaaaaaauuacauagauaaacaacucuuaccaauacucaauaaacaaaguugcagcaucagcaacauagaaacagucaucgaauuucaacaaaaaaauaauagacuccuagaaauaacacgugaauuuucaguaaaugcuggaguaacaacaccaguaucuacauauaugcuaacaaauagcgaacuacucucacuuauuaacgauaugcccauaacaaacgaccaaaaaaaacuuaugucaaacaauguucaaauaguuagacaacaauccuacagcauaaugugcauaaucaaagaagaaguucuagcuuacguaguacaacuaccacucuaugguguuaucgacacccccuguuggaaacuucacacaucaccacuaugcacaacaaacacaaaagaaggaucaaauauuugcuuaacaagaacagauagaggaugguauugcgauaaugccggaucaguaucauuuuuuccacaagcagaaacauguaaaguacaauccaaccgaguauuuugcgacaccaugaacuccagaacacuaccaucugaagucaaccuauguaauauagauauauuuaacccaaaauaugacuguaaaaucaugacaucaaaaacugauguaaguucuaguguaauaaccagcuuaggcgccauaguaagcuguuacgguaaaacaaaaugcacagcaagcaacaaaugccgcgguauaauaaaaacauucucaaacggaugcgauuauguaaguaacaaaggaguagauacagucuccguaggcaacacauuauacuacguaaacaaacaagaaggaaaaucacuauauguaaaaggagaaccaaucauaaauuucuacgacccacuuguauuccccagcgacgaauuugaugcuuccauuucacaagucaacgaaaaaauaaaccaaucauuagccuucauaagaaaaucagacgaauuauuacauaauguuaaugucggcaaauccacaacuaauauaaugauaacaacaaucauaauaguaauaaucguuauacuacuauuacucauagcaguaggacucuucuuauauuguaaagccagauccaccccaguaacacucucaaaagaccaauuaucaggaauuaauaacaucgcauuuucaaacuaaggacuaguguccaccugucccuccugggcugcuggauugucucguuuuccugccaaauaaacaggaucagcgcuuuacagaucuaaaaaaaaaaaaaaaaaaaaaaaaaaaaaaaaaaaaaaaaaaaaaaaaaaaaaaaaaaaaaaaaugcaucccccccccccccccccccccccccccccccaaaggcucuuuucagagccaccagaauu

SEQ ID NO: 16964 - RNA, 1900 nt, Artificial Sequence
  mRNA product Design b-3 comprising derived and/or modified sequence from HRSV(Memphis-37)__AIY60640.1__F_DSCav1_mut5 (opt11)
gggagagucccgcagucggcguccagcggcucugcuuguucgugugugugucguugcaggccuuauucaagcuuaccauggaacuccccauccuuaaaaccaacgcaaucaccacaauacucgccgccgucacccucugcuuugcguccucccagaacaucaccgaagaguucuaccaaucgaccugcagcgccgucagcaagggcuaccucucagcccuccgaacaggcugguacacauccgucaucaccaucgaacucucaaacauaaaagaaaacaaguguaacggcaccgacgcgaaaguuaaacucaucaaacaagaacucgauaaauacaaaaacgcaguaaccgaacuacaacuccuaaugcaauccacacccgcagccggcagcggcuccgcaaucgccuccggcauagcagucugcaaaguccuccaccucgaaggagaagucaauaaaaucaaaaacgcccuccuauccaccaacaaagcgguugucucccuguccggaugcggaguuagcguccuaaccuucaaggugcucgaccucaaaaacuacauagacaaacaacuacuccccauacucaacaaacaaucaugcuccaucagcaacaucgagaccgucaucgaguuccaacagaaaaacaaccgccuccucgaaaucacacgagaguucuccguaaacgccggcgucacaacccccguuuccacuuacaugcucacaaacagcgaacuccucucccucaucaacgacaugccaaucaccaacgaccaaaagaaacucauguccaacaacguccaaaucguccgccaacaaagcuacagcauaaugugcaucauaaaagaagaaguacucgcguacguaguccaacuaccccuauacggcgucaucgacacccccugcuggaaacugcacacuucuccccucuguacaaccaacacuaaagaaggcucgaacaucugccucaccagaacagaccgaggaugguacugcgacaacgccggcuccgucagcuucuucccccaggccgaaacaugcaaaguacaaucaaaccgagucuucugcgacacaaugaacagcagaacucuacccuccgaaguuaaccuaugcaacaucgacaucuucaaccccaaauacgacugcaaaauaaugaccucaaaaacagacguguccagcuccguuaucaccucucucggagccaucguauccuguuauggaaaaaccaaaugcaccgccucaaacaaaugccgaggcauaaucaaaacauucucaaauggaugcgacuacguauccaacaaaggagucgacaccgucagcgugggcaauacccucuacuacgucaacaaacaggaagggaaaucccucuauguaaagggcgagcccauuauuaacuucuaugacccccucguguucccaagcgacgaguucgacgccuccauaucacaagucaaugagaaaaucaaccaaucacuagcuuucauucgcaaauccgacgaacuccuucacaacgucaacgucggcaaauccaccaccaacaucaugaucaccaccauaauuaucgucauuaucgucauacuacuccuacucaucgccgucggccucuuccucuauugcaaagcacgcucgacacccgucacccuuucaaaagaccaacuuuccggcauaaacaacauagccuucagcaacuagggacuaguguccaccugucccuccugggcugcuggauugucucguuuuccugccaaauaaacaggaucagcgcuuuacagaucuaaaaaaaaaaaaaaaaaaaaaaaaaaaaaaaaaaaaaaaaaaaaaaaaaaaaaaaaaaaaaaaaugcaucccccccccccccccccccccccccccccccaaaggcucuuuucagagccaccagaauu

SEQ ID NO: 16965 - RNA, 1951 nt, Artificial Sequence
  mRNA product Design b-4 comprising derived and/or modified sequence from HRSV(Memphis-37)__AIY60640.1__F_DSCav1_mut5 (opt1)
gggagagucccgcagucggcguccagcggcucugcuuguucgugugugugucguugcaggccuuauucaagcuuaccauggagcugcccauccucaagaccaacgccaucaccacgauccuggccgcggugacccugugcuucgccagcucccagaacaucaccgaggaguucuaccagagcacgugcuccgccgucagcaagggcuaccucuccgcccugcgcaccgggugguacaccagcgugaucaccaucgagcuguccaacaucaaggagaacaagugcaacggcaccgacgccaaggugaagcucaucaagcaggagcuggacaaguacaagaacgcggucacggagcugcagcuccugaugcagagcaccccggccgccggcuccgggagcgcgaucgccuccggcaucgccgucugcaaggugcugcaccucgagggcgaggugaacaagaucaagaacgcccugcuguccaccaacaaggccgucgugagccucuccggcugcggggugagcguccugaccuucaaggugcuggaccucaagaacuacaucgacaagcagcugcugcccauccugaacaagcagagcugcuccaucagcaacaucgagaccgucaucgaguuccagcagaagaacaaccgccuccuggagaucacgcgggaguucagcgugaacgcgggcgugaccacccccgucuccaccuacaugcugacgaacagcgagcuccugucccugaucaacgacaugccgaucaccaacgaccagaagaagcucaugagcaacaacgugcagaucgugcgccagcaguccuacagcaucaugugcaucaucaaggaggagguccuggccuacguggugcagcugccccucuacggggucaucgacacccccugcuggaagcugcacaccagcccccugugcacgaccaacaccaaggagggcuccaacaucugccucacccggacggaccgcgggugguacugcgacaacgccggcagcguguccuucuucccgcaggccgagaccugcaagguccagagcaaccggguguucugcgacaccaugaacucccggacccugcccagcgaggugaaccucugcaacaucgacaucuucaaccccaaguacgacugcaagaucaugacguccaagaccgacgucagcuccagcgugaucaccucccugggcgccaucgugagcugcuacgggaagaccaagugcacggcgagcaacaagugccgcggcaucaucaagaccuucuccaacgggugcgacuacgucagcaacaagggcguggacaccguguccgucggcaacacccuguacuacgugaacaagcaggagggcaagagccucuacgugaagggggagcccaucaucaacuucuacgacccgcuggucuuccccuccgacgaguucgacgccagcaucucccaggugaacgagaagaucaaccagagccuggccuucauccggaaguccgacgagcuccugcacaacgugaacgucggcaagagcaccacgaacaucaugaucaccaccaucaucaucgugaucaucgugauccugcugcuccugaucgccgucgggcuguuccucuacugcaaggcccgcuccacccccgugacgcugagcaaggaccagcuguccgggaucaacaacaucgcguucagcaacugaggacuaguaauaaggaaacuguaugaaugucugugggcaggaagugaagagauccuucuguaaagguuuuuggaauuaugucugcugaauaauaaacuuuuuugaaauaauaaaucugguagaaaaaugagaucuaaaaaaaaaaaaaaaaaaaaaaaaaaaaaaaaaaaaaaaaaaaaaaaaaaaaaaaaaaaaaaaaugcaucccccccccccccccccccccccccccccccaaaggcucuuuucagagccaccagaauu

SEQ ID NO: 16966 - RNA, 1951 nt, Artificial Sequence
  mRNA product Design b-4 comprising derived and/or modified sequence from HRSV(Memphis-37)__AIY60640.1__F_DSCav1_mut5 (opt1)
gggagagucccgcagucggcguccagcggcucugcuuguucgugugugugucguugcaggccuuauucaagcuuaccauggagcugcccauccucaagaccaacgccaucaccacgauccuggccgcggugacccugugcuucgccagcucccagaacaucaccgaggaguucuaccagagcacgugcuccgccgucagcaagggcuaccucuccgcccugcgcaccgggugguacaccagcgugaucaccaucgagcuguccaacaucaaggagaacaagugcaacggcaccgacgccaaggugaagcucaucaagcaggagcuggacaaguacaagaacgcggucacggagcugcagcuccugaugcagagcaccccggccgccggguccggcagcgccaucgcguccgggaucgccgugugcaaggugcugcaccucgagggcgaggucaacaagaucaagaacgcccugcugagcaccaacaaggccguggugucccucagcggcugcggggucuccgugcugaccuucaaggugcuggaccucaagaacuacaucgacaagcagcugcugcccauccucaacaagcagagcugcuccaucagcaacaucgagacggucaucgaguuccagcagaagaacaaccggcugcuggagaucacccgcgaguucuccgugaacgccggcgugaccacccccgucagcacguacaugcucaccaacagcgagcugcugucccucaucaacgacaugcccaucaccaacgaccagaagaagcugaugagcaacaacgugcagaucgugcggcagcaguccuacagcaucaugugcaucaucaaggaggagguccuggcguacguggugcagcucccgcuguacggggucaucgacacccccugcuggaagcugcacacgagcccccucugcaccaccaacaccaaggagggcuccaacaucugccugacgcgcaccgaccgggggugguacugcgacaacgccggcuccgugagcuucuucccccaggccgagaccugcaaggugcaguccaaccgcgucuucugcgacaccaugaacagccggacgcucccguccgaggugaaccugugcaacaucgacaucuucaaccccaaguacgacugcaagaucaugaccagcaagaccgacgucuccagcuccgugaucaccagccugggcgccaucguguccugcuacgggaagacgaagugcaccgccagcaacaagugccggggcaucaucaagaccuucuccaacgggugcgacuacgucagcaacaagggcguggacaccgugagcgucggcaacacgcucuacuacgugaacaagcaggaggggaagucccuguacgugaagggcgagcccaucaucaacuucuacgacccccuggucuucccgagcgacgaguucgacgcguccaucagccaggugaacgagaagaucaaccagucccucgccuucauccgcaagagcgacgagcugcugcacaacgugaacgucgggaaguccaccaccaacaucaugaucaccaccaucaucaucgugaucaucgugauccuccugcugcucaucgccgucggccuguuccuguacugcaaggcccggagcacgcccgugacccuguccaaggaccagcucagcgggaucaacaacaucgccuucuccaacugaggacuaguaauaaggaaacuguaugaaugucugugggcaggaagugaagagauccuucuguaaagguuuuuggaauuaugucugcugaauaauaaacuuuuuugaaauaauaaaucugguagaaaaaugagaucuaaaaaaaaaaaaaaaaaaaaaaaaaaaaaaaaaaaaaaaaaaaaaaaaaaaaaaaaaaaaaaaaugcaucccccccccccccccccccccccccccccccaaaggcucuuuucagagccaccagaauu

SEQ ID NO: 16967 - RNA, 1951 nt, Artificial Sequence
  mRNA product Design b-4 comprising derived and/or modified sequence from HRSV(Memphis-37)__AIY60640.1__F_DSCav1_mut5 (opt2)
gggagagucccgcagucggcguccagcggcucugcuuguucgugugugugucguugcaggccuuauucaagcuuaccauggagcuccccauccucaagaccaacgccaucaccaccauccucgccgccgucacccucugcuucgccuccucccagaacaucaccgaggaguucuaccaguccaccugcuccgccgucuccaagggcuaccucuccgcccuccgcaccggcugguacaccuccgucaucaccaucgagcucuccaacaucaaggagaacaagugcaacggcaccgacgccaaggucaagcucaucaagcaggagcucgacaaguacaagaacgccgucaccgagcuccagcuccucaugcaguccacccccgccgccggcuccggcuccgccaucgccuccggcaucgccgucugcaagguccuccaccucgagggcgaggucaacaagaucaagaacgcccuccucuccaccaacaaggccgucgucucccucuccggcugcggcgucuccguccucaccuucaagguccucgaccucaagaacuacaucgacaagcagcuccuccccauccucaacaagcaguccugcuccaucuccaacaucgagaccgucaucgaguuccagcagaagaacaaccgccuccucgagaucacccgcgaguucuccgucaacgccggcgucaccacccccgucuccaccuacaugcucaccaacuccgagcuccucucccucaucaacgacaugcccaucaccaacgaccagaagaagcucauguccaacaacguccagaucguccgccagcaguccuacuccaucaugugcaucaucaaggaggagguccucgccuacgucguccagcucccccucuacggcgucaucgacacccccugcuggaagcuccacaccuccccccucugcaccaccaacaccaaggagggcuccaacaucugccucacccgcaccgaccgcggcugguacugcgacaacgccggcuccgucuccuucuucccccaggccgagaccugcaagguccaguccaaccgcgucuucugcgacaccaugaacucccgcacccuccccuccgaggucaaccucugcaacaucgacaucuucaaccccaaguacgacugcaagaucaugaccuccaagaccgacgucuccuccuccgucaucaccucccucggcgccaucgucuccugcuacggcaagaccaagugcaccgccuccaacaagugccgcggcaucaucaagaccuucuccaacggcugcgacuacgucuccaacaagggcgucgacaccgucuccgucggcaacacccucuacuacgucaacaagcaggagggcaagucccucuacgucaagggcgagcccaucaucaacuucuacgacccccucgucuuccccuccgacgaguucgacgccuccaucucccaggucaacgagaagaucaaccagucccucgccuucauccgcaaguccgacgagcuccuccacaacgucaacgucggcaaguccaccaccaacaucaugaucaccaccaucaucaucgucaucaucgucauccuccuccuccucaucgccgucggccucuuccucuacugcaaggcccgcuccacccccgucacccucuccaaggaccagcucuccggcaucaacaacaucgccuucuccaacugaggacuaguaauaaggaaacuguaugaaugucugugggcaggaagugaagagauccuucuguaaagguuuuuggaauuaugucugcugaauaauaaacuuuuuugaaauaauaaaucugguagaaaaaugagaucuaaaaaaaaaaaaaaaaaaaaaaaaaaaaaaaaaaaaaaaaaaaaaaaaaaaaaaaaaaaaaaaaugcaucccccccccccccccccccccccccccccccaaaggcucuuuucagagccaccagaauu

SEQ ID NO: 16968 - RNA, 1951 nt, Artificial Sequence
  mRNA product Design b-4 comprising derived and/or modified sequence from HRSV(Memphis-37)__AIY60640.1__F_DSCav1_mut5 (opt3)
gggagagucccgcagucggcguccagcggcucugcuuguucgugugugugucguugcaggccuuauucaagcuuaccauggagcugcccauccucaagaccaacgccauuacaacuauacuugcugcagugacgcugugcuucgccagcucccagaauaucaccgaagaguuuuaccaaucuacauguucagcggucaguaaaggcuauuugagcgcuuuaagaacugggugguacaccuccguuauuacaaucgaacugucuaacauuaaggagaauaaaugcaacggaaccgacgccaaggugaaacuaaucaagcaggaacucgauaaguauaaaaaugcaguaacugagcugcagcuucugaugcagucgaccccugccgcugguucaggcagcgcaauagccagugggaucgcuguguguaaggucuugcaccucgagggagaagugaacaaaauuaagaaugcccugcuguccacaaacaaagcgguugugucucucagcggcugcggugucuccguguuaacguucaagguacuggaccuuaagaauuacaucgauaaacaauugcugccaauucuaaacaagcagucauguaguaucagcaauauagagacuguuauugaauuucagcagaaaaacaauaggcuccuggagaucacccgggaguucucugugaacgcaggggucacaacuccgguguccaccuauaugcuuacaaauucagaacuguugagccucauuaacgacaugcccaucaccaacgaucaaaagaaacugaugaguaauaacgugcagaucguccgccagcagucuuacuccauuaugugcauaaucaaggaggaaguuuuagccuaugugguacaacugccucucuacggagugauugacacgccauguuggaaacuucauacuagcccccugugcacaaccaauacuaaggagggcucgaacaucuguuugacacgaaccgaucguggcugguacugcgacaaugcugggucugucuccuuuuucccucaggccgaaacguguaaggugcagucaaacagaguguuuugcgauaccaugaauaguagaacacugccaagcgaggugaaccucugcaauauagacauuuucaaccccaaauaugauuguaagaucaugacuuccaaaaccgacgucucuagcucagugaucacaagucugggagcaauuguauccugcuacgguaagacuaaauguaccgcuagcaauaagugcaggggcaucauuaagacauuuucuaacgggugugauuauguuucaaauaaaggaguggacaccgucagugugggcaacacucuuuacuaugucaauaagcaagaggguaaaagccuguacgugaagggggaaccuauaaucaacuucuaugacccauugguuuuuccguccgaugaguucgacgccucuauuucgcagguuaacgagaaaaucaaucagagccucgcguuuauccggaaguccgaugaacuguuacacaacguaaaugucggaaagucaacgacaaacauuaugauaaccacuaucauuaucgugauuaucguuauacugcuacuccugaucgccgugggccuuuucuuguacugcaaagcacgcaguacccccgucacacugucuaaggaccagcucagcggcauuaauaacaucgcuuucuccaauugaggacuaguaauaaggaaacuguaugaaugucugugggcaggaagugaagagauccuucuguaaagguuuuuggaauuaugucugcugaauaauaaacuuuuuugaaauaauaaaucugguagaaaaaugagaucuaaaaaaaaaaaaaaaaaaaaaaaaaaaaaaaaaaaaaaaaaaaaaaaaaaaaaaaaaaaaaaaaugcaucccccccccccccccccccccccccccccccaaaggcucuuuucagagccaccagaauu

SEQ ID NO: 16969 - RNA, 1951 nt, Artificial Sequence
  mRNA product Design b-4 comprising derived and/or modified sequence from HRSV(Memphis-37)__AIY60640.1__F_DSCav1_mut5 (opt4)
gggagagucccgcagucggcguccagcggcucugcuuguucgugugugugucguugcaggccuuauucaagcuuaccauggagcugcccauccugaagaccaacgccaucaccaccauccuggccgccgugacccugugcuucgccagcagccagaacaucaccgaggaguucuaccagagcaccugcagcgccgugagcaagggcuaccugagcgcccugagaaccggcugguacaccagcgugaucaccaucgagcugagcaacaucaaggagaacaagugcaacggcaccgacgccaaggugaagcugaucaagcaggagcuggacaaguacaagaacgccgugaccgagcugcagcugcugaugcagagcacccccgccgccggcagcggcagcgccaucgccagcggcaucgccgugugcaaggugcugcaccuggagggcgaggugaacaagaucaagaacgcccugcugagcaccaacaaggccguggugagccugagcggcugcggcgugagcgugcugaccuucaaggugcuggaccugaagaacuacaucgacaagcagcugcugcccauccugaacaagcagagcugcagcaucagcaacaucgagaccgugaucgaguuccagcagaagaacaacagacugcuggagaucaccagagaguucagcgugaacgccggcgugaccacccccgugagcaccuacaugcugaccaacagcgagcugcugagccugaucaacgacaugcccaucaccaacgaccagaagaagcugaugagcaacaacgugcagaucgugagacagcagagcuacagcaucaugugcaucaucaaggaggaggugcuggccuacguggugcagcugccccuguacggcgugaucgacacccccugcuggaagcugcacaccagcccccugugcaccaccaacaccaaggagggcagcaacaucugccugaccagaaccgacagaggcugguacugcgacaacgccggcagcgugagcuucuucccccaggccgagaccugcaaggugcagagcaacagaguguucugcgacaccaugaacagcagaacccugcccagcgaggugaaccugugcaacaucgacaucuucaaccccaaguacgacugcaagaucaugaccagcaagaccgacgugagcagcagcgugaucaccagccugggcgccaucgugagcugcuacggcaagaccaagugcaccgccagcaacaagugcagaggcaucaucaagaccuucagcaacggcugcgacuacgugagcaacaagggcguggacaccgugagcgugggcaacacccuguacuacgugaacaagcaggagggcaagagccuguacgugaagggcgagcccaucaucaacuucuacgacccccugguguuccccagcgacgaguucgacgccagcaucagccaggugaacgagaagaucaaccagagccuggccuucaucagaaagagcgacgagcugcugcacaacgugaacgugggcaagagcaccaccaacaucaugaucaccaccaucaucaucgugaucaucgugauccugcugcugcugaucgccgugggccuguuccuguacugcaaggccagaagcacccccgugacccugagcaaggaccagcugagcggcaucaacaacaucgccuucagcaacugaggacuaguaauaaggaaacuguaugaaugucugugggcaggaagugaagagauccuucuguaaagguuuuuggaauuaugucugcugaauaauaaacuuuuuugaaauaauaaaucugguagaaaaaugagaucuaaaaaaaaaaaaaaaaaaaaaaaaaaaaaaaaaaaaaaaaaaaaaaaaaaaaaaaaaaaaaaaaugcaucccccccccccccccccccccccccccccccaaaggcucuuuucagagccaccagaauu

SEQ ID NO: 16970 - RNA, 1951 nt, Artificial Sequence
  mRNA product Design b-4 comprising derived and/or modified sequence from HRSV(Memphis-37)__AIY60640.1__F_DSCav1_mut5 (opt5)
gggagagucccgcagucggcguccagcggcucugcuuguucgugugugugucguugcaggccuuauucaagcuuaccauggagcugcccauccucaagaccaacgccauuacaacgauccuggcugccgugacccuuugcuucgcgagcucccagaauauuacagaagaguuuuaccaaucuaccuguagcgcugucuccaaaggcuaucugucugcccucagaacagggugguacaccagcguuaucacaauugaacuguccaacaucaaggagaauaaaugcaacggaaccgacgccaaggugaaacuuaucaagcaggaacuggauaaguauaaaaaugcugugacggagcuccagcugcugaugcagucuaccccugccgcuggcagcggguccgccauugcgagcggaaucgccgucuguaaggugcuccaccuggagggcgaaguuaacaaaauuaagaaugcccuucugucuacaaacaaagcuguggucucccucagcgggugcggagugucuguucugaccuucaaggugcuugaccugaagaauuacaucgauaaacaacuccugccgauucugaacaagcaguccuguagcaucucuaauauugagacagucaucgaauuucagcagaaaaacaaucggcuccuggagaucacccgcgaguucuccgugaacgcuggcgugacgacacccgucagcaccuauaugcuuacaaauuccgaacugcucucucugauuaacgacaugccuaucaccaacgaucaaaagaaacuuaugagcaauaacguucagauugugagacagcaguccuacagcaucaugugcauuaucaaggaggaagugcuggccuaugucgugcaacucccccuguacggcguuaucgacaccccuuguuggaaacugcauacaucuccccucugcacgaccaauacaaaggagggguccaacauuugucugacccggacagaucgcggaugguacugcgacaaugcgggcagcgugagcuuuuucccucaggccgaaaccuguaagguccagucuaacagaguguuuugcgauacgaugaacuccagaacacugccgucugagguuaaucucugcaauaucgacauuuucaaccccaaauaugauuguaagaucaugaccagcaaaaccgacguguccagcucugucauuacaucccugggggcuaucgugagcugcuacggaaagaccaaauguacagccucuaauaagugccggggcaucauuaagacguuuuccaacgggugugauuaugucagcaauaaaggaguggacaccguuuccgugggcaacacacuuuacuaugucaauaagcaagagggcaaaucucuguacgugaagggggaaccuaucauuaacuucuaugacccccucguuuuuccuagcgaugaguucgacgcuuccaucucucaggugaacgagaaaauuaaucagagccuggccuuuauccgcaaguccgaugaacugcuccacaacgucaaugugggaaagagcaccacaaacauuaugaucaccacgaucauuaucgugauuaucguuauucugcuucugcucaucgccgucggccuguuccuguacugcaaagcuagaucuacccccgugacacuuuccaaggaccagcucagcgggaucaauaacauugcguucucuaauugaggacuaguaauaaggaaacuguaugaaugucugugggcaggaagugaagagauccuucuguaaagguuuuuggaauuaugucugcugaauaauaaacuuuuuugaaauaauaaaucugguagaaaaaugagaucuaaaaaaaaaaaaaaaaaaaaaaaaaaaaaaaaaaaaaaaaaaaaaaaaaaaaaaaaaaaaaaaaugcaucccccccccccccccccccccccccccccccaaaggcucuuuucagagccaccagaauu

SEQ ID NO: 16971 - RNA, 1951 nt, Artificial Sequence
  mRNA product Design b-4 comprising derived and/or modified sequence from HRSV(Memphis-37)__AIY60640.1__F_DSCav1_mut5 (opt6)
gggagagucccgcagucggcguccagcggcucugcuuguucgugugugugucguugcaggccuuauucaagcuuaccauggaacucccaaucuuaaaaacaaacgcaauaacuacaauacucgcagcaguaacacuaugcuucgcaucaucacaaaacauaaccgaagaauuuuaccaaaguacaugcucagcaguaucaaaagguuaccucucagcccuaagaaccggaugguacacaucaguaaucacuauagaacuauccaauauaaaagaaaacaaaugcaacggcacugacgcaaaaguuaaauuaauuaaacaagaacucgauaaauauaaaaaugcaguaacagaacuacaacuacuaaugcaaagcaccccagcugcaggaagcggaucagcaaucgcaucaggaauagcaguauguaaaguacuacaccuagaaggagaagucaacaaaaucaaaaaugcacuacuaaguacaaacaaagcuguaguaagccuaucagguugcggaguaucaguauuaacauuuaaaguccucgaccuaaaaaauuacauagauaaacaacucuuaccaauacucaauaaacaaaguugcagcaucagcaacauagaaacagucaucgaauuucaacaaaaaaauaauagacuccuagaaauaacacgugaauuuucaguaaaugcuggaguaacaacaccaguaucuacauauaugcuaacaaauagcgaacuacucucacuuauuaacgauaugcccauaacaaacgaccaaaaaaaacuuaugucaaacaauguucaaauaguuagacaacaauccuacagcauaaugugcauaaucaaagaagaaguucuagcuuacguaguacaacuaccacucuaugguguuaucgacacccccuguuggaaacuucacacaucaccacuaugcacaacaaacacaaaagaaggaucaaauauuugcuuaacaagaacagauagaggaugguauugcgauaaugccggaucaguaucauuuuuuccacaagcagaaacauguaaaguacaauccaaccgaguauuuugcgacaccaugaacuccagaacacuaccaucugaagucaaccuauguaauauagauauauuuaacccaaaauaugacuguaaaaucaugacaucaaaaacugauguaaguucuaguguaauaaccagcuuaggcgccauaguaagcuguuacgguaaaacaaaaugcacagcaagcaacaaaugccgcgguauaauaaaaacauucucaaacggaugcgauuauguaaguaacaaaggaguagauacagucuccguaggcaacacauuauacuacguaaacaaacaagaaggaaaaucacuauauguaaaaggagaaccaaucauaaauuucuacgacccacuuguauuccccagcgacgaauuugaugcuuccauuucacaagucaacgaaaaaauaaaccaaucauuagccuucauaagaaaaucagacgaauuauuacauaauguuaaugucggcaaauccacaacuaauauaaugauaacaacaaucauaauaguaauaaucguuauacuacuauuacucauagcaguaggacucuucuuauauuguaaagccagauccaccccaguaacacucucaaaagaccaauuaucaggaauuaauaacaucgcauuuucaaacuaaggacuaguaauaaggaaacuguaugaaugucugugggcaggaagugaagagauccuucuguaaagguuuuuggaauuaugucugcugaauaauaaacuuuuuugaaauaauaaaucugguagaaaaaugagaucuaaaaaaaaaaaaaaaaaaaaaaaaaaaaaaaaaaaaaaaaaaaaaaaaaaaaaaaaaaaaaaaaugcaucccccccccccccccccccccccccccccccaaaggcucuuuucagagccaccagaauu

SEQ ID NO: 16972 - RNA, 1951 nt, Artificial Sequence
  mRNA product Design b-4 comprising derived and/or modified sequence from HRSV(Memphis-37)__AIY60640.1__F_DSCav1_mut5 (opt11)
gggagagucccgcagucggcguccagcggcucugcuuguucgugugugugucguugcaggccuuauucaagcuuaccauggaacuccccauccuuaaaaccaacgcaaucaccacaauacucgccgccgucacccucugcuuugcguccucccagaacaucaccgaagaguucuaccaaucgaccugcagcgccgucagcaagggcuaccucucagcccuccgaacaggcugguacacauccgucaucaccaucgaacucucaaacauaaaagaaaacaaguguaacggcaccgacgcgaaaguuaaacucaucaaacaagaacucgauaaauacaaaaacgcaguaaccgaacuacaacuccuaaugcaauccacacccgcagccggcagcggcuccgcaaucgccuccggcauagcagucugcaaaguccuccaccucgaaggagaagucaauaaaaucaaaaacgcccuccuauccaccaacaaagcgguugucucccuguccggaugcggaguuagcguccuaaccuucaaggugcucgaccucaaaaacuacauagacaaacaacuacuccccauacucaacaaacaaucaugcuccaucagcaacaucgagaccgucaucgaguuccaacagaaaaacaaccgccuccucgaaaucacacgagaguucuccguaaacgccggcgucacaacccccguuuccacuuacaugcucacaaacagcgaacuccucucccucaucaacgacaugccaaucaccaacgaccaaaagaaacucauguccaacaacguccaaaucguccgccaacaaagcuacagcauaaugugcaucauaaaagaagaaguacucgcguacguaguccaacuaccccuauacggcgucaucgacacccccugcuggaaacugcacacuucuccccucuguacaaccaacacuaaagaaggcucgaacaucugccucaccagaacagaccgaggaugguacugcgacaacgccggcuccgucagcuucuucccccaggccgaaacaugcaaaguacaaucaaaccgagucuucugcgacacaaugaacagcagaacucuacccuccgaaguuaaccuaugcaacaucgacaucuucaaccccaaauacgacugcaaaauaaugaccucaaaaacagacguguccagcuccguuaucaccucucucggagccaucguauccuguuauggaaaaaccaaaugcaccgccucaaacaaaugccgaggcauaaucaaaacauucucaaauggaugcgacuacguauccaacaaaggagucgacaccgucagcgugggcaauacccucuacuacgucaacaaacaggaagggaaaucccucuauguaaagggcgagcccauuauuaacuucuaugacccccucguguucccaagcgacgaguucgacgccuccauaucacaagucaaugagaaaaucaaccaaucacuagcuuucauucgcaaauccgacgaacuccuucacaacgucaacgucggcaaauccaccaccaacaucaugaucaccaccauaauuaucgucauuaucgucauacuacuccuacucaucgccgucggccucuuccucuauugcaaagcacgcucgacacccgucacccuuucaaaagaccaacuuuccggcauaaacaacauagccuucagcaacuagggacuaguaauaaggaaacuguaugaaugucugugggcaggaagugaagagauccuucuguaaagguuuuuggaauuaugucugcugaauaauaaacuuuuuugaaauaauaaaucugguagaaaaaugagaucuaaaaaaaaaaaaaaaaaaaaaaaaaaaaaaaaaaaaaaaaaaaaaaaaaaaaaaaaaaaaaaaaugcaucccccccccccccccccccccccccccccccaaaggcucuuuucagagccaccagaauu

SEQ ID NO: 16973 - RNA, 2013 nt, Artificial Sequence
  mRNA product Design b-5 comprising derived and/or modified sequence from HRSV(Memphis-37)__AIY60640.1__F_DSCav1_mut5 (opt1)
gggagacuccugucgggcggaaguaggaggaguagaguuuaaaaacaguacucuuuuuccgguucgggacguaguugaagcaacgacaagccggauaaccgcucuugagacaggaagcuuaccauggagcugcccauccucaagaccaacgccaucaccacgauccuggccgcggugacccugugcuucgccagcucccagaacaucaccgaggaguucuaccagagcacgugcuccgccgucagcaagggcuaccucuccgcccugcgcaccgggugguacaccagcgugaucaccaucgagcuguccaacaucaaggagaacaagugcaacggcaccgacgccaaggugaagcucaucaagcaggagcuggacaaguacaagaacgcggucacggagcugcagcuccugaugcagagcaccccggccgccggcuccgggagcgcgaucgccuccggcaucgccgucugcaaggugcugcaccucgagggcgaggugaacaagaucaagaacgcccugcuguccaccaacaaggccgucgugagccucuccggcugcggggugagcguccugaccuucaaggugcuggaccucaagaacuacaucgacaagcagcugcugcccauccugaacaagcagagcugcuccaucagcaacaucgagaccgucaucgaguuccagcagaagaacaaccgccuccuggagaucacgcgggaguucagcgugaacgcgggcgugaccacccccgucuccaccuacaugcugacgaacagcgagcuccugucccugaucaacgacaugccgaucaccaacgaccagaagaagcucaugagcaacaacgugcagaucgugcgccagcaguccuacagcaucaugugcaucaucaaggaggagguccuggccuacguggugcagcugccccucuacggggucaucgacacccccugcuggaagcugcacaccagcccccugugcacgaccaacaccaaggagggcuccaacaucugccucacccggacggaccgcgggugguacugcgacaacgccggcagcguguccuucuucccgcaggccgagaccugcaagguccagagcaaccggguguucugcgacaccaugaacucccggacccugcccagcgaggugaaccucugcaacaucgacaucuucaaccccaaguacgacugcaagaucaugacguccaagaccgacgucagcuccagcgugaucaccucccugggcgccaucgugagcugcuacgggaagaccaagugcacggcgagcaacaagugccgcggcaucaucaagaccuucuccaacgggugcgacuacgucagcaacaagggcguggacaccguguccgucggcaacacccuguacuacgugaacaagcaggagggcaagagccucuacgugaagggggagcccaucaucaacuucuacgacccgcuggucuuccccuccgacgaguucgacgccagcaucucccaggugaacgagaagaucaaccagagccuggccuucauccggaaguccgacgagcuccugcacaacgugaacgucggcaagagcaccacgaacaucaugaucaccaccaucaucaucgugaucaucgugauccugcugcuccugaucgccgucgggcuguuccucuacugcaaggcccgcuccacccccgugacgcugagcaaggaccagcuguccgggaucaacaacaucgcguucagcaacugaggacuaguacuggcugcaucucccuuuccucuguccuccauccuucucccaggauggugaagggggaccugguacccagugauccccaccccaggauccuaaaucaugacuuaccugcuaauaaaaacucauuggaaaagugagaagaucuaaaaaaaaaaaaaaaaaaaaaaaaaaaaaaaaaaaaaaaaaaaaaaaaaaaaaaaaaaaaaaaaugcaucccccccccccccccccccccccccccccccaaaggcucuuuucagagccaccagaauu

SEQ ID NO: 16974 - RNA, 2013 nt, Artificial Sequence
  mRNA product Design b-5 comprising derived and/or modified sequence from HRSV(Memphis-37)__AIY60640.1__F_DSCav1_mut5 (opt1)
gggagacuccugucgggcggaaguaggaggaguagaguuuaaaaacaguacucuuuuuccgguucgggacguaguugaagcaacgacaagccggauaaccgcucuugagacaggaagcuuaccauggagcugcccauccucaagaccaacgccaucaccacgauccuggccgcggugacccugugcuucgccagcucccagaacaucaccgaggaguucuaccagagcacgugcuccgccgucagcaagggcuaccucuccgcccugcgcaccgggugguacaccagcgugaucaccaucgagcuguccaacaucaaggagaacaagugcaacggcaccgacgccaaggugaagcucaucaagcaggagcuggacaaguacaagaacgcggucacggagcugcagcuccugaugcagagcaccccggccgccggguccggcagcgccaucgcguccgggaucgccgugugcaaggugcugcaccucgagggcgaggucaacaagaucaagaacgcccugcugagcaccaacaaggccguggugucccucagcggcugcggggucuccgugcugaccuucaaggugcuggaccucaagaacuacaucgacaagcagcugcugcccauccucaacaagcagagcugcuccaucagcaacaucgagacggucaucgaguuccagcagaagaacaaccggcugcuggagaucacccgcgaguucuccgugaacgccggcgugaccacccccgucagcacguacaugcucaccaacagcgagcugcugucccucaucaacgacaugcccaucaccaacgaccagaagaagcugaugagcaacaacgugcagaucgugcggcagcaguccuacagcaucaugugcaucaucaaggaggagguccuggcguacguggugcagcucccgcuguacggggucaucgacacccccugcuggaagcugcacacgagcccccucugcaccaccaacaccaaggagggcuccaacaucugccugacgcgcaccgaccgggggugguacugcgacaacgccggcuccgugagcuucuucccccaggccgagaccugcaaggugcaguccaaccgcgucuucugcgacaccaugaacagccggacgcucccguccgaggugaaccugugcaacaucgacaucuucaaccccaaguacgacugcaagaucaugaccagcaagaccgacgucuccagcuccgugaucaccagccugggcgccaucguguccugcuacgggaagacgaagugcaccgccagcaacaagugccggggcaucaucaagaccuucuccaacgggugcgacuacgucagcaacaagggcguggacaccgugagcgucggcaacacgcucuacuacgugaacaagcaggaggggaagucccuguacgugaagggcgagcccaucaucaacuucuacgacccccuggucuucccgagcgacgaguucgacgcguccaucagccaggugaacgagaagaucaaccagucccucgccuucauccgcaagagcgacgagcugcugcacaacgugaacgucgggaaguccaccaccaacaucaugaucaccaccaucaucaucgugaucaucgugauccuccugcugcucaucgccgucggccuguuccuguacugcaaggcccggagcacgcccgugacccuguccaaggaccagcucagcgggaucaacaacaucgccuucuccaacugaggacuaguacuggcugcaucucccuuuccucuguccuccauccuucucccaggauggugaagggggaccugguacccagugauccccaccccaggauccuaaaucaugacuuaccugcuaauaaaaacucauuggaaaagugagaagaucuaaaaaaaaaaaaaaaaaaaaaaaaaaaaaaaaaaaaaaaaaaaaaaaaaaaaaaaaaaaaaaaaugcaucccccccccccccccccccccccccccccccaaaggcucuuuucagagccaccagaauu

SEQ ID NO: 16975 - RNA, 2013 nt, Artificial Sequence
  mRNA product Design b-5 comprising derived and/or modified sequence from HRSV(Memphis-37)__AIY60640.1__F_DSCav1_mut5 (opt2)
gggagacuccugucgggcggaaguaggaggaguagaguuuaaaaacaguacucuuuuuccgguucgggacguaguugaagcaacgacaagccggauaaccgcucuugagacaggaagcuuaccauggagcuccccauccucaagaccaacgccaucaccaccauccucgccgccgucacccucugcuucgccuccucccagaacaucaccgaggaguucuaccaguccaccugcuccgccgucuccaagggcuaccucuccgcccuccgcaccggcugguacaccuccgucaucaccaucgagcucuccaacaucaaggagaacaagugcaacggcaccgacgccaaggucaagcucaucaagcaggagcucgacaaguacaagaacgccgucaccgagcuccagcuccucaugcaguccacccccgccgccggcuccggcuccgccaucgccuccggcaucgccgucugcaagguccuccaccucgagggcgaggucaacaagaucaagaacgcccuccucuccaccaacaaggccgucgucucccucuccggcugcggcgucuccguccucaccuucaagguccucgaccucaagaacuacaucgacaagcagcuccuccccauccucaacaagcaguccugcuccaucuccaacaucgagaccgucaucgaguuccagcagaagaacaaccgccuccucgagaucacccgcgaguucuccgucaacgccggcgucaccacccccgucuccaccuacaugcucaccaacuccgagcuccucucccucaucaacgacaugcccaucaccaacgaccagaagaagcucauguccaacaacguccagaucguccgccagcaguccuacuccaucaugugcaucaucaaggaggagguccucgccuacgucguccagcucccccucuacggcgucaucgacacccccugcuggaagcuccacaccuccccccucugcaccaccaacaccaaggagggcuccaacaucugccucacccgcaccgaccgcggcugguacugcgacaacgccggcuccgucuccuucuucccccaggccgagaccugcaagguccaguccaaccgcgucuucugcgacaccaugaacucccgcacccuccccuccgaggucaaccucugcaacaucgacaucuucaaccccaaguacgacugcaagaucaugaccuccaagaccgacgucuccuccuccgucaucaccucccucggcgccaucgucuccugcuacggcaagaccaagugcaccgccuccaacaagugccgcggcaucaucaagaccuucuccaacggcugcgacuacgucuccaacaagggcgucgacaccgucuccgucggcaacacccucuacuacgucaacaagcaggagggcaagucccucuacgucaagggcgagcccaucaucaacuucuacgacccccucgucuuccccuccgacgaguucgacgccuccaucucccaggucaacgagaagaucaaccagucccucgccuucauccgcaaguccgacgagcuccuccacaacgucaacgucggcaaguccaccaccaacaucaugaucaccaccaucaucaucgucaucaucgucauccuccuccuccucaucgccgucggccucuuccucuacugcaaggcccgcuccacccccgucacccucuccaaggaccagcucuccggcaucaacaacaucgccuucuccaacugaggacuaguacuggcugcaucucccuuuccucuguccuccauccuucucccaggauggugaagggggaccugguacccagugauccccaccccaggauccuaaaucaugacuuaccugcuaauaaaaacucauuggaaaagugagaagaucuaaaaaaaaaaaaaaaaaaaaaaaaaaaaaaaaaaaaaaaaaaaaaaaaaaaaaaaaaaaaaaaaugcaucccccccccccccccccccccccccccccccaaaggcucuuuucagagccaccagaauu

SEQ ID NO: 16976 - RNA, 2013 nt, Artificial Sequence
  mRNA product Design b-5 comprising derived and/or modified sequence from HRSV(Memphis-37)__AIY60640.1__F_DSCav1_mut5 (opt3)
gggagacuccugucgggcggaaguaggaggaguagaguuuaaaaacaguacucuuuuuccgguucgggacguaguugaagcaacgacaagccggauaaccgcucuugagacaggaagcuuaccauggagcugcccauccucaagaccaacgccauuacaacuauacuugcugcagugacgcugugcuucgccagcucccagaauaucaccgaagaguuuuaccaaucuacauguucagcggucaguaaaggcuauuugagcgcuuuaagaacugggugguacaccuccguuauuacaaucgaacugucuaacauuaaggagaauaaaugcaacggaaccgacgccaaggugaaacuaaucaagcaggaacucgauaaguauaaaaaugcaguaacugagcugcagcuucugaugcagucgaccccugccgcugguucaggcagcgcaauagccagugggaucgcuguguguaaggucuugcaccucgagggagaagugaacaaaauuaagaaugcccugcuguccacaaacaaagcgguugugucucucagcggcugcggugucuccguguuaacguucaagguacuggaccuuaagaauuacaucgauaaacaauugcugccaauucuaaacaagcagucauguaguaucagcaauauagagacuguuauugaauuucagcagaaaaacaauaggcuccuggagaucacccgggaguucucugugaacgcaggggucacaacuccgguguccaccuauaugcuuacaaauucagaacuguugagccucauuaacgacaugcccaucaccaacgaucaaaagaaacugaugaguaauaacgugcagaucguccgccagcagucuuacuccauuaugugcauaaucaaggaggaaguuuuagccuaugugguacaacugccucucuacggagugauugacacgccauguuggaaacuucauacuagcccccugugcacaaccaauacuaaggagggcucgaacaucuguuugacacgaaccgaucguggcugguacugcgacaaugcugggucugucuccuuuuucccucaggccgaaacguguaaggugcagucaaacagaguguuuugcgauaccaugaauaguagaacacugccaagcgaggugaaccucugcaauauagacauuuucaaccccaaauaugauuguaagaucaugacuuccaaaaccgacgucucuagcucagugaucacaagucugggagcaauuguauccugcuacgguaagacuaaauguaccgcuagcaauaagugcaggggcaucauuaagacauuuucuaacgggugugauuauguuucaaauaaaggaguggacaccgucagugugggcaacacucuuuacuaugucaauaagcaagaggguaaaagccuguacgugaagggggaaccuauaaucaacuucuaugacccauugguuuuuccguccgaugaguucgacgccucuauuucgcagguuaacgagaaaaucaaucagagccucgcguuuauccggaaguccgaugaacuguuacacaacguaaaugucggaaagucaacgacaaacauuaugauaaccacuaucauuaucgugauuaucguuauacugcuacuccugaucgccgugggccuuuucuuguacugcaaagcacgcaguacccccgucacacugucuaaggaccagcucagcggcauuaauaacaucgcuuucuccaauugaggacuaguacuggcugcaucucccuuuccucuguccuccauccuucucccaggauggugaagggggaccugguacccagugauccccaccccaggauccuaaaucaugacuuaccugcuaauaaaaacucauuggaaaagugagaagaucuaaaaaaaaaaaaaaaaaaaaaaaaaaaaaaaaaaaaaaaaaaaaaaaaaaaaaaaaaaaaaaaaugcaucccccccccccccccccccccccccccccccaaaggcucuuuucagagccaccagaauu

SEQ ID NO: 16977 - RNA, 2013 nt, Artificial Sequence
  mRNA product Design b-5 comprising derived and/or modified sequence from HRSV(Memphis-37)__AIY60640.1__F_DSCav1_mut5 (opt4)
gggagacuccugucgggcggaaguaggaggaguagaguuuaaaaacaguacucuuuuuccgguucgggacguaguugaagcaacgacaagccggauaaccgcucuugagacaggaagcuuaccauggagcugcccauccugaagaccaacgccaucaccaccauccuggccgccgugacccugugcuucgccagcagccagaacaucaccgaggaguucuaccagagcaccugcagcgccgugagcaagggcuaccugagcgcccugagaaccggcugguacaccagcgugaucaccaucgagcugagcaacaucaaggagaacaagugcaacggcaccgacgccaaggugaagcugaucaagcaggagcuggacaaguacaagaacgccgugaccgagcugcagcugcugaugcagagcacccccgccgccggcagcggcagcgccaucgccagcggcaucgccgugugcaaggugcugcaccuggagggcgaggugaacaagaucaagaacgcccugcugagcaccaacaaggccguggugagccugagcggcugcggcgugagcgugcugaccuucaaggugcuggaccugaagaacuacaucgacaagcagcugcugcccauccugaacaagcagagcugcagcaucagcaacaucgagaccgugaucgaguuccagcagaagaacaacagacugcuggagaucaccagagaguucagcgugaacgccggcgugaccacccccgugagcaccuacaugcugaccaacagcgagcugcugagccugaucaacgacaugcccaucaccaacgaccagaagaagcugaugagcaacaacgugcagaucgugagacagcagagcuacagcaucaugugcaucaucaaggaggaggugcuggccuacguggugcagcugccccuguacggcgugaucgacacccccugcuggaagcugcacaccagcccccugugcaccaccaacaccaaggagggcagcaacaucugccugaccagaaccgacagaggcugguacugcgacaacgccggcagcgugagcuucuucccccaggccgagaccugcaaggugcagagcaacagaguguucugcgacaccaugaacagcagaacccugcccagcgaggugaaccugugcaacaucgacaucuucaaccccaaguacgacugcaagaucaugaccagcaagaccgacgugagcagcagcgugaucaccagccugggcgccaucgugagcugcuacggcaagaccaagugcaccgccagcaacaagugcagaggcaucaucaagaccuucagcaacggcugcgacuacgugagcaacaagggcguggacaccgugagcgugggcaacacccuguacuacgugaacaagcaggagggcaagagccuguacgugaagggcgagcccaucaucaacuucuacgacccccugguguuccccagcgacgaguucgacgccagcaucagccaggugaacgagaagaucaaccagagccuggccuucaucagaaagagcgacgagcugcugcacaacgugaacgugggcaagagcaccaccaacaucaugaucaccaccaucaucaucgugaucaucgugauccugcugcugcugaucgccgugggccuguuccuguacugcaaggccagaagcacccccgugacccugagcaaggaccagcugagcggcaucaacaacaucgccuucagcaacugaggacuaguacuggcugcaucucccuuuccucuguccuccauccuucucccaggauggugaagggggaccugguacccagugauccccaccccaggauccuaaaucaugacuuaccugcuaauaaaaacucauuggaaaagugagaagaucuaaaaaaaaaaaaaaaaaaaaaaaaaaaaaaaaaaaaaaaaaaaaaaaaaaaaaaaaaaaaaaaaugcaucccccccccccccccccccccccccccccccaaaggcucuuuucagagccaccagaauu

SEQ ID NO: 16978 - RNA, 2013 nt, Artificial Sequence
  mRNA product Design b-5 comprising derived and/or modified sequence from HRSV(Memphis-37)__AIY60640.1__F_DSCav1_mut5 (opt5)
gggagacuccugucgggcggaaguaggaggaguagaguuuaaaaacaguacucuuuuuccgguucgggacguaguugaagcaacgacaagccggauaaccgcucuugagacaggaagcuuaccauggagcugcccauccucaagaccaacgccauuacaacgauccuggcugccgugacccuuugcuucgcgagcucccagaauauuacagaagaguuuuaccaaucuaccuguagcgcugucuccaaaggcuaucugucugcccucagaacagggugguacaccagcguuaucacaauugaacuguccaacaucaaggagaauaaaugcaacggaaccgacgccaaggugaaacuuaucaagcaggaacuggauaaguauaaaaaugcugugacggagcuccagcugcugaugcagucuaccccugccgcuggcagcggguccgccauugcgagcggaaucgccgucuguaaggugcuccaccuggagggcgaaguuaacaaaauuaagaaugcccuucugucuacaaacaaagcuguggucucccucagcgggugcggagugucuguucugaccuucaaggugcuugaccugaagaauuacaucgauaaacaacuccugccgauucugaacaagcaguccuguagcaucucuaauauugagacagucaucgaauuucagcagaaaaacaaucggcuccuggagaucacccgcgaguucuccgugaacgcuggcgugacgacacccgucagcaccuauaugcuuacaaauuccgaacugcucucucugauuaacgacaugccuaucaccaacgaucaaaagaaacuuaugagcaauaacguucagauugugagacagcaguccuacagcaucaugugcauuaucaaggaggaagugcuggccuaugucgugcaacucccccuguacggcguuaucgacaccccuuguuggaaacugcauacaucuccccucugcacgaccaauacaaaggagggguccaacauuugucugacccggacagaucgcggaugguacugcgacaaugcgggcagcgugagcuuuuucccucaggccgaaaccuguaagguccagucuaacagaguguuuugcgauacgaugaacuccagaacacugccgucugagguuaaucucugcaauaucgacauuuucaaccccaaauaugauuguaagaucaugaccagcaaaaccgacguguccagcucugucauuacaucccugggggcuaucgugagcugcuacggaaagaccaaauguacagccucuaauaagugccggggcaucauuaagacguuuuccaacgggugugauuaugucagcaauaaaggaguggacaccguuuccgugggcaacacacuuuacuaugucaauaagcaagagggcaaaucucuguacgugaagggggaaccuaucauuaacuucuaugacccccucguuuuuccuagcgaugaguucgacgcuuccaucucucaggugaacgagaaaauuaaucagagccuggccuuuauccgcaaguccgaugaacugcuccacaacgucaaugugggaaagagcaccacaaacauuaugaucaccacgaucauuaucgugauuaucguuauucugcuucugcucaucgccgucggccuguuccuguacugcaaagcuagaucuacccccgugacacuuuccaaggaccagcucagcgggaucaauaacauugcguucucuaauugaggacuaguacuggcugcaucucccuuuccucuguccuccauccuucucccaggauggugaagggggaccugguacccagugauccccaccccaggauccuaaaucaugacuuaccugcuaauaaaaacucauuggaaaagugagaagaucuaaaaaaaaaaaaaaaaaaaaaaaaaaaaaaaaaaaaaaaaaaaaaaaaaaaaaaaaaaaaaaaaugcaucccccccccccccccccccccccccccccccaaaggcucuuuucagagccaccagaauu

SEQ ID NO: 16979 - RNA, 2013 nt, Artificial Sequence
  mRNA product Design b-5 comprising derived and/or modified sequence from HRSV(Memphis-37)__AIY60640.1__F_DSCav1_mut5 (opt6)
gggagacuccugucgggcggaaguaggaggaguagaguuuaaaaacaguacucuuuuuccgguucgggacguaguugaagcaacgacaagccggauaaccgcucuugagacaggaagcuuaccauggaacucccaaucuuaaaaacaaacgcaauaacuacaauacucgcagcaguaacacuaugcuucgcaucaucacaaaacauaaccgaagaauuuuaccaaaguacaugcucagcaguaucaaaagguuaccucucagcccuaagaaccggaugguacacaucaguaaucacuauagaacuauccaauauaaaagaaaacaaaugcaacggcacugacgcaaaaguuaaauuaauuaaacaagaacucgauaaauauaaaaaugcaguaacagaacuacaacuacuaaugcaaagcaccccagcugcaggaagcggaucagcaaucgcaucaggaauagcaguauguaaaguacuacaccuagaaggagaagucaacaaaaucaaaaaugcacuacuaaguacaaacaaagcuguaguaagccuaucagguugcggaguaucaguauuaacauuuaaaguccucgaccuaaaaaauuacauagauaaacaacucuuaccaauacucaauaaacaaaguugcagcaucagcaacauagaaacagucaucgaauuucaacaaaaaaauaauagacuccuagaaauaacacgugaauuuucaguaaaugcuggaguaacaacaccaguaucuacauauaugcuaacaaauagcgaacuacucucacuuauuaacgauaugcccauaacaaacgaccaaaaaaaacuuaugucaaacaauguucaaauaguuagacaacaauccuacagcauaaugugcauaaucaaagaagaaguucuagcuuacguaguacaacuaccacucuaugguguuaucgacacccccuguuggaaacuucacacaucaccacuaugcacaacaaacacaaaagaaggaucaaauauuugcuuaacaagaacagauagaggaugguauugcgauaaugccggaucaguaucauuuuuuccacaagcagaaacauguaaaguacaauccaaccgaguauuuugcgacaccaugaacuccagaacacuaccaucugaagucaaccuauguaauauagauauauuuaacccaaaauaugacuguaaaaucaugacaucaaaaacugauguaaguucuaguguaauaaccagcuuaggcgccauaguaagcuguuacgguaaaacaaaaugcacagcaagcaacaaaugccgcgguauaauaaaaacauucucaaacggaugcgauuauguaaguaacaaaggaguagauacagucuccguaggcaacacauuauacuacguaaacaaacaagaaggaaaaucacuauauguaaaaggagaaccaaucauaaauuucuacgacccacuuguauuccccagcgacgaauuugaugcuuccauuucacaagucaacgaaaaaauaaaccaaucauuagccuucauaagaaaaucagacgaauuauuacauaauguuaaugucggcaaauccacaacuaauauaaugauaacaacaaucauaauaguaauaaucguuauacuacuauuacucauagcaguaggacucuucuuauauuguaaagccagauccaccccaguaacacucucaaaagaccaauuaucaggaauuaauaacaucgcauuuucaaacuaaggacuaguacuggcugcaucucccuuuccucuguccuccauccuucucccaggauggugaagggggaccugguacccagugauccccaccccaggauccuaaaucaugacuuaccugcuaauaaaaacucauuggaaaagugagaagaucuaaaaaaaaaaaaaaaaaaaaaaaaaaaaaaaaaaaaaaaaaaaaaaaaaaaaaaaaaaaaaaaaugcaucccccccccccccccccccccccccccccccaaaggcucuuuucagagccaccagaauu

SEQ ID NO: 16980 - RNA, 2013 nt, Artificial Sequence
  mRNA product Design b-5 comprising derived and/or modified sequence from HRSV(Memphis-37)__AIY60640.1__F_DSCav1_mut5 (opt11)
gggagacuccugucgggcggaaguaggaggaguagaguuuaaaaacaguacucuuuuuccgguucgggacguaguugaagcaacgacaagccggauaaccgcucuugagacaggaagcuuaccauggaacuccccauccuuaaaaccaacgcaaucaccacaauacucgccgccgucacccucugcuuugcguccucccagaacaucaccgaagaguucuaccaaucgaccugcagcgccgucagcaagggcuaccucucagcccuccgaacaggcugguacacauccgucaucaccaucgaacucucaaacauaaaagaaaacaaguguaacggcaccgacgcgaaaguuaaacucaucaaacaagaacucgauaaauacaaaaacgcaguaaccgaacuacaacuccuaaugcaauccacacccgcagccggcagcggcuccgcaaucgccuccggcauagcagucugcaaaguccuccaccucgaaggagaagucaauaaaaucaaaaacgcccuccuauccaccaacaaagcgguugucucccuguccggaugcggaguuagcguccuaaccuucaaggugcucgaccucaaaaacuacauagacaaacaacuacuccccauacucaacaaacaaucaugcuccaucagcaacaucgagaccgucaucgaguuccaacagaaaaacaaccgccuccucgaaaucacacgagaguucuccguaaacgccggcgucacaacccccguuuccacuuacaugcucacaaacagcgaacuccucucccucaucaacgacaugccaaucaccaacgaccaaaagaaacucauguccaacaacguccaaaucguccgccaacaaagcuacagcauaaugugcaucauaaaagaagaaguacucgcguacguaguccaacuaccccuauacggcgucaucgacacccccugcuggaaacugcacacuucuccccucuguacaaccaacacuaaagaaggcucgaacaucugccucaccagaacagaccgaggaugguacugcgacaacgccggcuccgucagcuucuucccccaggccgaaacaugcaaaguacaaucaaaccgagucuucugcgacacaaugaacagcagaacucuacccuccgaaguuaaccuaugcaacaucgacaucuucaaccccaaauacgacugcaaaauaaugaccucaaaaacagacguguccagcuccguuaucaccucucucggagccaucguauccuguuauggaaaaaccaaaugcaccgccucaaacaaaugccgaggcauaaucaaaacauucucaaauggaugcgacuacguauccaacaaaggagucgacaccgucagcgugggcaauacccucuacuacgucaacaaacaggaagggaaaucccucuauguaaagggcgagcccauuauuaacuucuaugacccccucguguucccaagcgacgaguucgacgccuccauaucacaagucaaugagaaaaucaaccaaucacuagcuuucauucgcaaauccgacgaacuccuucacaacgucaacgucggcaaauccaccaccaacaucaugaucaccaccauaauuaucgucauuaucgucauacuacuccuacucaucgccgucggccucuuccucuauugcaaagcacgcucgacacccgucacccuuucaaaagaccaacuuuccggcauaaacaacauagccuucagcaacuagggacuaguacuggcugcaucucccuuuccucuguccuccauccuucucccaggauggugaagggggaccugguacccagugauccccaccccaggauccuaaaucaugacuuaccugcuaauaaaaacucauuggaaaagugagaagaucuaaaaaaaaaaaaaaaaaaaaaaaaaaaaaaaaaaaaaaaaaaaaaaaaaaaaaaaaaaaaaaaaugcaucccccccccccccccccccccccccccccccaaaggcucuuuucagagccaccagaauu

SEQ ID NO: 16981 - RNA, 1919 nt, Artificial Sequence
  mRNA product Design c-1 comprising derived and/or modified sequence from HRSV(Memphis-37)__AIY60640.1__F_DSCav1_mut5 (opt1)
gggagaguccgcucagccagguugcagaagcggcuuagcguguguccuaaucuucucucugcguguagguaggccugugccgcaaacaagcuuaccauggagcugcccauccucaagaccaacgccaucaccacgauccuggccgcggugacccugugcuucgccagcucccagaacaucaccgaggaguucuaccagagcacgugcuccgccgucagcaagggcuaccucuccgcccugcgcaccgggugguacaccagcgugaucaccaucgagcuguccaacaucaaggagaacaagugcaacggcaccgacgccaaggugaagcucaucaagcaggagcuggacaaguacaagaacgcggucacggagcugcagcuccugaugcagagcaccccggccgccggcuccgggagcgcgaucgccuccggcaucgccgucugcaaggugcugcaccucgagggcgaggugaacaagaucaagaacgcccugcuguccaccaacaaggccgucgugagccucuccggcugcggggugagcguccugaccuucaaggugcuggaccucaagaacuacaucgacaagcagcugcugcccauccugaacaagcagagcugcuccaucagcaacaucgagaccgucaucgaguuccagcagaagaacaaccgccuccuggagaucacgcgggaguucagcgugaacgcgggcgugaccacccccgucuccaccuacaugcugacgaacagcgagcuccugucccugaucaacgacaugccgaucaccaacgaccagaagaagcucaugagcaacaacgugcagaucgugcgccagcaguccuacagcaucaugugcaucaucaaggaggagguccuggccuacguggugcagcugccccucuacggggucaucgacacccccugcuggaagcugcacaccagcccccugugcacgaccaacaccaaggagggcuccaacaucugccucacccggacggaccgcgggugguacugcgacaacgccggcagcguguccuucuucccgcaggccgagaccugcaagguccagagcaaccggguguucugcgacaccaugaacucccggacccugcccagcgaggugaaccucugcaacaucgacaucuucaaccccaaguacgacugcaagaucaugacguccaagaccgacgucagcuccagcgugaucaccucccugggcgccaucgugagcugcuacgggaagaccaagugcacggcgagcaacaagugccgcggcaucaucaagaccuucuccaacgggugcgacuacgucagcaacaagggcguggacaccguguccgucggcaacacccuguacuacgugaacaagcaggagggcaagagccucuacgugaagggggagcccaucaucaacuucuacgacccgcuggucuuccccuccgacgaguucgacgccagcaucucccaggugaacgagaagaucaaccagagccuggccuucauccggaaguccgacgagcuccugcacaacgugaacgucggcaagagcaccacgaacaucaugaucaccaccaucaucaucgugaucaucgugauccugcugcuccugaucgccgucgggcuguuccucuacugcaaggcccgcuccacccccgugacgcugagcaaggaccagcuguccgggaucaacaacaucgcguucagcaacugaggacuaguguccaccugucccuccugggcugcuggauugucucguuuuccugccaaauaaacaggaucagcgcuuuacagaucuaaaaaaaaaaaaaaaaaaaaaaaaaaaaaaaaaaaaaaaaaaaaaaaaaaaaaaaaaaaaaaaaugcaucccccccccccccccccccccccccccccccaaaggcucuuuucagagccaccagaauu

SEQ ID NO: 16982 - RNA, 1919 nt, Artificial Sequence
  mRNA product Design c-1 comprising derived and/or modified sequence from HRSV(Memphis-37)__AIY60640.1__F_DSCav1_mut5 (opt1)
gggagaguccgcucagccagguugcagaagcggcuuagcguguguccuaaucuucucucugcguguagguaggccugugccgcaaacaagcuuaccauggagcugcccauccucaagaccaacgccaucaccacgauccuggccgcggugacccugugcuucgccagcucccagaacaucaccgaggaguucuaccagagcacgugcuccgccgucagcaagggcuaccucuccgcccugcgcaccgggugguacaccagcgugaucaccaucgagcuguccaacaucaaggagaacaagugcaacggcaccgacgccaaggugaagcucaucaagcaggagcuggacaaguacaagaacgcggucacggagcugcagcuccugaugcagagcaccccggccgccggguccggcagcgccaucgcguccgggaucgccgugugcaaggugcugcaccucgagggcgaggucaacaagaucaagaacgcccugcugagcaccaacaaggccguggugucccucagcggcugcggggucuccgugcugaccuucaaggugcuggaccucaagaacuacaucgacaagcagcugcugcccauccucaacaagcagagcugcuccaucagcaacaucgagacggucaucgaguuccagcagaagaacaaccggcugcuggagaucacccgcgaguucuccgugaacgccggcgugaccacccccgucagcacguacaugcucaccaacagcgagcugcugucccucaucaacgacaugcccaucaccaacgaccagaagaagcugaugagcaacaacgugcagaucgugcggcagcaguccuacagcaucaugugcaucaucaaggaggagguccuggcguacguggugcagcucccgcuguacggggucaucgacacccccugcuggaagcugcacacgagcccccucugcaccaccaacaccaaggagggcuccaacaucugccugacgcgcaccgaccgggggugguacugcgacaacgccggcuccgugagcuucuucccccaggccgagaccugcaaggugcaguccaaccgcgucuucugcgacaccaugaacagccggacgcucccguccgaggugaaccugugcaacaucgacaucuucaaccccaaguacgacugcaagaucaugaccagcaagaccgacgucuccagcuccgugaucaccagccugggcgccaucguguccugcuacgggaagacgaagugcaccgccagcaacaagugccggggcaucaucaagaccuucuccaacgggugcgacuacgucagcaacaagggcguggacaccgugagcgucggcaacacgcucuacuacgugaacaagcaggaggggaagucccuguacgugaagggcgagcccaucaucaacuucuacgacccccuggucuucccgagcgacgaguucgacgcguccaucagccaggugaacgagaagaucaaccagucccucgccuucauccgcaagagcgacgagcugcugcacaacgugaacgucgggaaguccaccaccaacaucaugaucaccaccaucaucaucgugaucaucgugauccuccugcugcucaucgccgucggccuguuccuguacugcaaggcccggagcacgcccgugacccuguccaaggaccagcucagcgggaucaacaacaucgccuucuccaacugaggacuaguguccaccugucccuccugggcugcuggauugucucguuuuccugccaaauaaacaggaucagcgcuuuacagaucuaaaaaaaaaaaaaaaaaaaaaaaaaaaaaaaaaaaaaaaaaaaaaaaaaaaaaaaaaaaaaaaaugcaucccccccccccccccccccccccccccccccaaaggcucuuuucagagccaccagaauu

SEQ ID NO: 16983 - RNA, 1919 nt, Artificial Sequence
  mRNA product Design c-1 comprising derived and/or modified sequence from HRSV(Memphis-37)__AIY60640.1__F_DSCav1_mut5 (opt2)
gggagaguccgcucagccagguugcagaagcggcuuagcguguguccuaaucuucucucugcguguagguaggccugugccgcaaacaagcuuaccauggagcuccccauccucaagaccaacgccaucaccaccauccucgccgccgucacccucugcuucgccuccucccagaacaucaccgaggaguucuaccaguccaccugcuccgccgucuccaagggcuaccucuccgcccuccgcaccggcugguacaccuccgucaucaccaucgagcucuccaacaucaaggagaacaagugcaacggcaccgacgccaaggucaagcucaucaagcaggagcucgacaaguacaagaacgccgucaccgagcuccagcuccucaugcaguccacccccgccgccggcuccggcuccgccaucgccuccggcaucgccgucugcaagguccuccaccucgagggcgaggucaacaagaucaagaacgcccuccucuccaccaacaaggccgucgucucccucuccggcugcggcgucuccguccucaccuucaagguccucgaccucaagaacuacaucgacaagcagcuccuccccauccucaacaagcaguccugcuccaucuccaacaucgagaccgucaucgaguuccagcagaagaacaaccgccuccucgagaucacccgcgaguucuccgucaacgccggcgucaccacccccgucuccaccuacaugcucaccaacuccgagcuccucucccucaucaacgacaugcccaucaccaacgaccagaagaagcucauguccaacaacguccagaucguccgccagcaguccuacuccaucaugugcaucaucaaggaggagguccucgccuacgucguccagcucccccucuacggcgucaucgacacccccugcuggaagcuccacaccuccccccucugcaccaccaacaccaaggagggcuccaacaucugccucacccgcaccgaccgcggcugguacugcgacaacgccggcuccgucuccuucuucccccaggccgagaccugcaagguccaguccaaccgcgucuucugcgacaccaugaacucccgcacccuccccuccgaggucaaccucugcaacaucgacaucuucaaccccaaguacgacugcaagaucaugaccuccaagaccgacgucuccuccuccgucaucaccucccucggcgccaucgucuccugcuacggcaagaccaagugcaccgccuccaacaagugccgcggcaucaucaagaccuucuccaacggcugcgacuacgucuccaacaagggcgucgacaccgucuccgucggcaacacccucuacuacgucaacaagcaggagggcaagucccucuacgucaagggcgagcccaucaucaacuucuacgacccccucgucuuccccuccgacgaguucgacgccuccaucucccaggucaacgagaagaucaaccagucccucgccuucauccgcaaguccgacgagcuccuccacaacgucaacgucggcaaguccaccaccaacaucaugaucaccaccaucaucaucgucaucaucgucauccuccuccuccucaucgccgucggccucuuccucuacugcaaggcccgcuccacccccgucacccucuccaaggaccagcucuccggcaucaacaacaucgccuucuccaacugaggacuaguguccaccugucccuccugggcugcuggauugucucguuuuccugccaaauaaacaggaucagcgcuuuacagaucuaaaaaaaaaaaaaaaaaaaaaaaaaaaaaaaaaaaaaaaaaaaaaaaaaaaaaaaaaaaaaaaaugcaucccccccccccccccccccccccccccccccaaaggcucuuuucagagccaccagaauu

SEQ ID NO: 16984 - RNA, 1919 nt, Artificial Sequence
  mRNA product Design c-1 comprising derived and/or modified sequence from HRSV(Memphis-37)__AIY60640.1__F_DSCav1_mut5 (opt3)
gggagaguccgcucagccagguugcagaagcggcuuagcguguguccuaaucuucucucugcguguagguaggccugugccgcaaacaagcuuaccauggagcugcccauccucaagaccaacgccauuacaacuauacuugcugcagugacgcugugcuucgccagcucccagaauaucaccgaagaguuuuaccaaucuacauguucagcggucaguaaaggcuauuugagcgcuuuaagaacugggugguacaccuccguuauuacaaucgaacugucuaacauuaaggagaauaaaugcaacggaaccgacgccaaggugaaacuaaucaagcaggaacucgauaaguauaaaaaugcaguaacugagcugcagcuucugaugcagucgaccccugccgcugguucaggcagcgcaauagccagugggaucgcuguguguaaggucuugcaccucgagggagaagugaacaaaauuaagaaugcccugcuguccacaaacaaagcgguugugucucucagcggcugcggugucuccguguuaacguucaagguacuggaccuuaagaauuacaucgauaaacaauugcugccaauucuaaacaagcagucauguaguaucagcaauauagagacuguuauugaauuucagcagaaaaacaauaggcuccuggagaucacccgggaguucucugugaacgcaggggucacaacuccgguguccaccuauaugcuuacaaauucagaacuguugagccucauuaacgacaugcccaucaccaacgaucaaaagaaacugaugaguaauaacgugcagaucguccgccagcagucuuacuccauuaugugcauaaucaaggaggaaguuuuagccuaugugguacaacugccucucuacggagugauugacacgccauguuggaaacuucauacuagcccccugugcacaaccaauacuaaggagggcucgaacaucuguuugacacgaaccgaucguggcugguacugcgacaaugcugggucugucuccuuuuucccucaggccgaaacguguaaggugcagucaaacagaguguuuugcgauaccaugaauaguagaacacugccaagcgaggugaaccucugcaauauagacauuuucaaccccaaauaugauuguaagaucaugacuuccaaaaccgacgucucuagcucagugaucacaagucugggagcaauuguauccugcuacgguaagacuaaauguaccgcuagcaauaagugcaggggcaucauuaagacauuuucuaacgggugugauuauguuucaaauaaaggaguggacaccgucagugugggcaacacucuuuacuaugucaauaagcaagaggguaaaagccuguacgugaagggggaaccuauaaucaacuucuaugacccauugguuuuuccguccgaugaguucgacgccucuauuucgcagguuaacgagaaaaucaaucagagccucgcguuuauccggaaguccgaugaacuguuacacaacguaaaugucggaaagucaacgacaaacauuaugauaaccacuaucauuaucgugauuaucguuauacugcuacuccugaucgccgugggccuuuucuuguacugcaaagcacgcaguacccccgucacacugucuaaggaccagcucagcggcauuaauaacaucgcuuucuccaauugaggacuaguguccaccugucccuccugggcugcuggauugucucguuuuccugccaaauaaacaggaucagcgcuuuacagaucuaaaaaaaaaaaaaaaaaaaaaaaaaaaaaaaaaaaaaaaaaaaaaaaaaaaaaaaaaaaaaaaaugcaucccccccccccccccccccccccccccccccaaaggcucuuuucagagccaccagaauu

SEQ ID NO: 16985 - RNA, 1919 nt, Artificial Sequence
  mRNA product Design c-1 comprising derived and/or modified sequence from HRSV(Memphis-37)__AIY60640.1__F_DSCav1_mut5 (opt4)
gggagaguccgcucagccagguugcagaagcggcuuagcguguguccuaaucuucucucugcguguagguaggccugugccgcaaacaagcuuaccauggagcugcccauccugaagaccaacgccaucaccaccauccuggccgccgugacccugugcuucgccagcagccagaacaucaccgaggaguucuaccagagcaccugcagcgccgugagcaagggcuaccugagcgcccugagaaccggcugguacaccagcgugaucaccaucgagcugagcaacaucaaggagaacaagugcaacggcaccgacgccaaggugaagcugaucaagcaggagcuggacaaguacaagaacgccgugaccgagcugcagcugcugaugcagagcacccccgccgccggcagcggcagcgccaucgccagcggcaucgccgugugcaaggugcugcaccuggagggcgaggugaacaagaucaagaacgcccugcugagcaccaacaaggccguggugagccugagcggcugcggcgugagcgugcugaccuucaaggugcuggaccugaagaacuacaucgacaagcagcugcugcccauccugaacaagcagagcugcagcaucagcaacaucgagaccgugaucgaguuccagcagaagaacaacagacugcuggagaucaccagagaguucagcgugaacgccggcgugaccacccccgugagcaccuacaugcugaccaacagcgagcugcugagccugaucaacgacaugcccaucaccaacgaccagaagaagcugaugagcaacaacgugcagaucgugagacagcagagcuacagcaucaugugcaucaucaaggaggaggugcuggccuacguggugcagcugccccuguacggcgugaucgacacccccugcuggaagcugcacaccagcccccugugcaccaccaacaccaaggagggcagcaacaucugccugaccagaaccgacagaggcugguacugcgacaacgccggcagcgugagcuucuucccccaggccgagaccugcaaggugcagagcaacagaguguucugcgacaccaugaacagcagaacccugcccagcgaggugaaccugugcaacaucgacaucuucaaccccaaguacgacugcaagaucaugaccagcaagaccgacgugagcagcagcgugaucaccagccugggcgccaucgugagcugcuacggcaagaccaagugcaccgccagcaacaagugcagaggcaucaucaagaccuucagcaacggcugcgacuacgugagcaacaagggcguggacaccgugagcgugggcaacacccuguacuacgugaacaagcaggagggcaagagccuguacgugaagggcgagcccaucaucaacuucuacgacccccugguguuccccagcgacgaguucgacgccagcaucagccaggugaacgagaagaucaaccagagccuggccuucaucagaaagagcgacgagcugcugcacaacgugaacgugggcaagagcaccaccaacaucaugaucaccaccaucaucaucgugaucaucgugauccugcugcugcugaucgccgugggccuguuccuguacugcaaggccagaagcacccccgugacccugagcaaggaccagcugagcggcaucaacaacaucgccuucagcaacugaggacuaguguccaccugucccuccugggcugcuggauugucucguuuuccugccaaauaaacaggaucagcgcuuuacagaucuaaaaaaaaaaaaaaaaaaaaaaaaaaaaaaaaaaaaaaaaaaaaaaaaaaaaaaaaaaaaaaaaugcaucccccccccccccccccccccccccccccccaaaggcucuuuucagagccaccagaauu

SEQ ID NO: 16986 - RNA, 1919 nt, Artificial Sequence
  mRNA product Design c-1 comprising derived and/or modified sequence from HRSV(Memphis-37)__AIY60640.1__F_DSCav1_mut5 (opt5)
gggagaguccgcucagccagguugcagaagcggcuuagcguguguccuaaucuucucucugcguguagguaggccugugccgcaaacaagcuuaccauggagcugcccauccucaagaccaacgccauuacaacgauccuggcugccgugacccuuugcuucgcgagcucccagaauauuacagaagaguuuuaccaaucuaccuguagcgcugucuccaaaggcuaucugucugcccucagaacagggugguacaccagcguuaucacaauugaacuguccaacaucaaggagaauaaaugcaacggaaccgacgccaaggugaaacuuaucaagcaggaacuggauaaguauaaaaaugcugugacggagcuccagcugcugaugcagucuaccccugccgcuggcagcggguccgccauugcgagcggaaucgccgucuguaaggugcuccaccuggagggcgaaguuaacaaaauuaagaaugcccuucugucuacaaacaaagcuguggucucccucagcgggugcggagugucuguucugaccuucaaggugcuugaccugaagaauuacaucgauaaacaacuccugccgauucugaacaagcaguccuguagcaucucuaauauugagacagucaucgaauuucagcagaaaaacaaucggcuccuggagaucacccgcgaguucuccgugaacgcuggcgugacgacacccgucagcaccuauaugcuuacaaauuccgaacugcucucucugauuaacgacaugccuaucaccaacgaucaaaagaaacuuaugagcaauaacguucagauugugagacagcaguccuacagcaucaugugcauuaucaaggaggaagugcuggccuaugucgugcaacucccccuguacggcguuaucgacaccccuuguuggaaacugcauacaucuccccucugcacgaccaauacaaaggagggguccaacauuugucugacccggacagaucgcggaugguacugcgacaaugcgggcagcgugagcuuuuucccucaggccgaaaccuguaagguccagucuaacagaguguuuugcgauacgaugaacuccagaacacugccgucugagguuaaucucugcaauaucgacauuuucaaccccaaauaugauuguaagaucaugaccagcaaaaccgacguguccagcucugucauuacaucccugggggcuaucgugagcugcuacggaaagaccaaauguacagccucuaauaagugccggggcaucauuaagacguuuuccaacgggugugauuaugucagcaauaaaggaguggacaccguuuccgugggcaacacacuuuacuaugucaauaagcaagagggcaaaucucuguacgugaagggggaaccuaucauuaacuucuaugacccccucguuuuuccuagcgaugaguucgacgcuuccaucucucaggugaacgagaaaauuaaucagagccuggccuuuauccgcaaguccgaugaacugcuccacaacgucaaugugggaaagagcaccacaaacauuaugaucaccacgaucauuaucgugauuaucguuauucugcuucugcucaucgccgucggccuguuccuguacugcaaagcuagaucuacccccgugacacuuuccaaggaccagcucagcgggaucaauaacauugcguucucuaauugaggacuaguguccaccugucccuccugggcugcuggauugucucguuuuccugccaaauaaacaggaucagcgcuuuacagaucuaaaaaaaaaaaaaaaaaaaaaaaaaaaaaaaaaaaaaaaaaaaaaaaaaaaaaaaaaaaaaaaaugcaucccccccccccccccccccccccccccccccaaaggcucuuuucagagccaccagaauu

SEQ ID NO: 16987 - RNA, 1919 nt, Artificial Sequence
  mRNA product Design c-1 comprising derived and/or modified sequence from HRSV(Memphis-37)__AIY60640.1__F_DSCav1_mut5 (opt6)
gggagaguccgcucagccagguugcagaagcggcuuagcguguguccuaaucuucucucugcguguagguaggccugugccgcaaacaagcuuaccauggaacucccaaucuuaaaaacaaacgcaauaacuacaauacucgcagcaguaacacuaugcuucgcaucaucacaaaacauaaccgaagaauuuuaccaaaguacaugcucagcaguaucaaaagguuaccucucagcccuaagaaccggaugguacacaucaguaaucacuauagaacuauccaauauaaaagaaaacaaaugcaacggcacugacgcaaaaguuaaauuaauuaaacaagaacucgauaaauauaaaaaugcaguaacagaacuacaacuacuaaugcaaagcaccccagcugcaggaagcggaucagcaaucgcaucaggaauagcaguauguaaaguacuacaccuagaaggagaagucaacaaaaucaaaaaugcacuacuaaguacaaacaaagcuguaguaagccuaucagguugcggaguaucaguauuaacauuuaaaguccucgaccuaaaaaauuacauagauaaacaacucuuaccaauacucaauaaacaaaguugcagcaucagcaacauagaaacagucaucgaauuucaacaaaaaaauaauagacuccuagaaauaacacgugaauuuucaguaaaugcuggaguaacaacaccaguaucuacauauaugcuaacaaauagcgaacuacucucacuuauuaacgauaugcccauaacaaacgaccaaaaaaaacuuaugucaaacaauguucaaauaguuagacaacaauccuacagcauaaugugcauaaucaaagaagaaguucuagcuuacguaguacaacuaccacucuaugguguuaucgacacccccuguuggaaacuucacacaucaccacuaugcacaacaaacacaaaagaaggaucaaauauuugcuuaacaagaacagauagaggaugguauugcgauaaugccggaucaguaucauuuuuuccacaagcagaaacauguaaaguacaauccaaccgaguauuuugcgacaccaugaacuccagaacacuaccaucugaagucaaccuauguaauauagauauauuuaacccaaaauaugacuguaaaaucaugacaucaaaaacugauguaaguucuaguguaauaaccagcuuaggcgccauaguaagcuguuacgguaaaacaaaaugcacagcaagcaacaaaugccgcgguauaauaaaaacauucucaaacggaugcgauuauguaaguaacaaaggaguagauacagucuccguaggcaacacauuauacuacguaaacaaacaagaaggaaaaucacuauauguaaaaggagaaccaaucauaaauuucuacgacccacuuguauuccccagcgacgaauuugaugcuuccauuucacaagucaacgaaaaaauaaaccaaucauuagccuucauaagaaaaucagacgaauuauuacauaauguuaaugucggcaaauccacaacuaauauaaugauaacaacaaucauaauaguaauaaucguuauacuacuauuacucauagcaguaggacucuucuuauauuguaaagccagauccaccccaguaacacucucaaaagaccaauuaucaggaauuaauaacaucgcauuuucaaacuaaggacuaguguccaccugucccuccugggcugcuggauugucucguuuuccugccaaauaaacaggaucagcgcuuuacagaucuaaaaaaaaaaaaaaaaaaaaaaaaaaaaaaaaaaaaaaaaaaaaaaaaaaaaaaaaaaaaaaaaugcaucccccccccccccccccccccccccccccccaaaggcucuuuucagagccaccagaauu

SEQ ID NO: 16988 - RNA, 1919 nt, Artificial Sequence
  mRNA product Design c-1 comprising derived and/or modified sequence from HRSV(Memphis-37)__AIY60640.1__F_DSCav1_mut5 (opt11)
gggagaguccgcucagccagguugcagaagcggcuuagcguguguccuaaucuucucucugcguguagguaggccugugccgcaaacaagcuuaccauggaacuccccauccuuaaaaccaacgcaaucaccacaauacucgccgccgucacccucugcuuugcguccucccagaacaucaccgaagaguucuaccaaucgaccugcagcgccgucagcaagggcuaccucucagcccuccgaacaggcugguacacauccgucaucaccaucgaacucucaaacauaaaagaaaacaaguguaacggcaccgacgcgaaaguuaaacucaucaaacaagaacucgauaaauacaaaaacgcaguaaccgaacuacaacuccuaaugcaauccacacccgcagccggcagcggcuccgcaaucgccuccggcauagcagucugcaaaguccuccaccucgaaggagaagucaauaaaaucaaaaacgcccuccuauccaccaacaaagcgguugucucccuguccggaugcggaguuagcguccuaaccuucaaggugcucgaccucaaaaacuacauagacaaacaacuacuccccauacucaacaaacaaucaugcuccaucagcaacaucgagaccgucaucgaguuccaacagaaaaacaaccgccuccucgaaaucacacgagaguucuccguaaacgccggcgucacaacccccguuuccacuuacaugcucacaaacagcgaacuccucucccucaucaacgacaugccaaucaccaacgaccaaaagaaacucauguccaacaacguccaaaucguccgccaacaaagcuacagcauaaugugcaucauaaaagaagaaguacucgcguacguaguccaacuaccccuauacggcgucaucgacacccccugcuggaaacugcacacuucuccccucuguacaaccaacacuaaagaaggcucgaacaucugccucaccagaacagaccgaggaugguacugcgacaacgccggcuccgucagcuucuucccccaggccgaaacaugcaaaguacaaucaaaccgagucuucugcgacacaaugaacagcagaacucuacccuccgaaguuaaccuaugcaacaucgacaucuucaaccccaaauacgacugcaaaauaaugaccucaaaaacagacguguccagcuccguuaucaccucucucggagccaucguauccuguuauggaaaaaccaaaugcaccgccucaaacaaaugccgaggcauaaucaaaacauucucaaauggaugcgacuacguauccaacaaaggagucgacaccgucagcgugggcaauacccucuacuacgucaacaaacaggaagggaaaucccucuauguaaagggcgagcccauuauuaacuucuaugacccccucguguucccaagcgacgaguucgacgccuccauaucacaagucaaugagaaaaucaaccaaucacuagcuuucauucgcaaauccgacgaacuccuucacaacgucaacgucggcaaauccaccaccaacaucaugaucaccaccauaauuaucgucauuaucgucauacuacuccuacucaucgccgucggccucuuccucuauugcaaagcacgcucgacacccgucacccuuucaaaagaccaacuuuccggcauaaacaacauagccuucagcaacuagggacuaguguccaccugucccuccugggcugcuggauugucucguuuuccugccaaauaaacaggaucagcgcuuuacagaucuaaaaaaaaaaaaaaaaaaaaaaaaaaaaaaaaaaaaaaaaaaaaaaaaaaaaaaaaaaaaaaaaugcaucccccccccccccccccccccccccccccccaaaggcucuuuucagagccaccagaauu

SEQ ID NO: 16989 - RNA, 2009 nt, Artificial Sequence
  mRNA product Design c-2 comprising derived and/or modified sequence from HRSV(Memphis-37)__AIY60640.1__F_DSCav1_mut5 (opt1)
gggagacuccugucgggcggaaguaggaggaguagaguuuaaaaacaguacucuuuuuccgguucgggacguaguugaagcaacgacaagccggauaaccgcucuugagacaggaagcuuaccauggagcugcccauccucaagaccaacgccaucaccacgauccuggccgcggugacccugugcuucgccagcucccagaacaucaccgaggaguucuaccagagcacgugcuccgccgucagcaagggcuaccucuccgcccugcgcaccgggugguacaccagcgugaucaccaucgagcuguccaacaucaaggagaacaagugcaacggcaccgacgccaaggugaagcucaucaagcaggagcuggacaaguacaagaacgcggucacggagcugcagcuccugaugcagagcaccccggccgccggcuccgggagcgcgaucgccuccggcaucgccgucugcaaggugcugcaccucgagggcgaggugaacaagaucaagaacgcccugcuguccaccaacaaggccgucgugagccucuccggcugcggggugagcguccugaccuucaaggugcuggaccucaagaacuacaucgacaagcagcugcugcccauccugaacaagcagagcugcuccaucagcaacaucgagaccgucaucgaguuccagcagaagaacaaccgccuccuggagaucacgcgggaguucagcgugaacgcgggcgugaccacccccgucuccaccuacaugcugacgaacagcgagcuccugucccugaucaacgacaugccgaucaccaacgaccagaagaagcucaugagcaacaacgugcagaucgugcgccagcaguccuacagcaucaugugcaucaucaaggaggagguccuggccuacguggugcagcugccccucuacggggucaucgacacccccugcuggaagcugcacaccagcccccugugcacgaccaacaccaaggagggcuccaacaucugccucacccggacggaccgcgggugguacugcgacaacgccggcagcguguccuucuucccgcaggccgagaccugcaagguccagagcaaccggguguucugcgacaccaugaacucccggacccugcccagcgaggugaaccucugcaacaucgacaucuucaaccccaaguacgacugcaagaucaugacguccaagaccgacgucagcuccagcgugaucaccucccugggcgccaucgugagcugcuacgggaagaccaagugcacggcgagcaacaagugccgcggcaucaucaagaccuucuccaacgggugcgacuacgucagcaacaagggcguggacaccguguccgucggcaacacccuguacuacgugaacaagcaggagggcaagagccucuacgugaagggggagcccaucaucaacuucuacgacccgcuggucuuccccuccgacgaguucgacgccagcaucucccaggugaacgagaagaucaaccagagccuggccuucauccggaaguccgacgagcuccugcacaacgugaacgucggcaagagcaccacgaacaucaugaucaccaccaucaucaucgugaucaucgugauccugcugcuccugaucgccgucgggcuguuccucuacugcaaggcccgcuccacccccgugacgcugagcaaggaccagcuguccgggaucaacaacaucgcguucagcaacugaggacuaguggaagcauuuuccuggcugauuaaaagaaauuacucagcuauggucaucuguuccuguuagaaggcuaugcagcauauuauauacuaugcgcauguuaugaaaugcauaauaaaaaauuuuaaaaaaucuaaaagaucuaaaaaaaaaaaaaaaaaaaaaaaaaaaaaaaaaaaaaaaaaaaaaaaaaaaaaaaaaaaaaaaaugcaucccccccccccccccccccccccccccccccaaaggcucuuuucagagccaccagaauu

SEQ ID NO: 16990 - RNA, 2009 nt, Artificial Sequence
  mRNA product Design c-2 comprising derived and/or modified sequence from HRSV(Memphis-37)__AIY60640.1__F_DSCav1_mut5 (opt1)
gggagacuccugucgggcggaaguaggaggaguagaguuuaaaaacaguacucuuuuuccgguucgggacguaguugaagcaacgacaagccggauaaccgcucuugagacaggaagcuuaccauggagcugcccauccucaagaccaacgccaucaccacgauccuggccgcggugacccugugcuucgccagcucccagaacaucaccgaggaguucuaccagagcacgugcuccgccgucagcaagggcuaccucuccgcccugcgcaccgggugguacaccagcgugaucaccaucgagcuguccaacaucaaggagaacaagugcaacggcaccgacgccaaggugaagcucaucaagcaggagcuggacaaguacaagaacgcggucacggagcugcagcuccugaugcagagcaccccggccgccggguccggcagcgccaucgcguccgggaucgccgugugcaaggugcugcaccucgagggcgaggucaacaagaucaagaacgcccugcugagcaccaacaaggccguggugucccucagcggcugcggggucuccgugcugaccuucaaggugcuggaccucaagaacuacaucgacaagcagcugcugcccauccucaacaagcagagcugcuccaucagcaacaucgagacggucaucgaguuccagcagaagaacaaccggcugcuggagaucacccgcgaguucuccgugaacgccggcgugaccacccccgucagcacguacaugcucaccaacagcgagcugcugucccucaucaacgacaugcccaucaccaacgaccagaagaagcugaugagcaacaacgugcagaucgugcggcagcaguccuacagcaucaugugcaucaucaaggaggagguccuggcguacguggugcagcucccgcuguacggggucaucgacacccccugcuggaagcugcacacgagcccccucugcaccaccaacaccaaggagggcuccaacaucugccugacgcgcaccgaccgggggugguacugcgacaacgccggcuccgugagcuucuucccccaggccgagaccugcaaggugcaguccaaccgcgucuucugcgacaccaugaacagccggacgcucccguccgaggugaaccugugcaacaucgacaucuucaaccccaaguacgacugcaagaucaugaccagcaagaccgacgucuccagcuccgugaucaccagccugggcgccaucguguccugcuacgggaagacgaagugcaccgccagcaacaagugccggggcaucaucaagaccuucuccaacgggugcgacuacgucagcaacaagggcguggacaccgugagcgucggcaacacgcucuacuacgugaacaagcaggaggggaagucccuguacgugaagggcgagcccaucaucaacuucuacgacccccuggucuucccgagcgacgaguucgacgcguccaucagccaggugaacgagaagaucaaccagucccucgccuucauccgcaagagcgacgagcugcugcacaacgugaacgucgggaaguccaccaccaacaucaugaucaccaccaucaucaucgugaucaucgugauccuccugcugcucaucgccgucggccuguuccuguacugcaaggcccggagcacgcccgugacccuguccaaggaccagcucagcgggaucaacaacaucgccuucuccaacugaggacuaguggaagcauuuuccuggcugauuaaaagaaauuacucagcuauggucaucuguuccuguuagaaggcuaugcagcauauuauauacuaugcgcauguuaugaaaugcauaauaaaaaauuuuaaaaaaucuaaaagaucuaaaaaaaaaaaaaaaaaaaaaaaaaaaaaaaaaaaaaaaaaaaaaaaaaaaaaaaaaaaaaaaaugcaucccccccccccccccccccccccccccccccaaaggcucuuuucagagccaccagaauu

SEQ ID NO: 16991 - RNA, 2009 nt, Artificial Sequence
  mRNA product Design c-2 comprising derived and/or modified sequence from HRSV(Memphis-37)__AIY60640.1__F_DSCav1_mut5 (opt2)
gggagacuccugucgggcggaaguaggaggaguagaguuuaaaaacaguacucuuuuuccgguucgggacguaguugaagcaacgacaagccggauaaccgcucuugagacaggaagcuuaccauggagcuccccauccucaagaccaacgccaucaccaccauccucgccgccgucacccucugcuucgccuccucccagaacaucaccgaggaguucuaccaguccaccugcuccgccgucuccaagggcuaccucuccgcccuccgcaccggcugguacaccuccgucaucaccaucgagcucuccaacaucaaggagaacaagugcaacggcaccgacgccaaggucaagcucaucaagcaggagcucgacaaguacaagaacgccgucaccgagcuccagcuccucaugcaguccacccccgccgccggcuccggcuccgccaucgccuccggcaucgccgucugcaagguccuccaccucgagggcgaggucaacaagaucaagaacgcccuccucuccaccaacaaggccgucgucucccucuccggcugcggcgucuccguccucaccuucaagguccucgaccucaagaacuacaucgacaagcagcuccuccccauccucaacaagcaguccugcuccaucuccaacaucgagaccgucaucgaguuccagcagaagaacaaccgccuccucgagaucacccgcgaguucuccgucaacgccggcgucaccacccccgucuccaccuacaugcucaccaacuccgagcuccucucccucaucaacgacaugcccaucaccaacgaccagaagaagcucauguccaacaacguccagaucguccgccagcaguccuacuccaucaugugcaucaucaaggaggagguccucgccuacgucguccagcucccccucuacggcgucaucgacacccccugcuggaagcuccacaccuccccccucugcaccaccaacaccaaggagggcuccaacaucugccucacccgcaccgaccgcggcugguacugcgacaacgccggcuccgucuccuucuucccccaggccgagaccugcaagguccaguccaaccgcgucuucugcgacaccaugaacucccgcacccuccccuccgaggucaaccucugcaacaucgacaucuucaaccccaaguacgacugcaagaucaugaccuccaagaccgacgucuccuccuccgucaucaccucccucggcgccaucgucuccugcuacggcaagaccaagugcaccgccuccaacaagugccgcggcaucaucaagaccuucuccaacggcugcgacuacgucuccaacaagggcgucgacaccgucuccgucggcaacacccucuacuacgucaacaagcaggagggcaagucccucuacgucaagggcgagcccaucaucaacuucuacgacccccucgucuuccccuccgacgaguucgacgccuccaucucccaggucaacgagaagaucaaccagucccucgccuucauccgcaaguccgacgagcuccuccacaacgucaacgucggcaaguccaccaccaacaucaugaucaccaccaucaucaucgucaucaucgucauccuccuccuccucaucgccgucggccucuuccucuacugcaaggcccgcuccacccccgucacccucuccaaggaccagcucuccggcaucaacaacaucgccuucuccaacugaggacuaguggaagcauuuuccuggcugauuaaaagaaauuacucagcuauggucaucuguuccuguuagaaggcuaugcagcauauuauauacuaugcgcauguuaugaaaugcauaauaaaaaauuuuaaaaaaucuaaaagaucuaaaaaaaaaaaaaaaaaaaaaaaaaaaaaaaaaaaaaaaaaaaaaaaaaaaaaaaaaaaaaaaaugcaucccccccccccccccccccccccccccccccaaaggcucuuuucagagccaccagaauu

SEQ ID NO: 16992 - RNA, 2009 nt, Artificial Sequence
  mRNA product Design c-2 comprising derived and/or modified sequence from HRSV(Memphis-37)__AIY60640.1__F_DSCav1_mut5 (opt3)
gggagacuccugucgggcggaaguaggaggaguagaguuuaaaaacaguacucuuuuuccgguucgggacguaguugaagcaacgacaagccggauaaccgcucuugagacaggaagcuuaccauggagcugcccauccucaagaccaacgccauuacaacuauacuugcugcagugacgcugugcuucgccagcucccagaauaucaccgaagaguuuuaccaaucuacauguucagcggucaguaaaggcuauuugagcgcuuuaagaacugggugguacaccuccguuauuacaaucgaacugucuaacauuaaggagaauaaaugcaacggaaccgacgccaaggugaaacuaaucaagcaggaacucgauaaguauaaaaaugcaguaacugagcugcagcuucugaugcagucgaccccugccgcugguucaggcagcgcaauagccagugggaucgcuguguguaaggucuugcaccucgagggagaagugaacaaaauuaagaaugcccugcuguccacaaacaaagcgguugugucucucagcggcugcggugucuccguguuaacguucaagguacuggaccuuaagaauuacaucgauaaacaauugcugccaauucuaaacaagcagucauguaguaucagcaauauagagacuguuauugaauuucagcagaaaaacaauaggcuccuggagaucacccgggaguucucugugaacgcaggggucacaacuccgguguccaccuauaugcuuacaaauucagaacuguugagccucauuaacgacaugcccaucaccaacgaucaaaagaaacugaugaguaauaacgugcagaucguccgccagcagucuuacuccauuaugugcauaaucaaggaggaaguuuuagccuaugugguacaacugccucucuacggagugauugacacgccauguuggaaacuucauacuagcccccugugcacaaccaauacuaaggagggcucgaacaucuguuugacacgaaccgaucguggcugguacugcgacaaugcugggucugucuccuuuuucccucaggccgaaacguguaaggugcagucaaacagaguguuuugcgauaccaugaauaguagaacacugccaagcgaggugaaccucugcaauauagacauuuucaaccccaaauaugauuguaagaucaugacuuccaaaaccgacgucucuagcucagugaucacaagucugggagcaauuguauccugcuacgguaagacuaaauguaccgcuagcaauaagugcaggggcaucauuaagacauuuucuaacgggugugauuauguuucaaauaaaggaguggacaccgucagugugggcaacacucuuuacuaugucaauaagcaagaggguaaaagccuguacgugaagggggaaccuauaaucaacuucuaugacccauugguuuuuccguccgaugaguucgacgccucuauuucgcagguuaacgagaaaaucaaucagagccucgcguuuauccggaaguccgaugaacuguuacacaacguaaaugucggaaagucaacgacaaacauuaugauaaccacuaucauuaucgugauuaucguuauacugcuacuccugaucgccgugggccuuuucuuguacugcaaagcacgcaguacccccgucacacugucuaaggaccagcucagcggcauuaauaacaucgcuuucuccaauugaggacuaguggaagcauuuuccuggcugauuaaaagaaauuacucagcuauggucaucuguuccuguuagaaggcuaugcagcauauuauauacuaugcgcauguuaugaaaugcauaauaaaaaauuuuaaaaaaucuaaaagaucuaaaaaaaaaaaaaaaaaaaaaaaaaaaaaaaaaaaaaaaaaaaaaaaaaaaaaaaaaaaaaaaaugcaucccccccccccccccccccccccccccccccaaaggcucuuuucagagccaccagaauu

SEQ ID NO: 16993 - RNA, 2009 nt, Artificial Sequence
  mRNA product Design c-2 comprising derived and/or modified sequence from HRSV(Memphis-37)__AIY60640.1__F_DSCav1_mut5 (opt4)
gggagacuccugucgggcggaaguaggaggaguagaguuuaaaaacaguacucuuuuuccgguucgggacguaguugaagcaacgacaagccggauaaccgcucuugagacaggaagcuuaccauggagcugcccauccugaagaccaacgccaucaccaccauccuggccgccgugacccugugcuucgccagcagccagaacaucaccgaggaguucuaccagagcaccugcagcgccgugagcaagggcuaccugagcgcccugagaaccggcugguacaccagcgugaucaccaucgagcugagcaacaucaaggagaacaagugcaacggcaccgacgccaaggugaagcugaucaagcaggagcuggacaaguacaagaacgccgugaccgagcugcagcugcugaugcagagcacccccgccgccggcagcggcagcgccaucgccagcggcaucgccgugugcaaggugcugcaccuggagggcgaggugaacaagaucaagaacgcccugcugagcaccaacaaggccguggugagccugagcggcugcggcgugagcgugcugaccuucaaggugcuggaccugaagaacuacaucgacaagcagcugcugcccauccugaacaagcagagcugcagcaucagcaacaucgagaccgugaucgaguuccagcagaagaacaacagacugcuggagaucaccagagaguucagcgugaacgccggcgugaccacccccgugagcaccuacaugcugaccaacagcgagcugcugagccugaucaacgacaugcccaucaccaacgaccagaagaagcugaugagcaacaacgugcagaucgugagacagcagagcuacagcaucaugugcaucaucaaggaggaggugcuggccuacguggugcagcugccccuguacggcgugaucgacacccccugcuggaagcugcacaccagcccccugugcaccaccaacaccaaggagggcagcaacaucugccugaccagaaccgacagaggcugguacugcgacaacgccggcagcgugagcuucuucccccaggccgagaccugcaaggugcagagcaacagaguguucugcgacaccaugaacagcagaacccugcccagcgaggugaaccugugcaacaucgacaucuucaaccccaaguacgacugcaagaucaugaccagcaagaccgacgugagcagcagcgugaucaccagccugggcgccaucgugagcugcuacggcaagaccaagugcaccgccagcaacaagugcagaggcaucaucaagaccuucagcaacggcugcgacuacgugagcaacaagggcguggacaccgugagcgugggcaacacccuguacuacgugaacaagcaggagggcaagagccuguacgugaagggcgagcccaucaucaacuucuacgacccccugguguuccccagcgacgaguucgacgccagcaucagccaggugaacgagaagaucaaccagagccuggccuucaucagaaagagcgacgagcugcugcacaacgugaacgugggcaagagcaccaccaacaucaugaucaccaccaucaucaucgugaucaucgugauccugcugcugcugaucgccgugggccuguuccuguacugcaaggccagaagcacccccgugacccugagcaaggaccagcugagcggcaucaacaacaucgccuucagcaacugaggacuaguggaagcauuuuccuggcugauuaaaagaaauuacucagcuauggucaucuguuccuguuagaaggcuaugcagcauauuauauacuaugcgcauguuaugaaaugcauaauaaaaaauuuuaaaaaaucuaaaagaucuaaaaaaaaaaaaaaaaaaaaaaaaaaaaaaaaaaaaaaaaaaaaaaaaaaaaaaaaaaaaaaaaugcaucccccccccccccccccccccccccccccccaaaggcucuuuucagagccaccagaauu

SEQ ID NO: 16994 - RNA, 2009 nt, Artificial Sequence
  mRNA product Design c-2 comprising derived and/or modified sequence from HRSV(Memphis-37)__AIY60640.1__F_DSCav1_mut5 (opt5)
gggagacuccugucgggcggaaguaggaggaguagaguuuaaaaacaguacucuuuuuccgguucgggacguaguugaagcaacgacaagccggauaaccgcucuugagacaggaagcuuaccauggagcugcccauccucaagaccaacgccauuacaacgauccuggcugccgugacccuuugcuucgcgagcucccagaauauuacagaagaguuuuaccaaucuaccuguagcgcugucuccaaaggcuaucugucugcccucagaacagggugguacaccagcguuaucacaauugaacuguccaacaucaaggagaauaaaugcaacggaaccgacgccaaggugaaacuuaucaagcaggaacuggauaaguauaaaaaugcugugacggagcuccagcugcugaugcagucuaccccugccgcuggcagcggguccgccauugcgagcggaaucgccgucuguaaggugcuccaccuggagggcgaaguuaacaaaauuaagaaugcccuucugucuacaaacaaagcuguggucucccucagcgggugcggagugucuguucugaccuucaaggugcuugaccugaagaauuacaucgauaaacaacuccugccgauucugaacaagcaguccuguagcaucucuaauauugagacagucaucgaauuucagcagaaaaacaaucggcuccuggagaucacccgcgaguucuccgugaacgcuggcgugacgacacccgucagcaccuauaugcuuacaaauuccgaacugcucucucugauuaacgacaugccuaucaccaacgaucaaaagaaacuuaugagcaauaacguucagauugugagacagcaguccuacagcaucaugugcauuaucaaggaggaagugcuggccuaugucgugcaacucccccuguacggcguuaucgacaccccuuguuggaaacugcauacaucuccccucugcacgaccaauacaaaggagggguccaacauuugucugacccggacagaucgcggaugguacugcgacaaugcgggcagcgugagcuuuuucccucaggccgaaaccuguaagguccagucuaacagaguguuuugcgauacgaugaacuccagaacacugccgucugagguuaaucucugcaauaucgacauuuucaaccccaaauaugauuguaagaucaugaccagcaaaaccgacguguccagcucugucauuacaucccugggggcuaucgugagcugcuacggaaagaccaaauguacagccucuaauaagugccggggcaucauuaagacguuuuccaacgggugugauuaugucagcaauaaaggaguggacaccguuuccgugggcaacacacuuuacuaugucaauaagcaagagggcaaaucucuguacgugaagggggaaccuaucauuaacuucuaugacccccucguuuuuccuagcgaugaguucgacgcuuccaucucucaggugaacgagaaaauuaaucagagccuggccuuuauccgcaaguccgaugaacugcuccacaacgucaaugugggaaagagcaccacaaacauuaugaucaccacgaucauuaucgugauuaucguuauucugcuucugcucaucgccgucggccuguuccuguacugcaaagcuagaucuacccccgugacacuuuccaaggaccagcucagcgggaucaauaacauugcguucucuaauugaggacuaguggaagcauuuuccuggcugauuaaaagaaauuacucagcuauggucaucuguuccuguuagaaggcuaugcagcauauuauauacuaugcgcauguuaugaaaugcauaauaaaaaauuuuaaaaaaucuaaaagaucuaaaaaaaaaaaaaaaaaaaaaaaaaaaaaaaaaaaaaaaaaaaaaaaaaaaaaaaaaaaaaaaaugcaucccccccccccccccccccccccccccccccaaaggcucuuuucagagccaccagaauu

SEQ ID NO: 16995 - RNA, 2009 nt, Artificial Sequence
  mRNA product Design c-2 comprising derived and/or modified sequence from HRSV(Memphis-37)__AIY60640.1__F_DSCav1_mut5 (opt6)
gggagacuccugucgggcggaaguaggaggaguagaguuuaaaaacaguacucuuuuuccgguucgggacguaguugaagcaacgacaagccggauaaccgcucuugagacaggaagcuuaccauggaacucccaaucuuaaaaacaaacgcaauaacuacaauacucgcagcaguaacacuaugcuucgcaucaucacaaaacauaaccgaagaauuuuaccaaaguacaugcucagcaguaucaaaagguuaccucucagcccuaagaaccggaugguacacaucaguaaucacuauagaacuauccaauauaaaagaaaacaaaugcaacggcacugacgcaaaaguuaaauuaauuaaacaagaacucgauaaauauaaaaaugcaguaacagaacuacaacuacuaaugcaaagcaccccagcugcaggaagcggaucagcaaucgcaucaggaauagcaguauguaaaguacuacaccuagaaggagaagucaacaaaaucaaaaaugcacuacuaaguacaaacaaagcuguaguaagccuaucagguugcggaguaucaguauuaacauuuaaaguccucgaccuaaaaaauuacauagauaaacaacucuuaccaauacucaauaaacaaaguugcagcaucagcaacauagaaacagucaucgaauuucaacaaaaaaauaauagacuccuagaaauaacacgugaauuuucaguaaaugcuggaguaacaacaccaguaucuacauauaugcuaacaaauagcgaacuacucucacuuauuaacgauaugcccauaacaaacgaccaaaaaaaacuuaugucaaacaauguucaaauaguuagacaacaauccuacagcauaaugugcauaaucaaagaagaaguucuagcuuacguaguacaacuaccacucuaugguguuaucgacacccccuguuggaaacuucacacaucaccacuaugcacaacaaacacaaaagaaggaucaaauauuugcuuaacaagaacagauagaggaugguauugcgauaaugccggaucaguaucauuuuuuccacaagcagaaacauguaaaguacaauccaaccgaguauuuugcgacaccaugaacuccagaacacuaccaucugaagucaaccuauguaauauagauauauuuaacccaaaauaugacuguaaaaucaugacaucaaaaacugauguaaguucuaguguaauaaccagcuuaggcgccauaguaagcuguuacgguaaaacaaaaugcacagcaagcaacaaaugccgcgguauaauaaaaacauucucaaacggaugcgauuauguaaguaacaaaggaguagauacagucuccguaggcaacacauuauacuacguaaacaaacaagaaggaaaaucacuauauguaaaaggagaaccaaucauaaauuucuacgacccacuuguauuccccagcgacgaauuugaugcuuccauuucacaagucaacgaaaaaauaaaccaaucauuagccuucauaagaaaaucagacgaauuauuacauaauguuaaugucggcaaauccacaacuaauauaaugauaacaacaaucauaauaguaauaaucguuauacuacuauuacucauagcaguaggacucuucuuauauuguaaagccagauccaccccaguaacacucucaaaagaccaauuaucaggaauuaauaacaucgcauuuucaaacuaaggacuaguggaagcauuuuccuggcugauuaaaagaaauuacucagcuauggucaucuguuccuguuagaaggcuaugcagcauauuauauacuaugcgcauguuaugaaaugcauaauaaaaaauuuuaaaaaaucuaaaagaucuaaaaaaaaaaaaaaaaaaaaaaaaaaaaaaaaaaaaaaaaaaaaaaaaaaaaaaaaaaaaaaaaugcaucccccccccccccccccccccccccccccccaaaggcucuuuucagagccaccagaauu

SEQ ID NO: 16996 - RNA, 2009 nt, Artificial Sequence
  mRNA product Design c-2 comprising derived and/or modified sequence from HRSV(Memphis-37)__AIY60640.1__F_DSCav1_mut5 (opt11)
gggagacuccugucgggcggaaguaggaggaguagaguuuaaaaacaguacucuuuuuccgguucgggacguaguugaagcaacgacaagccggauaaccgcucuugagacaggaagcuuaccauggaacuccccauccuuaaaaccaacgcaaucaccacaauacucgccgccgucacccucugcuuugcguccucccagaacaucaccgaagaguucuaccaaucgaccugcagcgccgucagcaagggcuaccucucagcccuccgaacaggcugguacacauccgucaucaccaucgaacucucaaacauaaaagaaaacaaguguaacggcaccgacgcgaaaguuaaacucaucaaacaagaacucgauaaauacaaaaacgcaguaaccgaacuacaacuccuaaugcaauccacacccgcagccggcagcggcuccgcaaucgccuccggcauagcagucugcaaaguccuccaccucgaaggagaagucaauaaaaucaaaaacgcccuccuauccaccaacaaagcgguugucucccuguccggaugcggaguuagcguccuaaccuucaaggugcucgaccucaaaaacuacauagacaaacaacuacuccccauacucaacaaacaaucaugcuccaucagcaacaucgagaccgucaucgaguuccaacagaaaaacaaccgccuccucgaaaucacacgagaguucuccguaaacgccggcgucacaacccccguuuccacuuacaugcucacaaacagcgaacuccucucccucaucaacgacaugccaaucaccaacgaccaaaagaaacucauguccaacaacguccaaaucguccgccaacaaagcuacagcauaaugugcaucauaaaagaagaaguacucgcguacguaguccaacuaccccuauacggcgucaucgacacccccugcuggaaacugcacacuucuccccucuguacaaccaacacuaaagaaggcucgaacaucugccucaccagaacagaccgaggaugguacugcgacaacgccggcuccgucagcuucuucccccaggccgaaacaugcaaaguacaaucaaaccgagucuucugcgacacaaugaacagcagaacucuacccuccgaaguuaaccuaugcaacaucgacaucuucaaccccaaauacgacugcaaaauaaugaccucaaaaacagacguguccagcuccguuaucaccucucucggagccaucguauccuguuauggaaaaaccaaaugcaccgccucaaacaaaugccgaggcauaaucaaaacauucucaaauggaugcgacuacguauccaacaaaggagucgacaccgucagcgugggcaauacccucuacuacgucaacaaacaggaagggaaaucccucuauguaaagggcgagcccauuauuaacuucuaugacccccucguguucccaagcgacgaguucgacgccuccauaucacaagucaaugagaaaaucaaccaaucacuagcuuucauucgcaaauccgacgaacuccuucacaacgucaacgucggcaaauccaccaccaacaucaugaucaccaccauaauuaucgucauuaucgucauacuacuccuacucaucgccgucggccucuuccucuauugcaaagcacgcucgacacccgucacccuuucaaaagaccaacuuuccggcauaaacaacauagccuucagcaacuagggacuaguggaagcauuuuccuggcugauuaaaagaaauuacucagcuauggucaucuguuccuguuagaaggcuaugcagcauauuauauacuaugcgcauguuaugaaaugcauaauaaaaaauuuuaaaaaaucuaaaagaucuaaaaaaaaaaaaaaaaaaaaaaaaaaaaaaaaaaaaaaaaaaaaaaaaaaaaaaaaaaaaaaaaugcaucccccccccccccccccccccccccccccccaaaggcucuuuucagagccaccagaauu

SEQ ID NO: 16997 - RNA, 1986 nt, Artificial Sequence
  mRNA product Design c-3 comprising derived and/or modified sequence from HRSV(Memphis-37)__AIY60640.1__F_DSCav1_mut5 (opt1)
gggagaguccgcucagccagguugcagaagcggcuuagcguguguccuaaucuucucucugcguguagguaggccugugccgcaaacaagcuuaccauggagcugcccauccucaagaccaacgccaucaccacgauccuggccgcggugacccugugcuucgccagcucccagaacaucaccgaggaguucuaccagagcacgugcuccgccgucagcaagggcuaccucuccgcccugcgcaccgggugguacaccagcgugaucaccaucgagcuguccaacaucaaggagaacaagugcaacggcaccgacgccaaggugaagcucaucaagcaggagcuggacaaguacaagaacgcggucacggagcugcagcuccugaugcagagcaccccggccgccggcuccgggagcgcgaucgccuccggcaucgccgucugcaaggugcugcaccucgagggcgaggugaacaagaucaagaacgcccugcuguccaccaacaaggccgucgugagccucuccggcugcggggugagcguccugaccuucaaggugcuggaccucaagaacuacaucgacaagcagcugcugcccauccugaacaagcagagcugcuccaucagcaacaucgagaccgucaucgaguuccagcagaagaacaaccgccuccuggagaucacgcgggaguucagcgugaacgcgggcgugaccacccccgucuccaccuacaugcugacgaacagcgagcuccugucccugaucaacgacaugccgaucaccaacgaccagaagaagcucaugagcaacaacgugcagaucgugcgccagcaguccuacagcaucaugugcaucaucaaggaggagguccuggccuacguggugcagcugccccucuacggggucaucgacacccccugcuggaagcugcacaccagcccccugugcacgaccaacaccaaggagggcuccaacaucugccucacccggacggaccgcgggugguacugcgacaacgccggcagcguguccuucuucccgcaggccgagaccugcaagguccagagcaaccggguguucugcgacaccaugaacucccggacccugcccagcgaggugaaccucugcaacaucgacaucuucaaccccaaguacgacugcaagaucaugacguccaagaccgacgucagcuccagcgugaucaccucccugggcgccaucgugagcugcuacgggaagaccaagugcacggcgagcaacaagugccgcggcaucaucaagaccuucuccaacgggugcgacuacgucagcaacaagggcguggacaccguguccgucggcaacacccuguacuacgugaacaagcaggagggcaagagccucuacgugaagggggagcccaucaucaacuucuacgacccgcuggucuuccccuccgacgaguucgacgccagcaucucccaggugaacgagaagaucaaccagagccuggccuucauccggaaguccgacgagcuccugcacaacgugaacgucggcaagagcaccacgaacaucaugaucaccaccaucaucaucgugaucaucgugauccugcugcuccugaucgccgucgggcuguuccucuacugcaaggcccgcuccacccccgugacgcugagcaaggaccagcuguccgggaucaacaacaucgcguucagcaacugaggacuaguacuggcugcaucucccuuuccucuguccuccauccuucucccaggauggugaagggggaccugguacccagugauccccaccccaggauccuaaaucaugacuuaccugcuaauaaaaacucauuggaaaagugagaagaucuaaaaaaaaaaaaaaaaaaaaaaaaaaaaaaaaaaaaaaaaaaaaaaaaaaaaaaaaaaaaaaaaugcaucccccccccccccccccccccccccccccccaaaggcucuuuucagagccaccagaauu

SEQ ID NO: 16998 - RNA, 1986 nt, Artificial Sequence
  mRNA product Design c-3 comprising derived and/or modified sequence from HRSV(Memphis-37)__AIY60640.1__F_DSCav1_mut5 (opt1)
gggagaguccgcucagccagguugcagaagcggcuuagcguguguccuaaucuucucucugcguguagguaggccugugccgcaaacaagcuuaccauggagcugcccauccucaagaccaacgccaucaccacgauccuggccgcggugacccugugcuucgccagcucccagaacaucaccgaggaguucuaccagagcacgugcuccgccgucagcaagggcuaccucuccgcccugcgcaccgggugguacaccagcgugaucaccaucgagcuguccaacaucaaggagaacaagugcaacggcaccgacgccaaggugaagcucaucaagcaggagcuggacaaguacaagaacgcggucacggagcugcagcuccugaugcagagcaccccggccgccggguccggcagcgccaucgcguccgggaucgccgugugcaaggugcugcaccucgagggcgaggucaacaagaucaagaacgcccugcugagcaccaacaaggccguggugucccucagcggcugcggggucuccgugcugaccuucaaggugcuggaccucaagaacuacaucgacaagcagcugcugcccauccucaacaagcagagcugcuccaucagcaacaucgagacggucaucgaguuccagcagaagaacaaccggcugcuggagaucacccgcgaguucuccgugaacgccggcgugaccacccccgucagcacguacaugcucaccaacagcgagcugcugucccucaucaacgacaugcccaucaccaacgaccagaagaagcugaugagcaacaacgugcagaucgugcggcagcaguccuacagcaucaugugcaucaucaaggaggagguccuggcguacguggugcagcucccgcuguacggggucaucgacacccccugcuggaagcugcacacgagcccccucugcaccaccaacaccaaggagggcuccaacaucugccugacgcgcaccgaccgggggugguacugcgacaacgccggcuccgugagcuucuucccccaggccgagaccugcaaggugcaguccaaccgcgucuucugcgacaccaugaacagccggacgcucccguccgaggugaaccugugcaacaucgacaucuucaaccccaaguacgacugcaagaucaugaccagcaagaccgacgucuccagcuccgugaucaccagccugggcgccaucguguccugcuacgggaagacgaagugcaccgccagcaacaagugccggggcaucaucaagaccuucuccaacgggugcgacuacgucagcaacaagggcguggacaccgugagcgucggcaacacgcucuacuacgugaacaagcaggaggggaagucccuguacgugaagggcgagcccaucaucaacuucuacgacccccuggucuucccgagcgacgaguucgacgcguccaucagccaggugaacgagaagaucaaccagucccucgccuucauccgcaagagcgacgagcugcugcacaacgugaacgucgggaaguccaccaccaacaucaugaucaccaccaucaucaucgugaucaucgugauccuccugcugcucaucgccgucggccuguuccuguacugcaaggcccggagcacgcccgugacccuguccaaggaccagcucagcgggaucaacaacaucgccuucuccaacugaggacuaguacuggcugcaucucccuuuccucuguccuccauccuucucccaggauggugaagggggaccugguacccagugauccccaccccaggauccuaaaucaugacuuaccugcuaauaaaaacucauuggaaaagugagaagaucuaaaaaaaaaaaaaaaaaaaaaaaaaaaaaaaaaaaaaaaaaaaaaaaaaaaaaaaaaaaaaaaaugcaucccccccccccccccccccccccccccccccaaaggcucuuuucagagccaccagaauu

SEQ ID NO: 16999 - RNA, 1986 nt, Artificial Sequence
  mRNA product Design c-3 comprising derived and/or modified sequence from HRSV(Memphis-37)__AIY60640.1__F_DSCav1_mut5 (opt2)
gggagaguccgcucagccagguugcagaagcggcuuagcguguguccuaaucuucucucugcguguagguaggccugugccgcaaacaagcuuaccauggagcuccccauccucaagaccaacgccaucaccaccauccucgccgccgucacccucugcuucgccuccucccagaacaucaccgaggaguucuaccaguccaccugcuccgccgucuccaagggcuaccucuccgcccuccgcaccggcugguacaccuccgucaucaccaucgagcucuccaacaucaaggagaacaagugcaacggcaccgacgccaaggucaagcucaucaagcaggagcucgacaaguacaagaacgccgucaccgagcuccagcuccucaugcaguccacccccgccgccggcuccggcuccgccaucgccuccggcaucgccgucugcaagguccuccaccucgagggcgaggucaacaagaucaagaacgcccuccucuccaccaacaaggccgucgucucccucuccggcugcggcgucuccguccucaccuucaagguccucgaccucaagaacuacaucgacaagcagcuccuccccauccucaacaagcaguccugcuccaucuccaacaucgagaccgucaucgaguuccagcagaagaacaaccgccuccucgagaucacccgcgaguucuccgucaacgccggcgucaccacccccgucuccaccuacaugcucaccaacuccgagcuccucucccucaucaacgacaugcccaucaccaacgaccagaagaagcucauguccaacaacguccagaucguccgccagcaguccuacuccaucaugugcaucaucaaggaggagguccucgccuacgucguccagcucccccucuacggcgucaucgacacccccugcuggaagcuccacaccuccccccucugcaccaccaacaccaaggagggcuccaacaucugccucacccgcaccgaccgcggcugguacugcgacaacgccggcuccgucuccuucuucccccaggccgagaccugcaagguccaguccaaccgcgucuucugcgacaccaugaacucccgcacccuccccuccgaggucaaccucugcaacaucgacaucuucaaccccaaguacgacugcaagaucaugaccuccaagaccgacgucuccuccuccgucaucaccucccucggcgccaucgucuccugcuacggcaagaccaagugcaccgccuccaacaagugccgcggcaucaucaagaccuucuccaacggcugcgacuacgucuccaacaagggcgucgacaccgucuccgucggcaacacccucuacuacgucaacaagcaggagggcaagucccucuacgucaagggcgagcccaucaucaacuucuacgacccccucgucuuccccuccgacgaguucgacgccuccaucucccaggucaacgagaagaucaaccagucccucgccuucauccgcaaguccgacgagcuccuccacaacgucaacgucggcaaguccaccaccaacaucaugaucaccaccaucaucaucgucaucaucgucauccuccuccuccucaucgccgucggccucuuccucuacugcaaggcccgcuccacccccgucacccucuccaaggaccagcucuccggcaucaacaacaucgccuucuccaacugaggacuaguacuggcugcaucucccuuuccucuguccuccauccuucucccaggauggugaagggggaccugguacccagugauccccaccccaggauccuaaaucaugacuuaccugcuaauaaaaacucauuggaaaagugagaagaucuaaaaaaaaaaaaaaaaaaaaaaaaaaaaaaaaaaaaaaaaaaaaaaaaaaaaaaaaaaaaaaaaugcaucccccccccccccccccccccccccccccccaaaggcucuuuucagagccaccagaauu

SEQ ID NO: 17000 - RNA, 1986 nt, Artificial Sequence
  mRNA product Design c-3 comprising derived and/or modified sequence from HRSV(Memphis-37)__AIY60640.1__F_DSCav1_mut5 (opt3)
gggagaguccgcucagccagguugcagaagcggcuuagcguguguccuaaucuucucucugcguguagguaggccugugccgcaaacaagcuuaccauggagcugcccauccucaagaccaacgccauuacaacuauacuugcugcagugacgcugugcuucgccagcucccagaauaucaccgaagaguuuuaccaaucuacauguucagcggucaguaaaggcuauuugagcgcuuuaagaacugggugguacaccuccguuauuacaaucgaacugucuaacauuaaggagaauaaaugcaacggaaccgacgccaaggugaaacuaaucaagcaggaacucgauaaguauaaaaaugcaguaacugagcugcagcuucugaugcagucgaccccugccgcugguucaggcagcgcaauagccagugggaucgcuguguguaaggucuugcaccucgagggagaagugaacaaaauuaagaaugcccugcuguccacaaacaaagcgguugugucucucagcggcugcggugucuccguguuaacguucaagguacuggaccuuaagaauuacaucgauaaacaauugcugccaauucuaaacaagcagucauguaguaucagcaauauagagacuguuauugaauuucagcagaaaaacaauaggcuccuggagaucacccgggaguucucugugaacgcaggggucacaacuccgguguccaccuauaugcuuacaaauucagaacuguugagccucauuaacgacaugcccaucaccaacgaucaaaagaaacugaugaguaauaacgugcagaucguccgccagcagucuuacuccauuaugugcauaaucaaggaggaaguuuuagccuaugugguacaacugccucucuacggagugauugacacgccauguuggaaacuucauacuagcccccugugcacaaccaauacuaaggagggcucgaacaucuguuugacacgaaccgaucguggcugguacugcgacaaugcugggucugucuccuuuuucccucaggccgaaacguguaaggugcagucaaacagaguguuuugcgauaccaugaauaguagaacacugccaagcgaggugaaccucugcaauauagacauuuucaaccccaaauaugauuguaagaucaugacuuccaaaaccgacgucucuagcucagugaucacaagucugggagcaauuguauccugcuacgguaagacuaaauguaccgcuagcaauaagugcaggggcaucauuaagacauuuucuaacgggugugauuauguuucaaauaaaggaguggacaccgucagugugggcaacacucuuuacuaugucaauaagcaagaggguaaaagccuguacgugaagggggaaccuauaaucaacuucuaugacccauugguuuuuccguccgaugaguucgacgccucuauuucgcagguuaacgagaaaaucaaucagagccucgcguuuauccggaaguccgaugaacuguuacacaacguaaaugucggaaagucaacgacaaacauuaugauaaccacuaucauuaucgugauuaucguuauacugcuacuccugaucgccgugggccuuuucuuguacugcaaagcacgcaguacccccgucacacugucuaaggaccagcucagcggcauuaauaacaucgcuuucuccaauugaggacuaguacuggcugcaucucccuuuccucuguccuccauccuucucccaggauggugaagggggaccugguacccagugauccccaccccaggauccuaaaucaugacuuaccugcuaauaaaaacucauuggaaaagugagaagaucuaaaaaaaaaaaaaaaaaaaaaaaaaaaaaaaaaaaaaaaaaaaaaaaaaaaaaaaaaaaaaaaaugcaucccccccccccccccccccccccccccccccaaaggcucuuuucagagccaccagaauu

SEQ ID NO: 17001 - RNA, 1986 nt, Artificial Sequence
  mRNA product Design c-3 comprising derived and/or modified sequence from HRSV(Memphis-37)__AIY60640.1__F_DSCav1_mut5 (opt4)
gggagaguccgcucagccagguugcagaagcggcuuagcguguguccuaaucuucucucugcguguagguaggccugugccgcaaacaagcuuaccauggagcugcccauccugaagaccaacgccaucaccaccauccuggccgccgugacccugugcuucgccagcagccagaacaucaccgaggaguucuaccagagcaccugcagcgccgugagcaagggcuaccugagcgcccugagaaccggcugguacaccagcgugaucaccaucgagcugagcaacaucaaggagaacaagugcaacggcaccgacgccaaggugaagcugaucaagcaggagcuggacaaguacaagaacgccgugaccgagcugcagcugcugaugcagagcacccccgccgccggcagcggcagcgccaucgccagcggcaucgccgugugcaaggugcugcaccuggagggcgaggugaacaagaucaagaacgcccugcugagcaccaacaaggccguggugagccugagcggcugcggcgugagcgugcugaccuucaaggugcuggaccugaagaacuacaucgacaagcagcugcugcccauccugaacaagcagagcugcagcaucagcaacaucgagaccgugaucgaguuccagcagaagaacaacagacugcuggagaucaccagagaguucagcgugaacgccggcgugaccacccccgugagcaccuacaugcugaccaacagcgagcugcugagccugaucaacgacaugcccaucaccaacgaccagaagaagcugaugagcaacaacgugcagaucgugagacagcagagcuacagcaucaugugcaucaucaaggaggaggugcuggccuacguggugcagcugccccuguacggcgugaucgacacccccugcuggaagcugcacaccagcccccugugcaccaccaacaccaaggagggcagcaacaucugccugaccagaaccgacagaggcugguacugcgacaacgccggcagcgugagcuucuucccccaggccgagaccugcaaggugcagagcaacagaguguucugcgacaccaugaacagcagaacccugcccagcgaggugaaccugugcaacaucgacaucuucaaccccaaguacgacugcaagaucaugaccagcaagaccgacgugagcagcagcgugaucaccagccugggcgccaucgugagcugcuacggcaagaccaagugcaccgccagcaacaagugcagaggcaucaucaagaccuucagcaacggcugcgacuacgugagcaacaagggcguggacaccgugagcgugggcaacacccuguacuacgugaacaagcaggagggcaagagccuguacgugaagggcgagcccaucaucaacuucuacgacccccugguguuccccagcgacgaguucgacgccagcaucagccaggugaacgagaagaucaaccagagccuggccuucaucagaaagagcgacgagcugcugcacaacgugaacgugggcaagagcaccaccaacaucaugaucaccaccaucaucaucgugaucaucgugauccugcugcugcugaucgccgugggccuguuccuguacugcaaggccagaagcacccccgugacccugagcaaggaccagcugagcggcaucaacaacaucgccuucagcaacugaggacuaguacuggcugcaucucccuuuccucuguccuccauccuucucccaggauggugaagggggaccugguacccagugauccccaccccaggauccuaaaucaugacuuaccugcuaauaaaaacucauuggaaaagugagaagaucuaaaaaaaaaaaaaaaaaaaaaaaaaaaaaaaaaaaaaaaaaaaaaaaaaaaaaaaaaaaaaaaaugcaucccccccccccccccccccccccccccccccaaaggcucuuuucagagccaccagaauu

SEQ ID NO: 17002 - RNA, 1986 nt, Artificial Sequence
  mRNA product Design c-3 comprising derived and/or modified sequence from HRSV(Memphis-37)__AIY60640.1__F_DSCav1_mut5 (opt5)
gggagaguccgcucagccagguugcagaagcggcuuagcguguguccuaaucuucucucugcguguagguaggccugugccgcaaacaagcuuaccauggagcugcccauccucaagaccaacgccauuacaacgauccuggcugccgugacccuuugcuucgcgagcucccagaauauuacagaagaguuuuaccaaucuaccuguagcgcugucuccaaaggcuaucugucugcccucagaacagggugguacaccagcguuaucacaauugaacuguccaacaucaaggagaauaaaugcaacggaaccgacgccaaggugaaacuuaucaagcaggaacuggauaaguauaaaaaugcugugacggagcuccagcugcugaugcagucuaccccugccgcuggcagcggguccgccauugcgagcggaaucgccgucuguaaggugcuccaccuggagggcgaaguuaacaaaauuaagaaugcccuucugucuacaaacaaagcuguggucucccucagcgggugcggagugucuguucugaccuucaaggugcuugaccugaagaauuacaucgauaaacaacuccugccgauucugaacaagcaguccuguagcaucucuaauauugagacagucaucgaauuucagcagaaaaacaaucggcuccuggagaucacccgcgaguucuccgugaacgcuggcgugacgacacccgucagcaccuauaugcuuacaaauuccgaacugcucucucugauuaacgacaugccuaucaccaacgaucaaaagaaacuuaugagcaauaacguucagauugugagacagcaguccuacagcaucaugugcauuaucaaggaggaagugcuggccuaugucgugcaacucccccuguacggcguuaucgacaccccuuguuggaaacugcauacaucuccccucugcacgaccaauacaaaggagggguccaacauuugucugacccggacagaucgcggaugguacugcgacaaugcgggcagcgugagcuuuuucccucaggccgaaaccuguaagguccagucuaacagaguguuuugcgauacgaugaacuccagaacacugccgucugagguuaaucucugcaauaucgacauuuucaaccccaaauaugauuguaagaucaugaccagcaaaaccgacguguccagcucugucauuacaucccugggggcuaucgugagcugcuacggaaagaccaaauguacagccucuaauaagugccggggcaucauuaagacguuuuccaacgggugugauuaugucagcaauaaaggaguggacaccguuuccgugggcaacacacuuuacuaugucaauaagcaagagggcaaaucucuguacgugaagggggaaccuaucauuaacuucuaugacccccucguuuuuccuagcgaugaguucgacgcuuccaucucucaggugaacgagaaaauuaaucagagccuggccuuuauccgcaaguccgaugaacugcuccacaacgucaaugugggaaagagcaccacaaacauuaugaucaccacgaucauuaucgugauuaucguuauucugcuucugcucaucgccgucggccuguuccuguacugcaaagcuagaucuacccccgugacacuuuccaaggaccagcucagcgggaucaauaacauugcguucucuaauugaggacuaguacuggcugcaucucccuuuccucuguccuccauccuucucccaggauggugaagggggaccugguacccagugauccccaccccaggauccuaaaucaugacuuaccugcuaauaaaaacucauuggaaaagugagaagaucuaaaaaaaaaaaaaaaaaaaaaaaaaaaaaaaaaaaaaaaaaaaaaaaaaaaaaaaaaaaaaaaaugcaucccccccccccccccccccccccccccccccaaaggcucuuuucagagccaccagaauu

SEQ ID NO: 17003 - RNA, 1986 nt, Artificial Sequence
  mRNA product Design c-3 comprising derived and/or modified sequence from HRSV(Memphis-37)__AIY60640.1__F_DSCav1_mut5 (opt6)
gggagaguccgcucagccagguugcagaagcggcuuagcguguguccuaaucuucucucugcguguagguaggccugugccgcaaacaagcuuaccauggaacucccaaucuuaaaaacaaacgcaauaacuacaauacucgcagcaguaacacuaugcuucgcaucaucacaaaacauaaccgaagaauuuuaccaaaguacaugcucagcaguaucaaaagguuaccucucagcccuaagaaccggaugguacacaucaguaaucacuauagaacuauccaauauaaaagaaaacaaaugcaacggcacugacgcaaaaguuaaauuaauuaaacaagaacucgauaaauauaaaaaugcaguaacagaacuacaacuacuaaugcaaagcaccccagcugcaggaagcggaucagcaaucgcaucaggaauagcaguauguaaaguacuacaccuagaaggagaagucaacaaaaucaaaaaugcacuacuaaguacaaacaaagcuguaguaagccuaucagguugcggaguaucaguauuaacauuuaaaguccucgaccuaaaaaauuacauagauaaacaacucuuaccaauacucaauaaacaaaguugcagcaucagcaacauagaaacagucaucgaauuucaacaaaaaaauaauagacuccuagaaauaacacgugaauuuucaguaaaugcuggaguaacaacaccaguaucuacauauaugcuaacaaauagcgaacuacucucacuuauuaacgauaugcccauaacaaacgaccaaaaaaaacuuaugucaaacaauguucaaauaguuagacaacaauccuacagcauaaugugcauaaucaaagaagaaguucuagcuuacguaguacaacuaccacucuaugguguuaucgacacccccuguuggaaacuucacacaucaccacuaugcacaacaaacacaaaagaaggaucaaauauuugcuuaacaagaacagauagaggaugguauugcgauaaugccggaucaguaucauuuuuuccacaagcagaaacauguaaaguacaauccaaccgaguauuuugcgacaccaugaacuccagaacacuaccaucugaagucaaccuauguaauauagauauauuuaacccaaaauaugacuguaaaaucaugacaucaaaaacugauguaaguucuaguguaauaaccagcuuaggcgccauaguaagcuguuacgguaaaacaaaaugcacagcaagcaacaaaugccgcgguauaauaaaaacauucucaaacggaugcgauuauguaaguaacaaaggaguagauacagucuccguaggcaacacauuauacuacguaaacaaacaagaaggaaaaucacuauauguaaaaggagaaccaaucauaaauuucuacgacccacuuguauuccccagcgacgaauuugaugcuuccauuucacaagucaacgaaaaaauaaaccaaucauuagccuucauaagaaaaucagacgaauuauuacauaauguuaaugucggcaaauccacaacuaauauaaugauaacaacaaucauaauaguaauaaucguuauacuacuauuacucauagcaguaggacucuucuuauauuguaaagccagauccaccccaguaacacucucaaaagaccaauuaucaggaauuaauaacaucgcauuuucaaacuaaggacuaguacuggcugcaucucccuuuccucuguccuccauccuucucccaggauggugaagggggaccugguacccagugauccccaccccaggauccuaaaucaugacuuaccugcuaauaaaaacucauuggaaaagugagaagaucuaaaaaaaaaaaaaaaaaaaaaaaaaaaaaaaaaaaaaaaaaaaaaaaaaaaaaaaaaaaaaaaaugcaucccccccccccccccccccccccccccccccaaaggcucuuuucagagccaccagaauu

SEQ ID NO: 17004 - RNA, 1986 nt, Artificial Sequence
  mRNA product Design c-3 comprising derived and/or modified sequence from HRSV(Memphis-37)__AIY60640.1__F_DSCav1_mut5 (opt11)
gggagaguccgcucagccagguugcagaagcggcuuagcguguguccuaaucuucucucugcguguagguaggccugugccgcaaacaagcuuaccauggaacuccccauccuuaaaaccaacgcaaucaccacaauacucgccgccgucacccucugcuuugcguccucccagaacaucaccgaagaguucuaccaaucgaccugcagcgccgucagcaagggcuaccucucagcccuccgaacaggcugguacacauccgucaucaccaucgaacucucaaacauaaaagaaaacaaguguaacggcaccgacgcgaaaguuaaacucaucaaacaagaacucgauaaauacaaaaacgcaguaaccgaacuacaacuccuaaugcaauccacacccgcagccggcagcggcuccgcaaucgccuccggcauagcagucugcaaaguccuccaccucgaaggagaagucaauaaaaucaaaaacgcccuccuauccaccaacaaagcgguugucucccuguccggaugcggaguuagcguccuaaccuucaaggugcucgaccucaaaaacuacauagacaaacaacuacuccccauacucaacaaacaaucaugcuccaucagcaacaucgagaccgucaucgaguuccaacagaaaaacaaccgccuccucgaaaucacacgagaguucuccguaaacgccggcgucacaacccccguuuccacuuacaugcucacaaacagcgaacuccucucccucaucaacgacaugccaaucaccaacgaccaaaagaaacucauguccaacaacguccaaaucguccgccaacaaagcuacagcauaaugugcaucauaaaagaagaaguacucgcguacguaguccaacuaccccuauacggcgucaucgacacccccugcuggaaacugcacacuucuccccucuguacaaccaacacuaaagaaggcucgaacaucugccucaccagaacagaccgaggaugguacugcgacaacgccggcuccgucagcuucuucccccaggccgaaacaugcaaaguacaaucaaaccgagucuucugcgacacaaugaacagcagaacucuacccuccgaaguuaaccuaugcaacaucgacaucuucaaccccaaauacgacugcaaaauaaugaccucaaaaacagacguguccagcuccguuaucaccucucucggagccaucguauccuguuauggaaaaaccaaaugcaccgccucaaacaaaugccgaggcauaaucaaaacauucucaaauggaugcgacuacguauccaacaaaggagucgacaccgucagcgugggcaauacccucuacuacgucaacaaacaggaagggaaaucccucuauguaaagggcgagcccauuauuaacuucuaugacccccucguguucccaagcgacgaguucgacgccuccauaucacaagucaaugagaaaaucaaccaaucacuagcuuucauucgcaaauccgacgaacuccuucacaacgucaacgucggcaaauccaccaccaacaucaugaucaccaccauaauuaucgucauuaucgucauacuacuccuacucaucgccgucggccucuuccucuauugcaaagcacgcucgacacccgucacccuuucaaaagaccaacuuuccggcauaaacaacauagccuucagcaacuagggacuaguacuggcugcaucucccuuuccucuguccuccauccuucucccaggauggugaagggggaccugguacccagugauccccaccccaggauccuaaaucaugacuuaccugcuaauaaaaacucauuggaaaagugagaagaucuaaaaaaaaaaaaaaaaaaaaaaaaaaaaaaaaaaaaaaaaaaaaaaaaaaaaaaaaaaaaaaaaugcaucccccccccccccccccccccccccccccccaaaggcucuuuucagagccaccagaauu

SEQ ID NO: 17005 - RNA, 1982 nt, Artificial Sequence
  mRNA product Design c-4 comprising derived and/or modified sequence from HRSV(Memphis-37)__AIY60640.1__F_DSCav1_mut5 (opt1)
gggagaguccgcucagccagguugcagaagcggcuuagcguguguccuaaucuucucucugcguguagguaggccugugccgcaaacaagcuuaccauggagcugcccauccucaagaccaacgccaucaccacgauccuggccgcggugacccugugcuucgccagcucccagaacaucaccgaggaguucuaccagagcacgugcuccgccgucagcaagggcuaccucuccgcccugcgcaccgggugguacaccagcgugaucaccaucgagcuguccaacaucaaggagaacaagugcaacggcaccgacgccaaggugaagcucaucaagcaggagcuggacaaguacaagaacgcggucacggagcugcagcuccugaugcagagcaccccggccgccggcuccgggagcgcgaucgccuccggcaucgccgucugcaaggugcugcaccucgagggcgaggugaacaagaucaagaacgcccugcuguccaccaacaaggccgucgugagccucuccggcugcggggugagcguccugaccuucaaggugcuggaccucaagaacuacaucgacaagcagcugcugcccauccugaacaagcagagcugcuccaucagcaacaucgagaccgucaucgaguuccagcagaagaacaaccgccuccuggagaucacgcgggaguucagcgugaacgcgggcgugaccacccccgucuccaccuacaugcugacgaacagcgagcuccugucccugaucaacgacaugccgaucaccaacgaccagaagaagcucaugagcaacaacgugcagaucgugcgccagcaguccuacagcaucaugugcaucaucaaggaggagguccuggccuacguggugcagcugccccucuacggggucaucgacacccccugcuggaagcugcacaccagcccccugugcacgaccaacaccaaggagggcuccaacaucugccucacccggacggaccgcgggugguacugcgacaacgccggcagcguguccuucuucccgcaggccgagaccugcaagguccagagcaaccggguguucugcgacaccaugaacucccggacccugcccagcgaggugaaccucugcaacaucgacaucuucaaccccaaguacgacugcaagaucaugacguccaagaccgacgucagcuccagcgugaucaccucccugggcgccaucgugagcugcuacgggaagaccaagugcacggcgagcaacaagugccgcggcaucaucaagaccuucuccaacgggugcgacuacgucagcaacaagggcguggacaccguguccgucggcaacacccuguacuacgugaacaagcaggagggcaagagccucuacgugaagggggagcccaucaucaacuucuacgacccgcuggucuuccccuccgacgaguucgacgccagcaucucccaggugaacgagaagaucaaccagagccuggccuucauccggaaguccgacgagcuccugcacaacgugaacgucggcaagagcaccacgaacaucaugaucaccaccaucaucaucgugaucaucgugauccugcugcuccugaucgccgucgggcuguuccucuacugcaaggcccgcuccacccccgugacgcugagcaaggaccagcuguccgggaucaacaacaucgcguucagcaacugaggacuaguggaagcauuuuccuggcugauuaaaagaaauuacucagcuauggucaucuguuccuguuagaaggcuaugcagcauauuauauacuaugcgcauguuaugaaaugcauaauaaaaaauuuuaaaaaaucuaaaagaucuaaaaaaaaaaaaaaaaaaaaaaaaaaaaaaaaaaaaaaaaaaaaaaaaaaaaaaaaaaaaaaaaugcaucccccccccccccccccccccccccccccccaaaggcucuuuucagagccaccagaauu

SEQ ID NO: 17006 - RNA, 1982 nt, Artificial Sequence
  mRNA product Design c-4 comprising derived and/or modified sequence from HRSV(Memphis-37)__AIY60640.1__F_DSCav1_mut5 (opt1)
gggagaguccgcucagccagguugcagaagcggcuuagcguguguccuaaucuucucucugcguguagguaggccugugccgcaaacaagcuuaccauggagcugcccauccucaagaccaacgccaucaccacgauccuggccgcggugacccugugcuucgccagcucccagaacaucaccgaggaguucuaccagagcacgugcuccgccgucagcaagggcuaccucuccgcccugcgcaccgggugguacaccagcgugaucaccaucgagcuguccaacaucaaggagaacaagugcaacggcaccgacgccaaggugaagcucaucaagcaggagcuggacaaguacaagaacgcggucacggagcugcagcuccugaugcagagcaccccggccgccggguccggcagcgccaucgcguccgggaucgccgugugcaaggugcugcaccucgagggcgaggucaacaagaucaagaacgcccugcugagcaccaacaaggccguggugucccucagcggcugcggggucuccgugcugaccuucaaggugcuggaccucaagaacuacaucgacaagcagcugcugcccauccucaacaagcagagcugcuccaucagcaacaucgagacggucaucgaguuccagcagaagaacaaccggcugcuggagaucacccgcgaguucuccgugaacgccggcgugaccacccccgucagcacguacaugcucaccaacagcgagcugcugucccucaucaacgacaugcccaucaccaacgaccagaagaagcugaugagcaacaacgugcagaucgugcggcagcaguccuacagcaucaugugcaucaucaaggaggagguccuggcguacguggugcagcucccgcuguacggggucaucgacacccccugcuggaagcugcacacgagcccccucugcaccaccaacaccaaggagggcuccaacaucugccugacgcgcaccgaccgggggugguacugcgacaacgccggcuccgugagcuucuucccccaggccgagaccugcaaggugcaguccaaccgcgucuucugcgacaccaugaacagccggacgcucccguccgaggugaaccugugcaacaucgacaucuucaaccccaaguacgacugcaagaucaugaccagcaagaccgacgucuccagcuccgugaucaccagccugggcgccaucguguccugcuacgggaagacgaagugcaccgccagcaacaagugccggggcaucaucaagaccuucuccaacgggugcgacuacgucagcaacaagggcguggacaccgugagcgucggcaacacgcucuacuacgugaacaagcaggaggggaagucccuguacgugaagggcgagcccaucaucaacuucuacgacccccuggucuucccgagcgacgaguucgacgcguccaucagccaggugaacgagaagaucaaccagucccucgccuucauccgcaagagcgacgagcugcugcacaacgugaacgucgggaaguccaccaccaacaucaugaucaccaccaucaucaucgugaucaucgugauccuccugcugcucaucgccgucggccuguuccuguacugcaaggcccggagcacgcccgugacccuguccaaggaccagcucagcgggaucaacaacaucgccuucuccaacugaggacuaguggaagcauuuuccuggcugauuaaaagaaauuacucagcuauggucaucuguuccuguuagaaggcuaugcagcauauuauauacuaugcgcauguuaugaaaugcauaauaaaaaauuuuaaaaaaucuaaaagaucuaaaaaaaaaaaaaaaaaaaaaaaaaaaaaaaaaaaaaaaaaaaaaaaaaaaaaaaaaaaaaaaaugcaucccccccccccccccccccccccccccccccaaaggcucuuuucagagccaccagaauu

SEQ ID NO: 17007 - RNA, 1982 nt, Artificial Sequence
  mRNA product Design c-4 comprising derived and/or modified sequence from HRSV(Memphis-37)__AIY60640.1__F_DSCav1_mut5 (opt2)
gggagaguccgcucagccagguugcagaagcggcuuagcguguguccuaaucuucucucugcguguagguaggccugugccgcaaacaagcuuaccauggagcuccccauccucaagaccaacgccaucaccaccauccucgccgccgucacccucugcuucgccuccucccagaacaucaccgaggaguucuaccaguccaccugcuccgccgucuccaagggcuaccucuccgcccuccgcaccggcugguacaccuccgucaucaccaucgagcucuccaacaucaaggagaacaagugcaacggcaccgacgccaaggucaagcucaucaagcaggagcucgacaaguacaagaacgccgucaccgagcuccagcuccucaugcaguccacccccgccgccggcuccggcuccgccaucgccuccggcaucgccgucugcaagguccuccaccucgagggcgaggucaacaagaucaagaacgcccuccucuccaccaacaaggccgucgucucccucuccggcugcggcgucuccguccucaccuucaagguccucgaccucaagaacuacaucgacaagcagcuccuccccauccucaacaagcaguccugcuccaucuccaacaucgagaccgucaucgaguuccagcagaagaacaaccgccuccucgagaucacccgcgaguucuccgucaacgccggcgucaccacccccgucuccaccuacaugcucaccaacuccgagcuccucucccucaucaacgacaugcccaucaccaacgaccagaagaagcucauguccaacaacguccagaucguccgccagcaguccuacuccaucaugugcaucaucaaggaggagguccucgccuacgucguccagcucccccucuacggcgucaucgacacccccugcuggaagcuccacaccuccccccucugcaccaccaacaccaaggagggcuccaacaucugccucacccgcaccgaccgcggcugguacugcgacaacgccggcuccgucuccuucuucccccaggccgagaccugcaagguccaguccaaccgcgucuucugcgacaccaugaacucccgcacccuccccuccgaggucaaccucugcaacaucgacaucuucaaccccaaguacgacugcaagaucaugaccuccaagaccgacgucuccuccuccgucaucaccucccucggcgccaucgucuccugcuacggcaagaccaagugcaccgccuccaacaagugccgcggcaucaucaagaccuucuccaacggcugcgacuacgucuccaacaagggcgucgacaccgucuccgucggcaacacccucuacuacgucaacaagcaggagggcaagucccucuacgucaagggcgagcccaucaucaacuucuacgacccccucgucuuccccuccgacgaguucgacgccuccaucucccaggucaacgagaagaucaaccagucccucgccuucauccgcaaguccgacgagcuccuccacaacgucaacgucggcaaguccaccaccaacaucaugaucaccaccaucaucaucgucaucaucgucauccuccuccuccucaucgccgucggccucuuccucuacugcaaggcccgcuccacccccgucacccucuccaaggaccagcucuccggcaucaacaacaucgccuucuccaacugaggacuaguggaagcauuuuccuggcugauuaaaagaaauuacucagcuauggucaucuguuccuguuagaaggcuaugcagcauauuauauacuaugcgcauguuaugaaaugcauaauaaaaaauuuuaaaaaaucuaaaagaucuaaaaaaaaaaaaaaaaaaaaaaaaaaaaaaaaaaaaaaaaaaaaaaaaaaaaaaaaaaaaaaaaugcaucccccccccccccccccccccccccccccccaaaggcucuuuucagagccaccagaauu

SEQ ID NO: 17008 - RNA, 1982 nt, Artificial Sequence
  mRNA product Design c-4 comprising derived and/or modified sequence from HRSV(Memphis-37)__AIY60640.1__F_DSCav1_mut5 (opt3)
gggagaguccgcucagccagguugcagaagcggcuuagcguguguccuaaucuucucucugcguguagguaggccugugccgcaaacaagcuuaccauggagcugcccauccucaagaccaacgccauuacaacuauacuugcugcagugacgcugugcuucgccagcucccagaauaucaccgaagaguuuuaccaaucuacauguucagcggucaguaaaggcuauuugagcgcuuuaagaacugggugguacaccuccguuauuacaaucgaacugucuaacauuaaggagaauaaaugcaacggaaccgacgccaaggugaaacuaaucaagcaggaacucgauaaguauaaaaaugcaguaacugagcugcagcuucugaugcagucgaccccugccgcugguucaggcagcgcaauagccagugggaucgcuguguguaaggucuugcaccucgagggagaagugaacaaaauuaagaaugcccugcuguccacaaacaaagcgguugugucucucagcggcugcggugucuccguguuaacguucaagguacuggaccuuaagaauuacaucgauaaacaauugcugccaauucuaaacaagcagucauguaguaucagcaauauagagacuguuauugaauuucagcagaaaaacaauaggcuccuggagaucacccgggaguucucugugaacgcaggggucacaacuccgguguccaccuauaugcuuacaaauucagaacuguugagccucauuaacgacaugcccaucaccaacgaucaaaagaaacugaugaguaauaacgugcagaucguccgccagcagucuuacuccauuaugugcauaaucaaggaggaaguuuuagccuaugugguacaacugccucucuacggagugauugacacgccauguuggaaacuucauacuagcccccugugcacaaccaauacuaaggagggcucgaacaucuguuugacacgaaccgaucguggcugguacugcgacaaugcugggucugucuccuuuuucccucaggccgaaacguguaaggugcagucaaacagaguguuuugcgauaccaugaauaguagaacacugccaagcgaggugaaccucugcaauauagacauuuucaaccccaaauaugauuguaagaucaugacuuccaaaaccgacgucucuagcucagugaucacaagucugggagcaauuguauccugcuacgguaagacuaaauguaccgcuagcaauaagugcaggggcaucauuaagacauuuucuaacgggugugauuauguuucaaauaaaggaguggacaccgucagugugggcaacacucuuuacuaugucaauaagcaagaggguaaaagccuguacgugaagggggaaccuauaaucaacuucuaugacccauugguuuuuccguccgaugaguucgacgccucuauuucgcagguuaacgagaaaaucaaucagagccucgcguuuauccggaaguccgaugaacuguuacacaacguaaaugucggaaagucaacgacaaacauuaugauaaccacuaucauuaucgugauuaucguuauacugcuacuccugaucgccgugggccuuuucuuguacugcaaagcacgcaguacccccgucacacugucuaaggaccagcucagcggcauuaauaacaucgcuuucuccaauugaggacuaguggaagcauuuuccuggcugauuaaaagaaauuacucagcuauggucaucuguuccuguuagaaggcuaugcagcauauuauauacuaugcgcauguuaugaaaugcauaauaaaaaauuuuaaaaaaucuaaaagaucuaaaaaaaaaaaaaaaaaaaaaaaaaaaaaaaaaaaaaaaaaaaaaaaaaaaaaaaaaaaaaaaaugcaucccccccccccccccccccccccccccccccaaaggcucuuuucagagccaccagaauu

SEQ ID NO: 17009 - RNA, 1982 nt, Artificial Sequence
  mRNA product Design c-4 comprising derived and/or modified sequence from HRSV(Memphis-37)__AIY60640.1__F_DSCav1_mut5 (opt4)
gggagaguccgcucagccagguugcagaagcggcuuagcguguguccuaaucuucucucugcguguagguaggccugugccgcaaacaagcuuaccauggagcugcccauccugaagaccaacgccaucaccaccauccuggccgccgugacccugugcuucgccagcagccagaacaucaccgaggaguucuaccagagcaccugcagcgccgugagcaagggcuaccugagcgcccugagaaccggcugguacaccagcgugaucaccaucgagcugagcaacaucaaggagaacaagugcaacggcaccgacgccaaggugaagcugaucaagcaggagcuggacaaguacaagaacgccgugaccgagcugcagcugcugaugcagagcacccccgccgccggcagcggcagcgccaucgccagcggcaucgccgugugcaaggugcugcaccuggagggcgaggugaacaagaucaagaacgcccugcugagcaccaacaaggccguggugagccugagcggcugcggcgugagcgugcugaccuucaaggugcuggaccugaagaacuacaucgacaagcagcugcugcccauccugaacaagcagagcugcagcaucagcaacaucgagaccgugaucgaguuccagcagaagaacaacagacugcuggagaucaccagagaguucagcgugaacgccggcgugaccacccccgugagcaccuacaugcugaccaacagcgagcugcugagccugaucaacgacaugcccaucaccaacgaccagaagaagcugaugagcaacaacgugcagaucgugagacagcagagcuacagcaucaugugcaucaucaaggaggaggugcuggccuacguggugcagcugccccuguacggcgugaucgacacccccugcuggaagcugcacaccagcccccugugcaccaccaacaccaaggagggcagcaacaucugccugaccagaaccgacagaggcugguacugcgacaacgccggcagcgugagcuucuucccccaggccgagaccugcaaggugcagagcaacagaguguucugcgacaccaugaacagcagaacccugcccagcgaggugaaccugugcaacaucgacaucuucaaccccaaguacgacugcaagaucaugaccagcaagaccgacgugagcagcagcgugaucaccagccugggcgccaucgugagcugcuacggcaagaccaagugcaccgccagcaacaagugcagaggcaucaucaagaccuucagcaacggcugcgacuacgugagcaacaagggcguggacaccgugagcgugggcaacacccuguacuacgugaacaagcaggagggcaagagccuguacgugaagggcgagcccaucaucaacuucuacgacccccugguguuccccagcgacgaguucgacgccagcaucagccaggugaacgagaagaucaaccagagccuggccuucaucagaaagagcgacgagcugcugcacaacgugaacgugggcaagagcaccaccaacaucaugaucaccaccaucaucaucgugaucaucgugauccugcugcugcugaucgccgugggccuguuccuguacugcaaggccagaagcacccccgugacccugagcaaggaccagcugagcggcaucaacaacaucgccuucagcaacugaggacuaguggaagcauuuuccuggcugauuaaaagaaauuacucagcuauggucaucuguuccuguuagaaggcuaugcagcauauuauauacuaugcgcauguuaugaaaugcauaauaaaaaauuuuaaaaaaucuaaaagaucuaaaaaaaaaaaaaaaaaaaaaaaaaaaaaaaaaaaaaaaaaaaaaaaaaaaaaaaaaaaaaaaaugcaucccccccccccccccccccccccccccccccaaaggcucuuuucagagccaccagaauu

SEQ ID NO: 17010 - RNA, 1982 nt, Artificial Sequence
  mRNA product Design c-4 comprising derived and/or modified sequence from HRSV(Memphis-37)__AIY60640.1__F_DSCav1_mut5 (opt5)
gggagaguccgcucagccagguugcagaagcggcuuagcguguguccuaaucuucucucugcguguagguaggccugugccgcaaacaagcuuaccauggagcugcccauccucaagaccaacgccauuacaacgauccuggcugccgugacccuuugcuucgcgagcucccagaauauuacagaagaguuuuaccaaucuaccuguagcgcugucuccaaaggcuaucugucugcccucagaacagggugguacaccagcguuaucacaauugaacuguccaacaucaaggagaauaaaugcaacggaaccgacgccaaggugaaacuuaucaagcaggaacuggauaaguauaaaaaugcugugacggagcuccagcugcugaugcagucuaccccugccgcuggcagcggguccgccauugcgagcggaaucgccgucuguaaggugcuccaccuggagggcgaaguuaacaaaauuaagaaugcccuucugucuacaaacaaagcuguggucucccucagcgggugcggagugucuguucugaccuucaaggugcuugaccugaagaauuacaucgauaaacaacuccugccgauucugaacaagcaguccuguagcaucucuaauauugagacagucaucgaauuucagcagaaaaacaaucggcuccuggagaucacccgcgaguucuccgugaacgcuggcgugacgacacccgucagcaccuauaugcuuacaaauuccgaacugcucucucugauuaacgacaugccuaucaccaacgaucaaaagaaacuuaugagcaauaacguucagauugugagacagcaguccuacagcaucaugugcauuaucaaggaggaagugcuggccuaugucgugcaacucccccuguacggcguuaucgacaccccuuguuggaaacugcauacaucuccccucugcacgaccaauacaaaggagggguccaacauuugucugacccggacagaucgcggaugguacugcgacaaugcgggcagcgugagcuuuuucccucaggccgaaaccuguaagguccagucuaacagaguguuuugcgauacgaugaacuccagaacacugccgucugagguuaaucucugcaauaucgacauuuucaaccccaaauaugauuguaagaucaugaccagcaaaaccgacguguccagcucugucauuacaucccugggggcuaucgugagcugcuacggaaagaccaaauguacagccucuaauaagugccggggcaucauuaagacguuuuccaacgggugugauuaugucagcaauaaaggaguggacaccguuuccgugggcaacacacuuuacuaugucaauaagcaagagggcaaaucucuguacgugaagggggaaccuaucauuaacuucuaugacccccucguuuuuccuagcgaugaguucgacgcuuccaucucucaggugaacgagaaaauuaaucagagccuggccuuuauccgcaaguccgaugaacugcuccacaacgucaaugugggaaagagcaccacaaacauuaugaucaccacgaucauuaucgugauuaucguuauucugcuucugcucaucgccgucggccuguuccuguacugcaaagcuagaucuacccccgugacacuuuccaaggaccagcucagcgggaucaauaacauugcguucucuaauugaggacuaguggaagcauuuuccuggcugauuaaaagaaauuacucagcuauggucaucuguuccuguuagaaggcuaugcagcauauuauauacuaugcgcauguuaugaaaugcauaauaaaaaauuuuaaaaaaucuaaaagaucuaaaaaaaaaaaaaaaaaaaaaaaaaaaaaaaaaaaaaaaaaaaaaaaaaaaaaaaaaaaaaaaaugcaucccccccccccccccccccccccccccccccaaaggcucuuuucagagccaccagaauu

SEQ ID NO: 17011 - RNA, 1982 nt, Artificial Sequence
  mRNA product Design c-4 comprising derived and/or modified sequence from HRSV(Memphis-37)__AIY60640.1__F_DSCav1_mut5 (opt6)
gggagaguccgcucagccagguugcagaagcggcuuagcguguguccuaaucuucucucugcguguagguaggccugugccgcaaacaagcuuaccauggaacucccaaucuuaaaaacaaacgcaauaacuacaauacucgcagcaguaacacuaugcuucgcaucaucacaaaacauaaccgaagaauuuuaccaaaguacaugcucagcaguaucaaaagguuaccucucagcccuaagaaccggaugguacacaucaguaaucacuauagaacuauccaauauaaaagaaaacaaaugcaacggcacugacgcaaaaguuaaauuaauuaaacaagaacucgauaaauauaaaaaugcaguaacagaacuacaacuacuaaugcaaagcaccccagcugcaggaagcggaucagcaaucgcaucaggaauagcaguauguaaaguacuacaccuagaaggagaagucaacaaaaucaaaaaugcacuacuaaguacaaacaaagcuguaguaagccuaucagguugcggaguaucaguauuaacauuuaaaguccucgaccuaaaaaauuacauagauaaacaacucuuaccaauacucaauaaacaaaguugcagcaucagcaacauagaaacagucaucgaauuucaacaaaaaaauaauagacuccuagaaauaacacgugaauuuucaguaaaugcuggaguaacaacaccaguaucuacauauaugcuaacaaauagcgaacuacucucacuuauuaacgauaugcccauaacaaacgaccaaaaaaaacuuaugucaaacaauguucaaauaguuagacaacaauccuacagcauaaugugcauaaucaaagaagaaguucuagcuuacguaguacaacuaccacucuaugguguuaucgacacccccuguuggaaacuucacacaucaccacuaugcacaacaaacacaaaagaaggaucaaauauuugcuuaacaagaacagauagaggaugguauugcgauaaugccggaucaguaucauuuuuuccacaagcagaaacauguaaaguacaauccaaccgaguauuuugcgacaccaugaacuccagaacacuaccaucugaagucaaccuauguaauauagauauauuuaacccaaaauaugacuguaaaaucaugacaucaaaaacugauguaaguucuaguguaauaaccagcuuaggcgccauaguaagcuguuacgguaaaacaaaaugcacagcaagcaacaaaugccgcgguauaauaaaaacauucucaaacggaugcgauuauguaaguaacaaaggaguagauacagucuccguaggcaacacauuauacuacguaaacaaacaagaaggaaaaucacuauauguaaaaggagaaccaaucauaaauuucuacgacccacuuguauuccccagcgacgaauuugaugcuuccauuucacaagucaacgaaaaaauaaaccaaucauuagccuucauaagaaaaucagacgaauuauuacauaauguuaaugucggcaaauccacaacuaauauaaugauaacaacaaucauaauaguaauaaucguuauacuacuauuacucauagcaguaggacucuucuuauauuguaaagccagauccaccccaguaacacucucaaaagaccaauuaucaggaauuaauaacaucgcauuuucaaacuaaggacuaguggaagcauuuuccuggcugauuaaaagaaauuacucagcuauggucaucuguuccuguuagaaggcuaugcagcauauuauauacuaugcgcauguuaugaaaugcauaauaaaaaauuuuaaaaaaucuaaaagaucuaaaaaaaaaaaaaaaaaaaaaaaaaaaaaaaaaaaaaaaaaaaaaaaaaaaaaaaaaaaaaaaaugcaucccccccccccccccccccccccccccccccaaaggcucuuuucagagccaccagaauu

SEQ ID NO: 17012 - RNA, 1982 nt, Artificial Sequence
  mRNA product Design c-4 comprising derived and/or modified sequence from HRSV(Memphis-37)__AIY60640.1__F_DSCav1_mut5 (opt11)
gggagaguccgcucagccagguugcagaagcggcuuagcguguguccuaaucuucucucugcguguagguaggccugugccgcaaacaagcuuaccauggaacuccccauccuuaaaaccaacgcaaucaccacaauacucgccgccgucacccucugcuuugcguccucccagaacaucaccgaagaguucuaccaaucgaccugcagcgccgucagcaagggcuaccucucagcccuccgaacaggcugguacacauccgucaucaccaucgaacucucaaacauaaaagaaaacaaguguaacggcaccgacgcgaaaguuaaacucaucaaacaagaacucgauaaauacaaaaacgcaguaaccgaacuacaacuccuaaugcaauccacacccgcagccggcagcggcuccgcaaucgccuccggcauagcagucugcaaaguccuccaccucgaaggagaagucaauaaaaucaaaaacgcccuccuauccaccaacaaagcgguugucucccuguccggaugcggaguuagcguccuaaccuucaaggugcucgaccucaaaaacuacauagacaaacaacuacuccccauacucaacaaacaaucaugcuccaucagcaacaucgagaccgucaucgaguuccaacagaaaaacaaccgccuccucgaaaucacacgagaguucuccguaaacgccggcgucacaacccccguuuccacuuacaugcucacaaacagcgaacuccucucccucaucaacgacaugccaaucaccaacgaccaaaagaaacucauguccaacaacguccaaaucguccgccaacaaagcuacagcauaaugugcaucauaaaagaagaaguacucgcguacguaguccaacuaccccuauacggcgucaucgacacccccugcuggaaacugcacacuucuccccucuguacaaccaacacuaaagaaggcucgaacaucugccucaccagaacagaccgaggaugguacugcgacaacgccggcuccgucagcuucuucccccaggccgaaacaugcaaaguacaaucaaaccgagucuucugcgacacaaugaacagcagaacucuacccuccgaaguuaaccuaugcaacaucgacaucuucaaccccaaauacgacugcaaaauaaugaccucaaaaacagacguguccagcuccguuaucaccucucucggagccaucguauccuguuauggaaaaaccaaaugcaccgccucaaacaaaugccgaggcauaaucaaaacauucucaaauggaugcgacuacguauccaacaaaggagucgacaccgucagcgugggcaauacccucuacuacgucaacaaacaggaagggaaaucccucuauguaaagggcgagcccauuauuaacuucuaugacccccucguguucccaagcgacgaguucgacgccuccauaucacaagucaaugagaaaaucaaccaaucacuagcuuucauucgcaaauccgacgaacuccuucacaacgucaacgucggcaaauccaccaccaacaucaugaucaccaccauaauuaucgucauuaucgucauacuacuccuacucaucgccgucggccucuuccucuauugcaaagcacgcucgacacccgucacccuuucaaaagaccaacuuuccggcauaaacaacauagccuucagcaacuagggacuaguggaagcauuuuccuggcugauuaaaagaaauuacucagcuauggucaucuguuccuguuagaaggcuaugcagcauauuauauacuaugcgcauguuaugaaaugcauaauaaaaaauuuuaaaaaaucuaaaagaucuaaaaaaaaaaaaaaaaaaaaaaaaaaaaaaaaaaaaaaaaaaaaaaaaaaaaaaaaaaaaaaaaugcaucccccccccccccccccccccccccccccccaaaggcucuuuucagagccaccagaauu

SEQ ID NO: 17013 - RNA, 1900 nt, Artificial Sequence
  mRNA product Design c-5 comprising derived and/or modified sequence from HRSV(Memphis-37)__AIY60640.1__F_DSCav1_mut5 (opt1)
gggagagcggcucggccauuuugucccagucaguccggaggcugcggcugcagaaguaccgccugcggaguaacugcaaagaagcuuaccauggagcugcccauccucaagaccaacgccaucaccacgauccuggccgcggugacccugugcuucgccagcucccagaacaucaccgaggaguucuaccagagcacgugcuccgccgucagcaagggcuaccucuccgcccugcgcaccgggugguacaccagcgugaucaccaucgagcuguccaacaucaaggagaacaagugcaacggcaccgacgccaaggugaagcucaucaagcaggagcuggacaaguacaagaacgcggucacggagcugcagcuccugaugcagagcaccccggccgccggcuccgggagcgcgaucgccuccggcaucgccgucugcaaggugcugcaccucgagggcgaggugaacaagaucaagaacgcccugcuguccaccaacaaggccgucgugagccucuccggcugcggggugagcguccugaccuucaaggugcuggaccucaagaacuacaucgacaagcagcugcugcccauccugaacaagcagagcugcuccaucagcaacaucgagaccgucaucgaguuccagcagaagaacaaccgccuccuggagaucacgcgggaguucagcgugaacgcgggcgugaccacccccgucuccaccuacaugcugacgaacagcgagcuccugucccugaucaacgacaugccgaucaccaacgaccagaagaagcucaugagcaacaacgugcagaucgugcgccagcaguccuacagcaucaugugcaucaucaaggaggagguccuggccuacguggugcagcugccccucuacggggucaucgacacccccugcuggaagcugcacaccagcccccugugcacgaccaacaccaaggagggcuccaacaucugccucacccggacggaccgcgggugguacugcgacaacgccggcagcguguccuucuucccgcaggccgagaccugcaagguccagagcaaccggguguucugcgacaccaugaacucccggacccugcccagcgaggugaaccucugcaacaucgacaucuucaaccccaaguacgacugcaagaucaugacguccaagaccgacgucagcuccagcgugaucaccucccugggcgccaucgugagcugcuacgggaagaccaagugcacggcgagcaacaagugccgcggcaucaucaagaccuucuccaacgggugcgacuacgucagcaacaagggcguggacaccguguccgucggcaacacccuguacuacgugaacaagcaggagggcaagagccucuacgugaagggggagcccaucaucaacuucuacgacccgcuggucuuccccuccgacgaguucgacgccagcaucucccaggugaacgagaagaucaaccagagccuggccuucauccggaaguccgacgagcuccugcacaacgugaacgucggcaagagcaccacgaacaucaugaucaccaccaucaucaucgugaucaucgugauccugcugcuccugaucgccgucgggcuguuccucuacugcaaggcccgcuccacccccgugacgcugagcaaggaccagcuguccgggaucaacaacaucgcguucagcaacugaggacuagucccuguucccagagcccacuuuuuuuucuuuuuuugaaauaaaauagccugucuuucagaucuaaaaaaaaaaaaaaaaaaaaaaaaaaaaaaaaaaaaaaaaaaaaaaaaaaaaaaaaaaaaaaaaugcaucccccccccccccccccccccccccccccccaaaggcucuuuucagagccaccagaauu

SEQ ID NO: 17014 - RNA, 1900 nt, Artificial Sequence
  mRNA product Design c-5 comprising derived and/or modified sequence from HRSV(Memphis-37)__AIY60640.1__F_DSCav1_mut5 (opt1)
gggagagcggcucggccauuuugucccagucaguccggaggcugcggcugcagaaguaccgccugcggaguaacugcaaagaagcuuaccauggagcugcccauccucaagaccaacgccaucaccacgauccuggccgcggugacccugugcuucgccagcucccagaacaucaccgaggaguucuaccagagcacgugcuccgccgucagcaagggcuaccucuccgcccugcgcaccgggugguacaccagcgugaucaccaucgagcuguccaacaucaaggagaacaagugcaacggcaccgacgccaaggugaagcucaucaagcaggagcuggacaaguacaagaacgcggucacggagcugcagcuccugaugcagagcaccccggccgccggguccggcagcgccaucgcguccgggaucgccgugugcaaggugcugcaccucgagggcgaggucaacaagaucaagaacgcccugcugagcaccaacaaggccguggugucccucagcggcugcggggucuccgugcugaccuucaaggugcuggaccucaagaacuacaucgacaagcagcugcugcccauccucaacaagcagagcugcuccaucagcaacaucgagacggucaucgaguuccagcagaagaacaaccggcugcuggagaucacccgcgaguucuccgugaacgccggcgugaccacccccgucagcacguacaugcucaccaacagcgagcugcugucccucaucaacgacaugcccaucaccaacgaccagaagaagcugaugagcaacaacgugcagaucgugcggcagcaguccuacagcaucaugugcaucaucaaggaggagguccuggcguacguggugcagcucccgcuguacggggucaucgacacccccugcuggaagcugcacacgagcccccucugcaccaccaacaccaaggagggcuccaacaucugccugacgcgcaccgaccgggggugguacugcgacaacgccggcuccgugagcuucuucccccaggccgagaccugcaaggugcaguccaaccgcgucuucugcgacaccaugaacagccggacgcucccguccgaggugaaccugugcaacaucgacaucuucaaccccaaguacgacugcaagaucaugaccagcaagaccgacgucuccagcuccgugaucaccagccugggcgccaucguguccugcuacgggaagacgaagugcaccgccagcaacaagugccggggcaucaucaagaccuucuccaacgggugcgacuacgucagcaacaagggcguggacaccgugagcgucggcaacacgcucuacuacgugaacaagcaggaggggaagucccuguacgugaagggcgagcccaucaucaacuucuacgacccccuggucuucccgagcgacgaguucgacgcguccaucagccaggugaacgagaagaucaaccagucccucgccuucauccgcaagagcgacgagcugcugcacaacgugaacgucgggaaguccaccaccaacaucaugaucaccaccaucaucaucgugaucaucgugauccuccugcugcucaucgccgucggccuguuccuguacugcaaggcccggagcacgcccgugacccuguccaaggaccagcucagcgggaucaacaacaucgccuucuccaacugaggacuagucccuguucccagagcccacuuuuuuuucuuuuuuugaaauaaaauagccugucuuucagaucuaaaaaaaaaaaaaaaaaaaaaaaaaaaaaaaaaaaaaaaaaaaaaaaaaaaaaaaaaaaaaaaaugcaucccccccccccccccccccccccccccccccaaaggcucuuuucagagccaccagaauu

SEQ ID NO: 17015 - RNA, 1900 nt, Artificial Sequence
  mRNA product Design c-5 comprising derived and/or modified sequence from HRSV(Memphis-37)__AIY60640.1__F_DSCav1_mut5 (opt2)
gggagagcggcucggccauuuugucccagucaguccggaggcugcggcugcagaaguaccgccugcggaguaacugcaaagaagcuuaccauggagcuccccauccucaagaccaacgccaucaccaccauccucgccgccgucacccucugcuucgccuccucccagaacaucaccgaggaguucuaccaguccaccugcuccgccgucuccaagggcuaccucuccgcccuccgcaccggcugguacaccuccgucaucaccaucgagcucuccaacaucaaggagaacaagugcaacggcaccgacgccaaggucaagcucaucaagcaggagcucgacaaguacaagaacgccgucaccgagcuccagcuccucaugcaguccacccccgccgccggcuccggcuccgccaucgccuccggcaucgccgucugcaagguccuccaccucgagggcgaggucaacaagaucaagaacgcccuccucuccaccaacaaggccgucgucucccucuccggcugcggcgucuccguccucaccuucaagguccucgaccucaagaacuacaucgacaagcagcuccuccccauccucaacaagcaguccugcuccaucuccaacaucgagaccgucaucgaguuccagcagaagaacaaccgccuccucgagaucacccgcgaguucuccgucaacgccggcgucaccacccccgucuccaccuacaugcucaccaacuccgagcuccucucccucaucaacgacaugcccaucaccaacgaccagaagaagcucauguccaacaacguccagaucguccgccagcaguccuacuccaucaugugcaucaucaaggaggagguccucgccuacgucguccagcucccccucuacggcgucaucgacacccccugcuggaagcuccacaccuccccccucugcaccaccaacaccaaggagggcuccaacaucugccucacccgcaccgaccgcggcugguacugcgacaacgccggcuccgucuccuucuucccccaggccgagaccugcaagguccaguccaaccgcgucuucugcgacaccaugaacucccgcacccuccccuccgaggucaaccucugcaacaucgacaucuucaaccccaaguacgacugcaagaucaugaccuccaagaccgacgucuccuccuccgucaucaccucccucggcgccaucgucuccugcuacggcaagaccaagugcaccgccuccaacaagugccgcggcaucaucaagaccuucuccaacggcugcgacuacgucuccaacaagggcgucgacaccgucuccgucggcaacacccucuacuacgucaacaagcaggagggcaagucccucuacgucaagggcgagcccaucaucaacuucuacgacccccucgucuuccccuccgacgaguucgacgccuccaucucccaggucaacgagaagaucaaccagucccucgccuucauccgcaaguccgacgagcuccuccacaacgucaacgucggcaaguccaccaccaacaucaugaucaccaccaucaucaucgucaucaucgucauccuccuccuccucaucgccgucggccucuuccucuacugcaaggcccgcuccacccccgucacccucuccaaggaccagcucuccggcaucaacaacaucgccuucuccaacugaggacuagucccuguucccagagcccacuuuuuuuucuuuuuuugaaauaaaauagccugucuuucagaucuaaaaaaaaaaaaaaaaaaaaaaaaaaaaaaaaaaaaaaaaaaaaaaaaaaaaaaaaaaaaaaaaugcaucccccccccccccccccccccccccccccccaaaggcucuuuucagagccaccagaauu

SEQ ID NO: 17016 - RNA, 1900 nt, Artificial Sequence
  mRNA product Design c-5 comprising derived and/or modified sequence from HRSV(Memphis-37)__AIY60640.1__F_DSCav1_mut5 (opt3)
gggagagcggcucggccauuuugucccagucaguccggaggcugcggcugcagaaguaccgccugcggaguaacugcaaagaagcuuaccauggagcugcccauccucaagaccaacgccauuacaacuauacuugcugcagugacgcugugcuucgccagcucccagaauaucaccgaagaguuuuaccaaucuacauguucagcggucaguaaaggcuauuugagcgcuuuaagaacugggugguacaccuccguuauuacaaucgaacugucuaacauuaaggagaauaaaugcaacggaaccgacgccaaggugaaacuaaucaagcaggaacucgauaaguauaaaaaugcaguaacugagcugcagcuucugaugcagucgaccccugccgcugguucaggcagcgcaauagccagugggaucgcuguguguaaggucuugcaccucgagggagaagugaacaaaauuaagaaugcccugcuguccacaaacaaagcgguugugucucucagcggcugcggugucuccguguuaacguucaagguacuggaccuuaagaauuacaucgauaaacaauugcugccaauucuaaacaagcagucauguaguaucagcaauauagagacuguuauugaauuucagcagaaaaacaauaggcuccuggagaucacccgggaguucucugugaacgcaggggucacaacuccgguguccaccuauaugcuuacaaauucagaacuguugagccucauuaacgacaugcccaucaccaacgaucaaaagaaacugaugaguaauaacgugcagaucguccgccagcagucuuacuccauuaugugcauaaucaaggaggaaguuuuagccuaugugguacaacugccucucuacggagugauugacacgccauguuggaaacuucauacuagcccccugugcacaaccaauacuaaggagggcucgaacaucuguuugacacgaaccgaucguggcugguacugcgacaaugcugggucugucuccuuuuucccucaggccgaaacguguaaggugcagucaaacagaguguuuugcgauaccaugaauaguagaacacugccaagcgaggugaaccucugcaauauagacauuuucaaccccaaauaugauuguaagaucaugacuuccaaaaccgacgucucuagcucagugaucacaagucugggagcaauuguauccugcuacgguaagacuaaauguaccgcuagcaauaagugcaggggcaucauuaagacauuuucuaacgggugugauuauguuucaaauaaaggaguggacaccgucagugugggcaacacucuuuacuaugucaauaagcaagaggguaaaagccuguacgugaagggggaaccuauaaucaacuucuaugacccauugguuuuuccguccgaugaguucgacgccucuauuucgcagguuaacgagaaaaucaaucagagccucgcguuuauccggaaguccgaugaacuguuacacaacguaaaugucggaaagucaacgacaaacauuaugauaaccacuaucauuaucgugauuaucguuauacugcuacuccugaucgccgugggccuuuucuuguacugcaaagcacgcaguacccccgucacacugucuaaggaccagcucagcggcauuaauaacaucgcuuucuccaauugaggacuagucccuguucccagagcccacuuuuuuuucuuuuuuugaaauaaaauagccugucuuucagaucuaaaaaaaaaaaaaaaaaaaaaaaaaaaaaaaaaaaaaaaaaaaaaaaaaaaaaaaaaaaaaaaaugcaucccccccccccccccccccccccccccccccaaaggcucuuuucagagccaccagaauu

SEQ ID NO: 17017 - RNA, 1900 nt, Artificial Sequence
  mRNA product Design c-5 comprising derived and/or modified sequence from HRSV(Memphis-37)__AIY60640.1__F_DSCav1_mut5 (opt4)
gggagagcggcucggccauuuugucccagucaguccggaggcugcggcugcagaaguaccgccugcggaguaacugcaaagaagcuuaccauggagcugcccauccugaagaccaacgccaucaccaccauccuggccgccgugacccugugcuucgccagcagccagaacaucaccgaggaguucuaccagagcaccugcagcgccgugagcaagggcuaccugagcgcccugagaaccggcugguacaccagcgugaucaccaucgagcugagcaacaucaaggagaacaagugcaacggcaccgacgccaaggugaagcugaucaagcaggagcuggacaaguacaagaacgccgugaccgagcugcagcugcugaugcagagcacccccgccgccggcagcggcagcgccaucgccagcggcaucgccgugugcaaggugcugcaccuggagggcgaggugaacaagaucaagaacgcccugcugagcaccaacaaggccguggugagccugagcggcugcggcgugagcgugcugaccuucaaggugcuggaccugaagaacuacaucgacaagcagcugcugcccauccugaacaagcagagcugcagcaucagcaacaucgagaccgugaucgaguuccagcagaagaacaacagacugcuggagaucaccagagaguucagcgugaacgccggcgugaccacccccgugagcaccuacaugcugaccaacagcgagcugcugagccugaucaacgacaugcccaucaccaacgaccagaagaagcugaugagcaacaacgugcagaucgugagacagcagagcuacagcaucaugugcaucaucaaggaggaggugcuggccuacguggugcagcugccccuguacggcgugaucgacacccccugcuggaagcugcacaccagcccccugugcaccaccaacaccaaggagggcagcaacaucugccugaccagaaccgacagaggcugguacugcgacaacgccggcagcgugagcuucuucccccaggccgagaccugcaaggugcagagcaacagaguguucugcgacaccaugaacagcagaacccugcccagcgaggugaaccugugcaacaucgacaucuucaaccccaaguacgacugcaagaucaugaccagcaagaccgacgugagcagcagcgugaucaccagccugggcgccaucgugagcugcuacggcaagaccaagugcaccgccagcaacaagugcagaggcaucaucaagaccuucagcaacggcugcgacuacgugagcaacaagggcguggacaccgugagcgugggcaacacccuguacuacgugaacaagcaggagggcaagagccuguacgugaagggcgagcccaucaucaacuucuacgacccccugguguuccccagcgacgaguucgacgccagcaucagccaggugaacgagaagaucaaccagagccuggccuucaucagaaagagcgacgagcugcugcacaacgugaacgugggcaagagcaccaccaacaucaugaucaccaccaucaucaucgugaucaucgugauccugcugcugcugaucgccgugggccuguuccuguacugcaaggccagaagcacccccgugacccugagcaaggaccagcugagcggcaucaacaacaucgccuucagcaacugaggacuagucccuguucccagagcccacuuuuuuuucuuuuuuugaaauaaaauagccugucuuucagaucuaaaaaaaaaaaaaaaaaaaaaaaaaaaaaaaaaaaaaaaaaaaaaaaaaaaaaaaaaaaaaaaaugcaucccccccccccccccccccccccccccccccaaaggcucuuuucagagccaccagaauu

SEQ ID NO: 17018 - RNA, 1900 nt, Artificial Sequence
  mRNA product Design c-5 comprising derived and/or modified sequence from HRSV(Memphis-37)__AIY60640.1__F_DSCav1_mut5 (opt5)
gggagagcggcucggccauuuugucccagucaguccggaggcugcggcugcagaaguaccgccugcggaguaacugcaaagaagcuuaccauggagcugcccauccucaagaccaacgccauuacaacgauccuggcugccgugacccuuugcuucgcgagcucccagaauauuacagaagaguuuuaccaaucuaccuguagcgcugucuccaaaggcuaucugucugcccucagaacagggugguacaccagcguuaucacaauugaacuguccaacaucaaggagaauaaaugcaacggaaccgacgccaaggugaaacuuaucaagcaggaacuggauaaguauaaaaaugcugugacggagcuccagcugcugaugcagucuaccccugccgcuggcagcggguccgccauugcgagcggaaucgccgucuguaaggugcuccaccuggagggcgaaguuaacaaaauuaagaaugcccuucugucuacaaacaaagcuguggucucccucagcgggugcggagugucuguucugaccuucaaggugcuugaccugaagaauuacaucgauaaacaacuccugccgauucugaacaagcaguccuguagcaucucuaauauugagacagucaucgaauuucagcagaaaaacaaucggcuccuggagaucacccgcgaguucuccgugaacgcuggcgugacgacacccgucagcaccuauaugcuuacaaauuccgaacugcucucucugauuaacgacaugccuaucaccaacgaucaaaagaaacuuaugagcaauaacguucagauugugagacagcaguccuacagcaucaugugcauuaucaaggaggaagugcuggccuaugucgugcaacucccccuguacggcguuaucgacaccccuuguuggaaacugcauacaucuccccucugcacgaccaauacaaaggagggguccaacauuugucugacccggacagaucgcggaugguacugcgacaaugcgggcagcgugagcuuuuucccucaggccgaaaccuguaagguccagucuaacagaguguuuugcgauacgaugaacuccagaacacugccgucugagguuaaucucugcaauaucgacauuuucaaccccaaauaugauuguaagaucaugaccagcaaaaccgacguguccagcucugucauuacaucccugggggcuaucgugagcugcuacggaaagaccaaauguacagccucuaauaagugccggggcaucauuaagacguuuuccaacgggugugauuaugucagcaauaaaggaguggacaccguuuccgugggcaacacacuuuacuaugucaauaagcaagagggcaaaucucuguacgugaagggggaaccuaucauuaacuucuaugacccccucguuuuuccuagcgaugaguucgacgcuuccaucucucaggugaacgagaaaauuaaucagagccuggccuuuauccgcaaguccgaugaacugcuccacaacgucaaugugggaaagagcaccacaaacauuaugaucaccacgaucauuaucgugauuaucguuauucugcuucugcucaucgccgucggccuguuccuguacugcaaagcuagaucuacccccgugacacuuuccaaggaccagcucagcgggaucaauaacauugcguucucuaauugaggacuagucccuguucccagagcccacuuuuuuuucuuuuuuugaaauaaaauagccugucuuucagaucuaaaaaaaaaaaaaaaaaaaaaaaaaaaaaaaaaaaaaaaaaaaaaaaaaaaaaaaaaaaaaaaaugcaucccccccccccccccccccccccccccccccaaaggcucuuuucagagccaccagaauu

SEQ ID NO: 17019 - RNA, 1900 nt, Artificial Sequence
  mRNA product Design c-5 comprising derived and/or modified sequence from HRSV(Memphis-37)__AIY60640.1__F_DSCav1_mut5 (opt6)
gggagagcggcucggccauuuugucccagucaguccggaggcugcggcugcagaaguaccgccugcggaguaacugcaaagaagcuuaccauggaacucccaaucuuaaaaacaaacgcaauaacuacaauacucgcagcaguaacacuaugcuucgcaucaucacaaaacauaaccgaagaauuuuaccaaaguacaugcucagcaguaucaaaagguuaccucucagcccuaagaaccggaugguacacaucaguaaucacuauagaacuauccaauauaaaagaaaacaaaugcaacggcacugacgcaaaaguuaaauuaauuaaacaagaacucgauaaauauaaaaaugcaguaacagaacuacaacuacuaaugcaaagcaccccagcugcaggaagcggaucagcaaucgcaucaggaauagcaguauguaaaguacuacaccuagaaggagaagucaacaaaaucaaaaaugcacuacuaaguacaaacaaagcuguaguaagccuaucagguugcggaguaucaguauuaacauuuaaaguccucgaccuaaaaaauuacauagauaaacaacucuuaccaauacucaauaaacaaaguugcagcaucagcaacauagaaacagucaucgaauuucaacaaaaaaauaauagacuccuagaaauaacacgugaauuuucaguaaaugcuggaguaacaacaccaguaucuacauauaugcuaacaaauagcgaacuacucucacuuauuaacgauaugcccauaacaaacgaccaaaaaaaacuuaugucaaacaauguucaaauaguuagacaacaauccuacagcauaaugugcauaaucaaagaagaaguucuagcuuacguaguacaacuaccacucuaugguguuaucgacacccccuguuggaaacuucacacaucaccacuaugcacaacaaacacaaaagaaggaucaaauauuugcuuaacaagaacagauagaggaugguauugcgauaaugccggaucaguaucauuuuuuccacaagcagaaacauguaaaguacaauccaaccgaguauuuugcgacaccaugaacuccagaacacuaccaucugaagucaaccuauguaauauagauauauuuaacccaaaauaugacuguaaaaucaugacaucaaaaacugauguaaguucuaguguaauaaccagcuuaggcgccauaguaagcuguuacgguaaaacaaaaugcacagcaagcaacaaaugccgcgguauaauaaaaacauucucaaacggaugcgauuauguaaguaacaaaggaguagauacagucuccguaggcaacacauuauacuacguaaacaaacaagaaggaaaaucacuauauguaaaaggagaaccaaucauaaauuucuacgacccacuuguauuccccagcgacgaauuugaugcuuccauuucacaagucaacgaaaaaauaaaccaaucauuagccuucauaagaaaaucagacgaauuauuacauaauguuaaugucggcaaauccacaacuaauauaaugauaacaacaaucauaauaguaauaaucguuauacuacuauuacucauagcaguaggacucuucuuauauuguaaagccagauccaccccaguaacacucucaaaagaccaauuaucaggaauuaauaacaucgcauuuucaaacuaaggacuagucccuguucccagagcccacuuuuuuuucuuuuuuugaaauaaaauagccugucuuucagaucuaaaaaaaaaaaaaaaaaaaaaaaaaaaaaaaaaaaaaaaaaaaaaaaaaaaaaaaaaaaaaaaaugcaucccccccccccccccccccccccccccccccaaaggcucuuuucagagccaccagaauu

SEQ ID NO: 17020 - RNA, 1900 nt, Artificial Sequence
  mRNA product Design c-5 comprising derived and/or modified sequence from HRSV(Memphis-37)__AIY60640.1__F_DSCav1_mut5 (opt11)
gggagagcggcucggccauuuugucccagucaguccggaggcugcggcugcagaaguaccgccugcggaguaacugcaaagaagcuuaccauggaacuccccauccuuaaaaccaacgcaaucaccacaauacucgccgccgucacccucugcuuugcguccucccagaacaucaccgaagaguucuaccaaucgaccugcagcgccgucagcaagggcuaccucucagcccuccgaacaggcugguacacauccgucaucaccaucgaacucucaaacauaaaagaaaacaaguguaacggcaccgacgcgaaaguuaaacucaucaaacaagaacucgauaaauacaaaaacgcaguaaccgaacuacaacuccuaaugcaauccacacccgcagccggcagcggcuccgcaaucgccuccggcauagcagucugcaaaguccuccaccucgaaggagaagucaauaaaaucaaaaacgcccuccuauccaccaacaaagcgguugucucccuguccggaugcggaguuagcguccuaaccuucaaggugcucgaccucaaaaacuacauagacaaacaacuacuccccauacucaacaaacaaucaugcuccaucagcaacaucgagaccgucaucgaguuccaacagaaaaacaaccgccuccucgaaaucacacgagaguucuccguaaacgccggcgucacaacccccguuuccacuuacaugcucacaaacagcgaacuccucucccucaucaacgacaugccaaucaccaacgaccaaaagaaacucauguccaacaacguccaaaucguccgccaacaaagcuacagcauaaugugcaucauaaaagaagaaguacucgcguacguaguccaacuaccccuauacggcgucaucgacacccccugcuggaaacugcacacuucuccccucuguacaaccaacacuaaagaaggcucgaacaucugccucaccagaacagaccgaggaugguacugcgacaacgccggcuccgucagcuucuucccccaggccgaaacaugcaaaguacaaucaaaccgagucuucugcgacacaaugaacagcagaacucuacccuccgaaguuaaccuaugcaacaucgacaucuucaaccccaaauacgacugcaaaauaaugaccucaaaaacagacguguccagcuccguuaucaccucucucggagccaucguauccuguuauggaaaaaccaaaugcaccgccucaaacaaaugccgaggcauaaucaaaacauucucaaauggaugcgacuacguauccaacaaaggagucgacaccgucagcgugggcaauacccucuacuacgucaacaaacaggaagggaaaucccucuauguaaagggcgagcccauuauuaacuucuaugacccccucguguucccaagcgacgaguucgacgccuccauaucacaagucaaugagaaaaucaaccaaucacuagcuuucauucgcaaauccgacgaacuccuucacaacgucaacgucggcaaauccaccaccaacaucaugaucaccaccauaauuaucgucauuaucgucauacuacuccuacucaucgccgucggccucuuccucuauugcaaagcacgcucgacacccgucacccuuucaaaagaccaacuuuccggcauaaacaacauagccuucagcaacuagggacuagucccuguucccagagcccacuuuuuuuucuuuuuuugaaauaaaauagccugucuuucagaucuaaaaaaaaaaaaaaaaaaaaaaaaaaaaaaaaaaaaaaaaaaaaaaaaaaaaaaaaaaaaaaaaugcaucccccccccccccccccccccccccccccccaaaggcucuuuucagagccaccagaauu

SEQ ID NO: 17021 - RNA, 1909 nt, Artificial Sequence
  mRNA product Design d-1 comprising derived and/or modified sequence from HRSV(Memphis-37)__AIY60640.1__F_DSCav1_mut5 (opt1)
gggagacccgugacccggaaguuguacggcuacgcgacuuucccucccacaaacccucgcgcccuuccuuuccuacuugggcccggcagaaagcuuaccauggagcugcccauccucaagaccaacgccaucaccacgauccuggccgcggugacccugugcuucgccagcucccagaacaucaccgaggaguucuaccagagcacgugcuccgccgucagcaagggcuaccucuccgcccugcgcaccgggugguacaccagcgugaucaccaucgagcuguccaacaucaaggagaacaagugcaacggcaccgacgccaaggugaagcucaucaagcaggagcuggacaaguacaagaacgcggucacggagcugcagcuccugaugcagagcaccccggccgccggcuccgggagcgcgaucgccuccggcaucgccgucugcaaggugcugcaccucgagggcgaggugaacaagaucaagaacgcccugcuguccaccaacaaggccgucgugagccucuccggcugcggggugagcguccugaccuucaaggugcuggaccucaagaacuacaucgacaagcagcugcugcccauccugaacaagcagagcugcuccaucagcaacaucgagaccgucaucgaguuccagcagaagaacaaccgccuccuggagaucacgcgggaguucagcgugaacgcgggcgugaccacccccgucuccaccuacaugcugacgaacagcgagcuccugucccugaucaacgacaugccgaucaccaacgaccagaagaagcucaugagcaacaacgugcagaucgugcgccagcaguccuacagcaucaugugcaucaucaaggaggagguccuggccuacguggugcagcugccccucuacggggucaucgacacccccugcuggaagcugcacaccagcccccugugcacgaccaacaccaaggagggcuccaacaucugccucacccggacggaccgcgggugguacugcgacaacgccggcagcguguccuucuucccgcaggccgagaccugcaagguccagagcaaccggguguucugcgacaccaugaacucccggacccugcccagcgaggugaaccucugcaacaucgacaucuucaaccccaaguacgacugcaagaucaugacguccaagaccgacgucagcuccagcgugaucaccucccugggcgccaucgugagcugcuacgggaagaccaagugcacggcgagcaacaagugccgcggcaucaucaagaccuucuccaacgggugcgacuacgucagcaacaagggcguggacaccguguccgucggcaacacccuguacuacgugaacaagcaggagggcaagagccucuacgugaagggggagcccaucaucaacuucuacgacccgcuggucuuccccuccgacgaguucgacgccagcaucucccaggugaacgagaagaucaaccagagccuggccuucauccggaaguccgacgagcuccugcacaacgugaacgucggcaagagcaccacgaacaucaugaucaccaccaucaucaucgugaucaucgugauccugcugcuccugaucgccgucgggcuguuccucuacugcaaggcccgcuccacccccgugacgcugagcaaggaccagcuguccgggaucaacaacaucgcguucagcaacugaggacuagucccuguucccagagcccacuuuuuuuucuuuuuuugaaauaaaauagccugucuuucagaucuaaaaaaaaaaaaaaaaaaaaaaaaaaaaaaaaaaaaaaaaaaaaaaaaaaaaaaaaaaaaaaaaugcaucccccccccccccccccccccccccccccccaaaggcucuuuucagagccaccagaauu

SEQ ID NO: 17022 - RNA, 1909 nt, Artificial Sequence
  mRNA product Design d-1 comprising derived and/or modified sequence from HRSV(Memphis-37)__AIY60640.1__F_DSCav1_mut5 (opt1)
gggagacccgugacccggaaguuguacggcuacgcgacuuucccucccacaaacccucgcgcccuuccuuuccuacuugggcccggcagaaagcuuaccauggagcugcccauccucaagaccaacgccaucaccacgauccuggccgcggugacccugugcuucgccagcucccagaacaucaccgaggaguucuaccagagcacgugcuccgccgucagcaagggcuaccucuccgcccugcgcaccgggugguacaccagcgugaucaccaucgagcuguccaacaucaaggagaacaagugcaacggcaccgacgccaaggugaagcucaucaagcaggagcuggacaaguacaagaacgcggucacggagcugcagcuccugaugcagagcaccccggccgccggguccggcagcgccaucgcguccgggaucgccgugugcaaggugcugcaccucgagggcgaggucaacaagaucaagaacgcccugcugagcaccaacaaggccguggugucccucagcggcugcggggucuccgugcugaccuucaaggugcuggaccucaagaacuacaucgacaagcagcugcugcccauccucaacaagcagagcugcuccaucagcaacaucgagacggucaucgaguuccagcagaagaacaaccggcugcuggagaucacccgcgaguucuccgugaacgccggcgugaccacccccgucagcacguacaugcucaccaacagcgagcugcugucccucaucaacgacaugcccaucaccaacgaccagaagaagcugaugagcaacaacgugcagaucgugcggcagcaguccuacagcaucaugugcaucaucaaggaggagguccuggcguacguggugcagcucccgcuguacggggucaucgacacccccugcuggaagcugcacacgagcccccucugcaccaccaacaccaaggagggcuccaacaucugccugacgcgcaccgaccgggggugguacugcgacaacgccggcuccgugagcuucuucccccaggccgagaccugcaaggugcaguccaaccgcgucuucugcgacaccaugaacagccggacgcucccguccgaggugaaccugugcaacaucgacaucuucaaccccaaguacgacugcaagaucaugaccagcaagaccgacgucuccagcuccgugaucaccagccugggcgccaucguguccugcuacgggaagacgaagugcaccgccagcaacaagugccggggcaucaucaagaccuucuccaacgggugcgacuacgucagcaacaagggcguggacaccgugagcgucggcaacacgcucuacuacgugaacaagcaggaggggaagucccuguacgugaagggcgagcccaucaucaacuucuacgacccccuggucuucccgagcgacgaguucgacgcguccaucagccaggugaacgagaagaucaaccagucccucgccuucauccgcaagagcgacgagcugcugcacaacgugaacgucgggaaguccaccaccaacaucaugaucaccaccaucaucaucgugaucaucgugauccuccugcugcucaucgccgucggccuguuccuguacugcaaggcccggagcacgcccgugacccuguccaaggaccagcucagcgggaucaacaacaucgccuucuccaacugaggacuagucccuguucccagagcccacuuuuuuuucuuuuuuugaaauaaaauagccugucuuucagaucuaaaaaaaaaaaaaaaaaaaaaaaaaaaaaaaaaaaaaaaaaaaaaaaaaaaaaaaaaaaaaaaaugcaucccccccccccccccccccccccccccccccaaaggcucuuuucagagccaccagaauu

SEQ ID NO: 17023 - RNA, 1909 nt, Artificial Sequence
  mRNA product Design d-1 comprising derived and/or modified sequence from HRSV(Memphis-37)__AIY60640.1__F_DSCav1_mut5 (opt2)
gggagacccgugacccggaaguuguacggcuacgcgacuuucccucccacaaacccucgcgcccuuccuuuccuacuugggcccggcagaaagcuuaccauggagcuccccauccucaagaccaacgccaucaccaccauccucgccgccgucacccucugcuucgccuccucccagaacaucaccgaggaguucuaccaguccaccugcuccgccgucuccaagggcuaccucuccgcccuccgcaccggcugguacaccuccgucaucaccaucgagcucuccaacaucaaggagaacaagugcaacggcaccgacgccaaggucaagcucaucaagcaggagcucgacaaguacaagaacgccgucaccgagcuccagcuccucaugcaguccacccccgccgccggcuccggcuccgccaucgccuccggcaucgccgucugcaagguccuccaccucgagggcgaggucaacaagaucaagaacgcccuccucuccaccaacaaggccgucgucucccucuccggcugcggcgucuccguccucaccuucaagguccucgaccucaagaacuacaucgacaagcagcuccuccccauccucaacaagcaguccugcuccaucuccaacaucgagaccgucaucgaguuccagcagaagaacaaccgccuccucgagaucacccgcgaguucuccgucaacgccggcgucaccacccccgucuccaccuacaugcucaccaacuccgagcuccucucccucaucaacgacaugcccaucaccaacgaccagaagaagcucauguccaacaacguccagaucguccgccagcaguccuacuccaucaugugcaucaucaaggaggagguccucgccuacgucguccagcucccccucuacggcgucaucgacacccccugcuggaagcuccacaccuccccccucugcaccaccaacaccaaggagggcuccaacaucugccucacccgcaccgaccgcggcugguacugcgacaacgccggcuccgucuccuucuucccccaggccgagaccugcaagguccaguccaaccgcgucuucugcgacaccaugaacucccgcacccuccccuccgaggucaaccucugcaacaucgacaucuucaaccccaaguacgacugcaagaucaugaccuccaagaccgacgucuccuccuccgucaucaccucccucggcgccaucgucuccugcuacggcaagaccaagugcaccgccuccaacaagugccgcggcaucaucaagaccuucuccaacggcugcgacuacgucuccaacaagggcgucgacaccgucuccgucggcaacacccucuacuacgucaacaagcaggagggcaagucccucuacgucaagggcgagcccaucaucaacuucuacgacccccucgucuuccccuccgacgaguucgacgccuccaucucccaggucaacgagaagaucaaccagucccucgccuucauccgcaaguccgacgagcuccuccacaacgucaacgucggcaaguccaccaccaacaucaugaucaccaccaucaucaucgucaucaucgucauccuccuccuccucaucgccgucggccucuuccucuacugcaaggcccgcuccacccccgucacccucuccaaggaccagcucuccggcaucaacaacaucgccuucuccaacugaggacuagucccuguucccagagcccacuuuuuuuucuuuuuuugaaauaaaauagccugucuuucagaucuaaaaaaaaaaaaaaaaaaaaaaaaaaaaaaaaaaaaaaaaaaaaaaaaaaaaaaaaaaaaaaaaugcaucccccccccccccccccccccccccccccccaaaggcucuuuucagagccaccagaauu

SEQ ID NO: 17024 - RNA, 1909 nt, Artificial Sequence
  mRNA product Design d-1 comprising derived and/or modified sequence from HRSV(Memphis-37)__AIY60640.1__F_DSCav1_mut5 (opt3)
gggagacccgugacccggaaguuguacggcuacgcgacuuucccucccacaaacccucgcgcccuuccuuuccuacuugggcccggcagaaagcuuaccauggagcugcccauccucaagaccaacgccauuacaacuauacuugcugcagugacgcugugcuucgccagcucccagaauaucaccgaagaguuuuaccaaucuacauguucagcggucaguaaaggcuauuugagcgcuuuaagaacugggugguacaccuccguuauuacaaucgaacugucuaacauuaaggagaauaaaugcaacggaaccgacgccaaggugaaacuaaucaagcaggaacucgauaaguauaaaaaugcaguaacugagcugcagcuucugaugcagucgaccccugccgcugguucaggcagcgcaauagccagugggaucgcuguguguaaggucuugcaccucgagggagaagugaacaaaauuaagaaugcccugcuguccacaaacaaagcgguugugucucucagcggcugcggugucuccguguuaacguucaagguacuggaccuuaagaauuacaucgauaaacaauugcugccaauucuaaacaagcagucauguaguaucagcaauauagagacuguuauugaauuucagcagaaaaacaauaggcuccuggagaucacccgggaguucucugugaacgcaggggucacaacuccgguguccaccuauaugcuuacaaauucagaacuguugagccucauuaacgacaugcccaucaccaacgaucaaaagaaacugaugaguaauaacgugcagaucguccgccagcagucuuacuccauuaugugcauaaucaaggaggaaguuuuagccuaugugguacaacugccucucuacggagugauugacacgccauguuggaaacuucauacuagcccccugugcacaaccaauacuaaggagggcucgaacaucuguuugacacgaaccgaucguggcugguacugcgacaaugcugggucugucuccuuuuucccucaggccgaaacguguaaggugcagucaaacagaguguuuugcgauaccaugaauaguagaacacugccaagcgaggugaaccucugcaauauagacauuuucaaccccaaauaugauuguaagaucaugacuuccaaaaccgacgucucuagcucagugaucacaagucugggagcaauuguauccugcuacgguaagacuaaauguaccgcuagcaauaagugcaggggcaucauuaagacauuuucuaacgggugugauuauguuucaaauaaaggaguggacaccgucagugugggcaacacucuuuacuaugucaauaagcaagaggguaaaagccuguacgugaagggggaaccuauaaucaacuucuaugacccauugguuuuuccguccgaugaguucgacgccucuauuucgcagguuaacgagaaaaucaaucagagccucgcguuuauccggaaguccgaugaacuguuacacaacguaaaugucggaaagucaacgacaaacauuaugauaaccacuaucauuaucgugauuaucguuauacugcuacuccugaucgccgugggccuuuucuuguacugcaaagcacgcaguacccccgucacacugucuaaggaccagcucagcggcauuaauaacaucgcuuucuccaauugaggacuagucccuguucccagagcccacuuuuuuuucuuuuuuugaaauaaaauagccugucuuucagaucuaaaaaaaaaaaaaaaaaaaaaaaaaaaaaaaaaaaaaaaaaaaaaaaaaaaaaaaaaaaaaaaaugcaucccccccccccccccccccccccccccccccaaaggcucuuuucagagccaccagaauu

SEQ ID NO: 17025 - RNA, 1909 nt, Artificial Sequence
  mRNA product Design d-1 comprising derived and/or modified sequence from HRSV(Memphis-37)__AIY60640.1__F_DSCav1_mut5 (opt4)
gggagacccgugacccggaaguuguacggcuacgcgacuuucccucccacaaacccucgcgcccuuccuuuccuacuugggcccggcagaaagcuuaccauggagcugcccauccugaagaccaacgccaucaccaccauccuggccgccgugacccugugcuucgccagcagccagaacaucaccgaggaguucuaccagagcaccugcagcgccgugagcaagggcuaccugagcgcccugagaaccggcugguacaccagcgugaucaccaucgagcugagcaacaucaaggagaacaagugcaacggcaccgacgccaaggugaagcugaucaagcaggagcuggacaaguacaagaacgccgugaccgagcugcagcugcugaugcagagcacccccgccgccggcagcggcagcgccaucgccagcggcaucgccgugugcaaggugcugcaccuggagggcgaggugaacaagaucaagaacgcccugcugagcaccaacaaggccguggugagccugagcggcugcggcgugagcgugcugaccuucaaggugcuggaccugaagaacuacaucgacaagcagcugcugcccauccugaacaagcagagcugcagcaucagcaacaucgagaccgugaucgaguuccagcagaagaacaacagacugcuggagaucaccagagaguucagcgugaacgccggcgugaccacccccgugagcaccuacaugcugaccaacagcgagcugcugagccugaucaacgacaugcccaucaccaacgaccagaagaagcugaugagcaacaacgugcagaucgugagacagcagagcuacagcaucaugugcaucaucaaggaggaggugcuggccuacguggugcagcugccccuguacggcgugaucgacacccccugcuggaagcugcacaccagcccccugugcaccaccaacaccaaggagggcagcaacaucugccugaccagaaccgacagaggcugguacugcgacaacgccggcagcgugagcuucuucccccaggccgagaccugcaaggugcagagcaacagaguguucugcgacaccaugaacagcagaacccugcccagcgaggugaaccugugcaacaucgacaucuucaaccccaaguacgacugcaagaucaugaccagcaagaccgacgugagcagcagcgugaucaccagccugggcgccaucgugagcugcuacggcaagaccaagugcaccgccagcaacaagugcagaggcaucaucaagaccuucagcaacggcugcgacuacgugagcaacaagggcguggacaccgugagcgugggcaacacccuguacuacgugaacaagcaggagggcaagagccuguacgugaagggcgagcccaucaucaacuucuacgacccccugguguuccccagcgacgaguucgacgccagcaucagccaggugaacgagaagaucaaccagagccuggccuucaucagaaagagcgacgagcugcugcacaacgugaacgugggcaagagcaccaccaacaucaugaucaccaccaucaucaucgugaucaucgugauccugcugcugcugaucgccgugggccuguuccuguacugcaaggccagaagcacccccgugacccugagcaaggaccagcugagcggcaucaacaacaucgccuucagcaacugaggacuagucccuguucccagagcccacuuuuuuuucuuuuuuugaaauaaaauagccugucuuucagaucuaaaaaaaaaaaaaaaaaaaaaaaaaaaaaaaaaaaaaaaaaaaaaaaaaaaaaaaaaaaaaaaaugcaucccccccccccccccccccccccccccccccaaaggcucuuuucagagccaccagaauu

SEQ ID NO: 17026 - RNA, 1909 nt, Artificial Sequence
  mRNA product Design d-1 comprising derived and/or modified sequence from HRSV(Memphis-37)__AIY60640.1__F_DSCav1_mut5 (opt5)
gggagacccgugacccggaaguuguacggcuacgcgacuuucccucccacaaacccucgcgcccuuccuuuccuacuugggcccggcagaaagcuuaccauggagcugcccauccucaagaccaacgccauuacaacgauccuggcugccgugacccuuugcuucgcgagcucccagaauauuacagaagaguuuuaccaaucuaccuguagcgcugucuccaaaggcuaucugucugcccucagaacagggugguacaccagcguuaucacaauugaacuguccaacaucaaggagaauaaaugcaacggaaccgacgccaaggugaaacuuaucaagcaggaacuggauaaguauaaaaaugcugugacggagcuccagcugcugaugcagucuaccccugccgcuggcagcggguccgccauugcgagcggaaucgccgucuguaaggugcuccaccuggagggcgaaguuaacaaaauuaagaaugcccuucugucuacaaacaaagcuguggucucccucagcgggugcggagugucuguucugaccuucaaggugcuugaccugaagaauuacaucgauaaacaacuccugccgauucugaacaagcaguccuguagcaucucuaauauugagacagucaucgaauuucagcagaaaaacaaucggcuccuggagaucacccgcgaguucuccgugaacgcuggcgugacgacacccgucagcaccuauaugcuuacaaauuccgaacugcucucucugauuaacgacaugccuaucaccaacgaucaaaagaaacuuaugagcaauaacguucagauugugagacagcaguccuacagcaucaugugcauuaucaaggaggaagugcuggccuaugucgugcaacucccccuguacggcguuaucgacaccccuuguuggaaacugcauacaucuccccucugcacgaccaauacaaaggagggguccaacauuugucugacccggacagaucgcggaugguacugcgacaaugcgggcagcgugagcuuuuucccucaggccgaaaccuguaagguccagucuaacagaguguuuugcgauacgaugaacuccagaacacugccgucugagguuaaucucugcaauaucgacauuuucaaccccaaauaugauuguaagaucaugaccagcaaaaccgacguguccagcucugucauuacaucccugggggcuaucgugagcugcuacggaaagaccaaauguacagccucuaauaagugccggggcaucauuaagacguuuuccaacgggugugauuaugucagcaauaaaggaguggacaccguuuccgugggcaacacacuuuacuaugucaauaagcaagagggcaaaucucuguacgugaagggggaaccuaucauuaacuucuaugacccccucguuuuuccuagcgaugaguucgacgcuuccaucucucaggugaacgagaaaauuaaucagagccuggccuuuauccgcaaguccgaugaacugcuccacaacgucaaugugggaaagagcaccacaaacauuaugaucaccacgaucauuaucgugauuaucguuauucugcuucugcucaucgccgucggccuguuccuguacugcaaagcuagaucuacccccgugacacuuuccaaggaccagcucagcgggaucaauaacauugcguucucuaauugaggacuagucccuguucccagagcccacuuuuuuuucuuuuuuugaaauaaaauagccugucuuucagaucuaaaaaaaaaaaaaaaaaaaaaaaaaaaaaaaaaaaaaaaaaaaaaaaaaaaaaaaaaaaaaaaaugcaucccccccccccccccccccccccccccccccaaaggcucuuuucagagccaccagaauu

SEQ ID NO: 17027 - RNA, 1909 nt, Artificial Sequence
  mRNA product Design d-1 comprising derived and/or modified sequence from HRSV(Memphis-37)__AIY60640.1__F_DSCav1_mut5 (opt6)
gggagacccgugacccggaaguuguacggcuacgcgacuuucccucccacaaacccucgcgcccuuccuuuccuacuugggcccggcagaaagcuuaccauggaacucccaaucuuaaaaacaaacgcaauaacuacaauacucgcagcaguaacacuaugcuucgcaucaucacaaaacauaaccgaagaauuuuaccaaaguacaugcucagcaguaucaaaagguuaccucucagcccuaagaaccggaugguacacaucaguaaucacuauagaacuauccaauauaaaagaaaacaaaugcaacggcacugacgcaaaaguuaaauuaauuaaacaagaacucgauaaauauaaaaaugcaguaacagaacuacaacuacuaaugcaaagcaccccagcugcaggaagcggaucagcaaucgcaucaggaauagcaguauguaaaguacuacaccuagaaggagaagucaacaaaaucaaaaaugcacuacuaaguacaaacaaagcuguaguaagccuaucagguugcggaguaucaguauuaacauuuaaaguccucgaccuaaaaaauuacauagauaaacaacucuuaccaauacucaauaaacaaaguugcagcaucagcaacauagaaacagucaucgaauuucaacaaaaaaauaauagacuccuagaaauaacacgugaauuuucaguaaaugcuggaguaacaacaccaguaucuacauauaugcuaacaaauagcgaacuacucucacuuauuaacgauaugcccauaacaaacgaccaaaaaaaacuuaugucaaacaauguucaaauaguuagacaacaauccuacagcauaaugugcauaaucaaagaagaaguucuagcuuacguaguacaacuaccacucuaugguguuaucgacacccccuguuggaaacuucacacaucaccacuaugcacaacaaacacaaaagaaggaucaaauauuugcuuaacaagaacagauagaggaugguauugcgauaaugccggaucaguaucauuuuuuccacaagcagaaacauguaaaguacaauccaaccgaguauuuugcgacaccaugaacuccagaacacuaccaucugaagucaaccuauguaauauagauauauuuaacccaaaauaugacuguaaaaucaugacaucaaaaacugauguaaguucuaguguaauaaccagcuuaggcgccauaguaagcuguuacgguaaaacaaaaugcacagcaagcaacaaaugccgcgguauaauaaaaacauucucaaacggaugcgauuauguaaguaacaaaggaguagauacagucuccguaggcaacacauuauacuacguaaacaaacaagaaggaaaaucacuauauguaaaaggagaaccaaucauaaauuucuacgacccacuuguauuccccagcgacgaauuugaugcuuccauuucacaagucaacgaaaaaauaaaccaaucauuagccuucauaagaaaaucagacgaauuauuacauaauguuaaugucggcaaauccacaacuaauauaaugauaacaacaaucauaauaguaauaaucguuauacuacuauuacucauagcaguaggacucuucuuauauuguaaagccagauccaccccaguaacacucucaaaagaccaauuaucaggaauuaauaacaucgcauuuucaaacuaaggacuagucccuguucccagagcccacuuuuuuuucuuuuuuugaaauaaaauagccugucuuucagaucuaaaaaaaaaaaaaaaaaaaaaaaaaaaaaaaaaaaaaaaaaaaaaaaaaaaaaaaaaaaaaaaaugcaucccccccccccccccccccccccccccccccaaaggcucuuuucagagccaccagaauu

SEQ ID NO: 17028 - RNA, 1909 nt, Artificial Sequence
  mRNA product Design d-1 comprising derived and/or modified sequence from HRSV(Memphis-37)__AIY60640.1__F_DSCav1_mut5 (opt11)
gggagacccgugacccggaaguuguacggcuacgcgacuuucccucccacaaacccucgcgcccuuccuuuccuacuugggcccggcagaaagcuuaccauggaacuccccauccuuaaaaccaacgcaaucaccacaauacucgccgccgucacccucugcuuugcguccucccagaacaucaccgaagaguucuaccaaucgaccugcagcgccgucagcaagggcuaccucucagcccuccgaacaggcugguacacauccgucaucaccaucgaacucucaaacauaaaagaaaacaaguguaacggcaccgacgcgaaaguuaaacucaucaaacaagaacucgauaaauacaaaaacgcaguaaccgaacuacaacuccuaaugcaauccacacccgcagccggcagcggcuccgcaaucgccuccggcauagcagucugcaaaguccuccaccucgaaggagaagucaauaaaaucaaaaacgcccuccuauccaccaacaaagcgguugucucccuguccggaugcggaguuagcguccuaaccuucaaggugcucgaccucaaaaacuacauagacaaacaacuacuccccauacucaacaaacaaucaugcuccaucagcaacaucgagaccgucaucgaguuccaacagaaaaacaaccgccuccucgaaaucacacgagaguucuccguaaacgccggcgucacaacccccguuuccacuuacaugcucacaaacagcgaacuccucucccucaucaacgacaugccaaucaccaacgaccaaaagaaacucauguccaacaacguccaaaucguccgccaacaaagcuacagcauaaugugcaucauaaaagaagaaguacucgcguacguaguccaacuaccccuauacggcgucaucgacacccccugcuggaaacugcacacuucuccccucuguacaaccaacacuaaagaaggcucgaacaucugccucaccagaacagaccgaggaugguacugcgacaacgccggcuccgucagcuucuucccccaggccgaaacaugcaaaguacaaucaaaccgagucuucugcgacacaaugaacagcagaacucuacccuccgaaguuaaccuaugcaacaucgacaucuucaaccccaaauacgacugcaaaauaaugaccucaaaaacagacguguccagcuccguuaucaccucucucggagccaucguauccuguuauggaaaaaccaaaugcaccgccucaaacaaaugccgaggcauaaucaaaacauucucaaauggaugcgacuacguauccaacaaaggagucgacaccgucagcgugggcaauacccucuacuacgucaacaaacaggaagggaaaucccucuauguaaagggcgagcccauuauuaacuucuaugacccccucguguucccaagcgacgaguucgacgccuccauaucacaagucaaugagaaaaucaaccaaucacuagcuuucauucgcaaauccgacgaacuccuucacaacgucaacgucggcaaauccaccaccaacaucaugaucaccaccauaauuaucgucauuaucgucauacuacuccuacucaucgccgucggccucuuccucuauugcaaagcacgcucgacacccgucacccuuucaaaagaccaacuuuccggcauaaacaacauagccuucagcaacuagggacuagucccuguucccagagcccacuuuuuuuucuuuuuuugaaauaaaauagccugucuuucagaucuaaaaaaaaaaaaaaaaaaaaaaaaaaaaaaaaaaaaaaaaaaaaaaaaaaaaaaaaaaaaaaaaugcaucccccccccccccccccccccccccccccccaaaggcucuuuucagagccaccagaauu

SEQ ID NO: 17029 - RNA, 1964 nt, Artificial Sequence
  mRNA product Design d-2 comprising derived and/or modified sequence from HRSV(Memphis-37)__AIY60640.1__F_DSCav1_mut5 (opt1)
gggagagcggcucggccauuuugucccagucaguccggaggcugcggcugcagaaguaccgccugcggaguaacugcaaagaagcuuaccauggagcugcccauccucaagaccaacgccaucaccacgauccuggccgcggugacccugugcuucgccagcucccagaacaucaccgaggaguucuaccagagcacgugcuccgccgucagcaagggcuaccucuccgcccugcgcaccgggugguacaccagcgugaucaccaucgagcuguccaacaucaaggagaacaagugcaacggcaccgacgccaaggugaagcucaucaagcaggagcuggacaaguacaagaacgcggucacggagcugcagcuccugaugcagagcaccccggccgccggcuccgggagcgcgaucgccuccggcaucgccgucugcaaggugcugcaccucgagggcgaggugaacaagaucaagaacgcccugcuguccaccaacaaggccgucgugagccucuccggcugcggggugagcguccugaccuucaaggugcuggaccucaagaacuacaucgacaagcagcugcugcccauccugaacaagcagagcugcuccaucagcaacaucgagaccgucaucgaguuccagcagaagaacaaccgccuccuggagaucacgcgggaguucagcgugaacgcgggcgugaccacccccgucuccaccuacaugcugacgaacagcgagcuccugucccugaucaacgacaugccgaucaccaacgaccagaagaagcucaugagcaacaacgugcagaucgugcgccagcaguccuacagcaucaugugcaucaucaaggaggagguccuggccuacguggugcagcugccccucuacggggucaucgacacccccugcuggaagcugcacaccagcccccugugcacgaccaacaccaaggagggcuccaacaucugccucacccggacggaccgcgggugguacugcgacaacgccggcagcguguccuucuucccgcaggccgagaccugcaagguccagagcaaccggguguucugcgacaccaugaacucccggacccugcccagcgaggugaaccucugcaacaucgacaucuucaaccccaaguacgacugcaagaucaugacguccaagaccgacgucagcuccagcgugaucaccucccugggcgccaucgugagcugcuacgggaagaccaagugcacggcgagcaacaagugccgcggcaucaucaagaccuucuccaacgggugcgacuacgucagcaacaagggcguggacaccguguccgucggcaacacccuguacuacgugaacaagcaggagggcaagagccucuacgugaagggggagcccaucaucaacuucuacgacccgcuggucuuccccuccgacgaguucgacgccagcaucucccaggugaacgagaagaucaaccagagccuggccuucauccggaaguccgacgagcuccugcacaacgugaacgucggcaagagcaccacgaacaucaugaucaccaccaucaucaucgugaucaucgugauccugcugcuccugaucgccgucgggcuguuccucuacugcaaggcccgcuccacccccgugacgcugagcaaggaccagcuguccgggaucaacaacaucgcguucagcaacugaggacuaguaauaaggaaacuguaugaaugucugugggcaggaagugaagagauccuucuguaaagguuuuuggaauuaugucugcugaauaauaaacuuuuuugaaauaauaaaucugguagaaaaaugagaucuaaaaaaaaaaaaaaaaaaaaaaaaaaaaaaaaaaaaaaaaaaaaaaaaaaaaaaaaaaaaaaaaugcaucccccccccccccccccccccccccccccccaaaggcucuuuucagagccaccagaauu

SEQ ID NO: 17030 - RNA, 1964 nt, Artificial Sequence
  mRNA product Design d-2 comprising derived and/or modified sequence from HRSV(Memphis-37)__AIY60640.1__F_DSCav1_mut5 (opt1)
gggagagcggcucggccauuuugucccagucaguccggaggcugcggcugcagaaguaccgccugcggaguaacugcaaagaagcuuaccauggagcugcccauccucaagaccaacgccaucaccacgauccuggccgcggugacccugugcuucgccagcucccagaacaucaccgaggaguucuaccagagcacgugcuccgccgucagcaagggcuaccucuccgcccugcgcaccgggugguacaccagcgugaucaccaucgagcuguccaacaucaaggagaacaagugcaacggcaccgacgccaaggugaagcucaucaagcaggagcuggacaaguacaagaacgcggucacggagcugcagcuccugaugcagagcaccccggccgccggguccggcagcgccaucgcguccgggaucgccgugugcaaggugcugcaccucgagggcgaggucaacaagaucaagaacgcccugcugagcaccaacaaggccguggugucccucagcggcugcggggucuccgugcugaccuucaaggugcuggaccucaagaacuacaucgacaagcagcugcugcccauccucaacaagcagagcugcuccaucagcaacaucgagacggucaucgaguuccagcagaagaacaaccggcugcuggagaucacccgcgaguucuccgugaacgccggcgugaccacccccgucagcacguacaugcucaccaacagcgagcugcugucccucaucaacgacaugcccaucaccaacgaccagaagaagcugaugagcaacaacgugcagaucgugcggcagcaguccuacagcaucaugugcaucaucaaggaggagguccuggcguacguggugcagcucccgcuguacggggucaucgacacccccugcuggaagcugcacacgagcccccucugcaccaccaacaccaaggagggcuccaacaucugccugacgcgcaccgaccgggggugguacugcgacaacgccggcuccgugagcuucuucccccaggccgagaccugcaaggugcaguccaaccgcgucuucugcgacaccaugaacagccggacgcucccguccgaggugaaccugugcaacaucgacaucuucaaccccaaguacgacugcaagaucaugaccagcaagaccgacgucuccagcuccgugaucaccagccugggcgccaucguguccugcuacgggaagacgaagugcaccgccagcaacaagugccggggcaucaucaagaccuucuccaacgggugcgacuacgucagcaacaagggcguggacaccgugagcgucggcaacacgcucuacuacgugaacaagcaggaggggaagucccuguacgugaagggcgagcccaucaucaacuucuacgacccccuggucuucccgagcgacgaguucgacgcguccaucagccaggugaacgagaagaucaaccagucccucgccuucauccgcaagagcgacgagcugcugcacaacgugaacgucgggaaguccaccaccaacaucaugaucaccaccaucaucaucgugaucaucgugauccuccugcugcucaucgccgucggccuguuccuguacugcaaggcccggagcacgcccgugacccuguccaaggaccagcucagcgggaucaacaacaucgccuucuccaacugaggacuaguaauaaggaaacuguaugaaugucugugggcaggaagugaagagauccuucuguaaagguuuuuggaauuaugucugcugaauaauaaacuuuuuugaaauaauaaaucugguagaaaaaugagaucuaaaaaaaaaaaaaaaaaaaaaaaaaaaaaaaaaaaaaaaaaaaaaaaaaaaaaaaaaaaaaaaaugcaucccccccccccccccccccccccccccccccaaaggcucuuuucagagccaccagaauu

SEQ ID NO: 17031 - RNA, 1964 nt, Artificial Sequence
  mRNA product Design d-2 comprising derived and/or modified sequence from HRSV(Memphis-37)__AIY60640.1__F_DSCav1_mut5 (opt2)
gggagagcggcucggccauuuugucccagucaguccggaggcugcggcugcagaaguaccgccugcggaguaacugcaaagaagcuuaccauggagcuccccauccucaagaccaacgccaucaccaccauccucgccgccgucacccucugcuucgccuccucccagaacaucaccgaggaguucuaccaguccaccugcuccgccgucuccaagggcuaccucuccgcccuccgcaccggcugguacaccuccgucaucaccaucgagcucuccaacaucaaggagaacaagugcaacggcaccgacgccaaggucaagcucaucaagcaggagcucgacaaguacaagaacgccgucaccgagcuccagcuccucaugcaguccacccccgccgccggcuccggcuccgccaucgccuccggcaucgccgucugcaagguccuccaccucgagggcgaggucaacaagaucaagaacgcccuccucuccaccaacaaggccgucgucucccucuccggcugcggcgucuccguccucaccuucaagguccucgaccucaagaacuacaucgacaagcagcuccuccccauccucaacaagcaguccugcuccaucuccaacaucgagaccgucaucgaguuccagcagaagaacaaccgccuccucgagaucacccgcgaguucuccgucaacgccggcgucaccacccccgucuccaccuacaugcucaccaacuccgagcuccucucccucaucaacgacaugcccaucaccaacgaccagaagaagcucauguccaacaacguccagaucguccgccagcaguccuacuccaucaugugcaucaucaaggaggagguccucgccuacgucguccagcucccccucuacggcgucaucgacacccccugcuggaagcuccacaccuccccccucugcaccaccaacaccaaggagggcuccaacaucugccucacccgcaccgaccgcggcugguacugcgacaacgccggcuccgucuccuucuucccccaggccgagaccugcaagguccaguccaaccgcgucuucugcgacaccaugaacucccgcacccuccccuccgaggucaaccucugcaacaucgacaucuucaaccccaaguacgacugcaagaucaugaccuccaagaccgacgucuccuccuccgucaucaccucccucggcgccaucgucuccugcuacggcaagaccaagugcaccgccuccaacaagugccgcggcaucaucaagaccuucuccaacggcugcgacuacgucuccaacaagggcgucgacaccgucuccgucggcaacacccucuacuacgucaacaagcaggagggcaagucccucuacgucaagggcgagcccaucaucaacuucuacgacccccucgucuuccccuccgacgaguucgacgccuccaucucccaggucaacgagaagaucaaccagucccucgccuucauccgcaaguccgacgagcuccuccacaacgucaacgucggcaaguccaccaccaacaucaugaucaccaccaucaucaucgucaucaucgucauccuccuccuccucaucgccgucggccucuuccucuacugcaaggcccgcuccacccccgucacccucuccaaggaccagcucuccggcaucaacaacaucgccuucuccaacugaggacuaguaauaaggaaacuguaugaaugucugugggcaggaagugaagagauccuucuguaaagguuuuuggaauuaugucugcugaauaauaaacuuuuuugaaauaauaaaucugguagaaaaaugagaucuaaaaaaaaaaaaaaaaaaaaaaaaaaaaaaaaaaaaaaaaaaaaaaaaaaaaaaaaaaaaaaaaugcaucccccccccccccccccccccccccccccccaaaggcucuuuucagagccaccagaauu

SEQ ID NO: 17032 - RNA, 1964 nt, Artificial Sequence
  mRNA product Design d-2 comprising derived and/or modified sequence from HRSV(Memphis-37)__AIY60640.1__F_DSCav1_mut5 (opt3)
gggagagcggcucggccauuuugucccagucaguccggaggcugcggcugcagaaguaccgccugcggaguaacugcaaagaagcuuaccauggagcugcccauccucaagaccaacgccauuacaacuauacuugcugcagugacgcugugcuucgccagcucccagaauaucaccgaagaguuuuaccaaucuacauguucagcggucaguaaaggcuauuugagcgcuuuaagaacugggugguacaccuccguuauuacaaucgaacugucuaacauuaaggagaauaaaugcaacggaaccgacgccaaggugaaacuaaucaagcaggaacucgauaaguauaaaaaugcaguaacugagcugcagcuucugaugcagucgaccccugccgcugguucaggcagcgcaauagccagugggaucgcuguguguaaggucuugcaccucgagggagaagugaacaaaauuaagaaugcccugcuguccacaaacaaagcgguugugucucucagcggcugcggugucuccguguuaacguucaagguacuggaccuuaagaauuacaucgauaaacaauugcugccaauucuaaacaagcagucauguaguaucagcaauauagagacuguuauugaauuucagcagaaaaacaauaggcuccuggagaucacccgggaguucucugugaacgcaggggucacaacuccgguguccaccuauaugcuuacaaauucagaacuguugagccucauuaacgacaugcccaucaccaacgaucaaaagaaacugaugaguaauaacgugcagaucguccgccagcagucuuacuccauuaugugcauaaucaaggaggaaguuuuagccuaugugguacaacugccucucuacggagugauugacacgccauguuggaaacuucauacuagcccccugugcacaaccaauacuaaggagggcucgaacaucuguuugacacgaaccgaucguggcugguacugcgacaaugcugggucugucuccuuuuucccucaggccgaaacguguaaggugcagucaaacagaguguuuugcgauaccaugaauaguagaacacugccaagcgaggugaaccucugcaauauagacauuuucaaccccaaauaugauuguaagaucaugacuuccaaaaccgacgucucuagcucagugaucacaagucugggagcaauuguauccugcuacgguaagacuaaauguaccgcuagcaauaagugcaggggcaucauuaagacauuuucuaacgggugugauuauguuucaaauaaaggaguggacaccgucagugugggcaacacucuuuacuaugucaauaagcaagaggguaaaagccuguacgugaagggggaaccuauaaucaacuucuaugacccauugguuuuuccguccgaugaguucgacgccucuauuucgcagguuaacgagaaaaucaaucagagccucgcguuuauccggaaguccgaugaacuguuacacaacguaaaugucggaaagucaacgacaaacauuaugauaaccacuaucauuaucgugauuaucguuauacugcuacuccugaucgccgugggccuuuucuuguacugcaaagcacgcaguacccccgucacacugucuaaggaccagcucagcggcauuaauaacaucgcuuucuccaauugaggacuaguaauaaggaaacuguaugaaugucugugggcaggaagugaagagauccuucuguaaagguuuuuggaauuaugucugcugaauaauaaacuuuuuugaaauaauaaaucugguagaaaaaugagaucuaaaaaaaaaaaaaaaaaaaaaaaaaaaaaaaaaaaaaaaaaaaaaaaaaaaaaaaaaaaaaaaaugcaucccccccccccccccccccccccccccccccaaaggcucuuuucagagccaccagaauu

SEQ ID NO: 17033 - RNA, 1964 nt, Artificial Sequence
  mRNA product Design d-2 comprising derived and/or modified sequence from HRSV(Memphis-37)__AIY60640.1__F_DSCav1_mut5 (opt4)
gggagagcggcucggccauuuugucccagucaguccggaggcugcggcugcagaaguaccgccugcggaguaacugcaaagaagcuuaccauggagcugcccauccugaagaccaacgccaucaccaccauccuggccgccgugacccugugcuucgccagcagccagaacaucaccgaggaguucuaccagagcaccugcagcgccgugagcaagggcuaccugagcgcccugagaaccggcugguacaccagcgugaucaccaucgagcugagcaacaucaaggagaacaagugcaacggcaccgacgccaaggugaagcugaucaagcaggagcuggacaaguacaagaacgccgugaccgagcugcagcugcugaugcagagcacccccgccgccggcagcggcagcgccaucgccagcggcaucgccgugugcaaggugcugcaccuggagggcgaggugaacaagaucaagaacgcccugcugagcaccaacaaggccguggugagccugagcggcugcggcgugagcgugcugaccuucaaggugcuggaccugaagaacuacaucgacaagcagcugcugcccauccugaacaagcagagcugcagcaucagcaacaucgagaccgugaucgaguuccagcagaagaacaacagacugcuggagaucaccagagaguucagcgugaacgccggcgugaccacccccgugagcaccuacaugcugaccaacagcgagcugcugagccugaucaacgacaugcccaucaccaacgaccagaagaagcugaugagcaacaacgugcagaucgugagacagcagagcuacagcaucaugugcaucaucaaggaggaggugcuggccuacguggugcagcugccccuguacggcgugaucgacacccccugcuggaagcugcacaccagcccccugugcaccaccaacaccaaggagggcagcaacaucugccugaccagaaccgacagaggcugguacugcgacaacgccggcagcgugagcuucuucccccaggccgagaccugcaaggugcagagcaacagaguguucugcgacaccaugaacagcagaacccugcccagcgaggugaaccugugcaacaucgacaucuucaaccccaaguacgacugcaagaucaugaccagcaagaccgacgugagcagcagcgugaucaccagccugggcgccaucgugagcugcuacggcaagaccaagugcaccgccagcaacaagugcagaggcaucaucaagaccuucagcaacggcugcgacuacgugagcaacaagggcguggacaccgugagcgugggcaacacccuguacuacgugaacaagcaggagggcaagagccuguacgugaagggcgagcccaucaucaacuucuacgacccccugguguuccccagcgacgaguucgacgccagcaucagccaggugaacgagaagaucaaccagagccuggccuucaucagaaagagcgacgagcugcugcacaacgugaacgugggcaagagcaccaccaacaucaugaucaccaccaucaucaucgugaucaucgugauccugcugcugcugaucgccgugggccuguuccuguacugcaaggccagaagcacccccgugacccugagcaaggaccagcugagcggcaucaacaacaucgccuucagcaacugaggacuaguaauaaggaaacuguaugaaugucugugggcaggaagugaagagauccuucuguaaagguuuuuggaauuaugucugcugaauaauaaacuuuuuugaaauaauaaaucugguagaaaaaugagaucuaaaaaaaaaaaaaaaaaaaaaaaaaaaaaaaaaaaaaaaaaaaaaaaaaaaaaaaaaaaaaaaaugcaucccccccccccccccccccccccccccccccaaaggcucuuuucagagccaccagaauu

SEQ ID NO: 17034 - RNA, 1964 nt, Artificial Sequence
  mRNA product Design d-2 comprising derived and/or modified sequence from HRSV(Memphis-37)__AIY60640.1__F_DSCav1_mut5 (opt5)
gggagagcggcucggccauuuugucccagucaguccggaggcugcggcugcagaaguaccgccugcggaguaacugcaaagaagcuuaccauggagcugcccauccucaagaccaacgccauuacaacgauccuggcugccgugacccuuugcuucgcgagcucccagaauauuacagaagaguuuuaccaaucuaccuguagcgcugucuccaaaggcuaucugucugcccucagaacagggugguacaccagcguuaucacaauugaacuguccaacaucaaggagaauaaaugcaacggaaccgacgccaaggugaaacuuaucaagcaggaacuggauaaguauaaaaaugcugugacggagcuccagcugcugaugcagucuaccccugccgcuggcagcggguccgccauugcgagcggaaucgccgucuguaaggugcuccaccuggagggcgaaguuaacaaaauuaagaaugcccuucugucuacaaacaaagcuguggucucccucagcgggugcggagugucuguucugaccuucaaggugcuugaccugaagaauuacaucgauaaacaacuccugccgauucugaacaagcaguccuguagcaucucuaauauugagacagucaucgaauuucagcagaaaaacaaucggcuccuggagaucacccgcgaguucuccgugaacgcuggcgugacgacacccgucagcaccuauaugcuuacaaauuccgaacugcucucucugauuaacgacaugccuaucaccaacgaucaaaagaaacuuaugagcaauaacguucagauugugagacagcaguccuacagcaucaugugcauuaucaaggaggaagugcuggccuaugucgugcaacucccccuguacggcguuaucgacaccccuuguuggaaacugcauacaucuccccucugcacgaccaauacaaaggagggguccaacauuugucugacccggacagaucgcggaugguacugcgacaaugcgggcagcgugagcuuuuucccucaggccgaaaccuguaagguccagucuaacagaguguuuugcgauacgaugaacuccagaacacugccgucugagguuaaucucugcaauaucgacauuuucaaccccaaauaugauuguaagaucaugaccagcaaaaccgacguguccagcucugucauuacaucccugggggcuaucgugagcugcuacggaaagaccaaauguacagccucuaauaagugccggggcaucauuaagacguuuuccaacgggugugauuaugucagcaauaaaggaguggacaccguuuccgugggcaacacacuuuacuaugucaauaagcaagagggcaaaucucuguacgugaagggggaaccuaucauuaacuucuaugacccccucguuuuuccuagcgaugaguucgacgcuuccaucucucaggugaacgagaaaauuaaucagagccuggccuuuauccgcaaguccgaugaacugcuccacaacgucaaugugggaaagagcaccacaaacauuaugaucaccacgaucauuaucgugauuaucguuauucugcuucugcucaucgccgucggccuguuccuguacugcaaagcuagaucuacccccgugacacuuuccaaggaccagcucagcgggaucaauaacauugcguucucuaauugaggacuaguaauaaggaaacuguaugaaugucugugggcaggaagugaagagauccuucuguaaagguuuuuggaauuaugucugcugaauaauaaacuuuuuugaaauaauaaaucugguagaaaaaugagaucuaaaaaaaaaaaaaaaaaaaaaaaaaaaaaaaaaaaaaaaaaaaaaaaaaaaaaaaaaaaaaaaaugcaucccccccccccccccccccccccccccccccaaaggcucuuuucagagccaccagaauu

SEQ ID NO: 17035 - RNA, 1964 nt, Artificial Sequence
  mRNA product Design d-2 comprising derived and/or modified sequence from HRSV(Memphis-37)__AIY60640.1__F_DSCav1_mut5 (opt6)
gggagagcggcucggccauuuugucccagucaguccggaggcugcggcugcagaaguaccgccugcggaguaacugcaaagaagcuuaccauggaacucccaaucuuaaaaacaaacgcaauaacuacaauacucgcagcaguaacacuaugcuucgcaucaucacaaaacauaaccgaagaauuuuaccaaaguacaugcucagcaguaucaaaagguuaccucucagcccuaagaaccggaugguacacaucaguaaucacuauagaacuauccaauauaaaagaaaacaaaugcaacggcacugacgcaaaaguuaaauuaauuaaacaagaacucgauaaauauaaaaaugcaguaacagaacuacaacuacuaaugcaaagcaccccagcugcaggaagcggaucagcaaucgcaucaggaauagcaguauguaaaguacuacaccuagaaggagaagucaacaaaaucaaaaaugcacuacuaaguacaaacaaagcuguaguaagccuaucagguugcggaguaucaguauuaacauuuaaaguccucgaccuaaaaaauuacauagauaaacaacucuuaccaauacucaauaaacaaaguugcagcaucagcaacauagaaacagucaucgaauuucaacaaaaaaauaauagacuccuagaaauaacacgugaauuuucaguaaaugcuggaguaacaacaccaguaucuacauauaugcuaacaaauagcgaacuacucucacuuauuaacgauaugcccauaacaaacgaccaaaaaaaacuuaugucaaacaauguucaaauaguuagacaacaauccuacagcauaaugugcauaaucaaagaagaaguucuagcuuacguaguacaacuaccacucuaugguguuaucgacacccccuguuggaaacuucacacaucaccacuaugcacaacaaacacaaaagaaggaucaaauauuugcuuaacaagaacagauagaggaugguauugcgauaaugccggaucaguaucauuuuuuccacaagcagaaacauguaaaguacaauccaaccgaguauuuugcgacaccaugaacuccagaacacuaccaucugaagucaaccuauguaauauagauauauuuaacccaaaauaugacuguaaaaucaugacaucaaaaacugauguaaguucuaguguaauaaccagcuuaggcgccauaguaagcuguuacgguaaaacaaaaugcacagcaagcaacaaaugccgcgguauaauaaaaacauucucaaacggaugcgauuauguaaguaacaaaggaguagauacagucuccguaggcaacacauuauacuacguaaacaaacaagaaggaaaaucacuauauguaaaaggagaaccaaucauaaauuucuacgacccacuuguauuccccagcgacgaauuugaugcuuccauuucacaagucaacgaaaaaauaaaccaaucauuagccuucauaagaaaaucagacgaauuauuacauaauguuaaugucggcaaauccacaacuaauauaaugauaacaacaaucauaauaguaauaaucguuauacuacuauuacucauagcaguaggacucuucuuauauuguaaagccagauccaccccaguaacacucucaaaagaccaauuaucaggaauuaauaacaucgcauuuucaaacuaaggacuaguaauaaggaaacuguaugaaugucugugggcaggaagugaagagauccuucuguaaagguuuuuggaauuaugucugcugaauaauaaacuuuuuugaaauaauaaaucugguagaaaaaugagaucuaaaaaaaaaaaaaaaaaaaaaaaaaaaaaaaaaaaaaaaaaaaaaaaaaaaaaaaaaaaaaaaaugcaucccccccccccccccccccccccccccccccaaaggcucuuuucagagccaccagaauu

SEQ ID NO: 17036 - RNA, 1964 nt, Artificial Sequence
  mRNA product Design d-2 comprising derived and/or modified sequence from HRSV(Memphis-37)__AIY60640.1__F_DSCav1_mut5 (opt11)
gggagagcggcucggccauuuugucccagucaguccggaggcugcggcugcagaaguaccgccugcggaguaacugcaaagaagcuuaccauggaacuccccauccuuaaaaccaacgcaaucaccacaauacucgccgccgucacccucugcuuugcguccucccagaacaucaccgaagaguucuaccaaucgaccugcagcgccgucagcaagggcuaccucucagcccuccgaacaggcugguacacauccgucaucaccaucgaacucucaaacauaaaagaaaacaaguguaacggcaccgacgcgaaaguuaaacucaucaaacaagaacucgauaaauacaaaaacgcaguaaccgaacuacaacuccuaaugcaauccacacccgcagccggcagcggcuccgcaaucgccuccggcauagcagucugcaaaguccuccaccucgaaggagaagucaauaaaaucaaaaacgcccuccuauccaccaacaaagcgguugucucccuguccggaugcggaguuagcguccuaaccuucaaggugcucgaccucaaaaacuacauagacaaacaacuacuccccauacucaacaaacaaucaugcuccaucagcaacaucgagaccgucaucgaguuccaacagaaaaacaaccgccuccucgaaaucacacgagaguucuccguaaacgccggcgucacaacccccguuuccacuuacaugcucacaaacagcgaacuccucucccucaucaacgacaugccaaucaccaacgaccaaaagaaacucauguccaacaacguccaaaucguccgccaacaaagcuacagcauaaugugcaucauaaaagaagaaguacucgcguacguaguccaacuaccccuauacggcgucaucgacacccccugcuggaaacugcacacuucuccccucuguacaaccaacacuaaagaaggcucgaacaucugccucaccagaacagaccgaggaugguacugcgacaacgccggcuccgucagcuucuucccccaggccgaaacaugcaaaguacaaucaaaccgagucuucugcgacacaaugaacagcagaacucuacccuccgaaguuaaccuaugcaacaucgacaucuucaaccccaaauacgacugcaaaauaaugaccucaaaaacagacguguccagcuccguuaucaccucucucggagccaucguauccuguuauggaaaaaccaaaugcaccgccucaaacaaaugccgaggcauaaucaaaacauucucaaauggaugcgacuacguauccaacaaaggagucgacaccgucagcgugggcaauacccucuacuacgucaacaaacaggaagggaaaucccucuauguaaagggcgagcccauuauuaacuucuaugacccccucguguucccaagcgacgaguucgacgccuccauaucacaagucaaugagaaaaucaaccaaucacuagcuuucauucgcaaauccgacgaacuccuucacaacgucaacgucggcaaauccaccaccaacaucaugaucaccaccauaauuaucgucauuaucgucauacuacuccuacucaucgccgucggccucuuccucuauugcaaagcacgcucgacacccgucacccuuucaaaagaccaacuuuccggcauaaacaacauagccuucagcaacuagggacuaguaauaaggaaacuguaugaaugucugugggcaggaagugaagagauccuucuguaaagguuuuuggaauuaugucugcugaauaauaaacuuuuuugaaauaauaaaucugguagaaaaaugagaucuaaaaaaaaaaaaaaaaaaaaaaaaaaaaaaaaaaaaaaaaaaaaaaaaaaaaaaaaaaaaaaaaugcaucccccccccccccccccccccccccccccccaaaggcucuuuucagagccaccagaauu

SEQ ID NO: 17037 - RNA, 2280 nt, Artificial Sequence
  mRNA product Design d-3 comprising derived and/or modified sequence from HRSV(Memphis-37)__AIY60640.1__F_DSCav1_mut5 (opt1)
gggagagggcgcuuggcuugcaaggacccugagcugcggcauugaagcacacccaacccaacucgacugaagucagccucacugaaccggaucugagaaucuucucucucugggcuugccagggcucuccgaaccuagcuagcauccucuucaauuccaacuagaaagcuuaccauggagcugcccauccucaagaccaacgccaucaccacgauccuggccgcggugacccugugcuucgccagcucccagaacaucaccgaggaguucuaccagagcacgugcuccgccgucagcaagggcuaccucuccgcccugcgcaccgggugguacaccagcgugaucaccaucgagcuguccaacaucaaggagaacaagugcaacggcaccgacgccaaggugaagcucaucaagcaggagcuggacaaguacaagaacgcggucacggagcugcagcuccugaugcagagcaccccggccgccggcuccgggagcgcgaucgccuccggcaucgccgucugcaaggugcugcaccucgagggcgaggugaacaagaucaagaacgcccugcuguccaccaacaaggccgucgugagccucuccggcugcggggugagcguccugaccuucaaggugcuggaccucaagaacuacaucgacaagcagcugcugcccauccugaacaagcagagcugcuccaucagcaacaucgagaccgucaucgaguuccagcagaagaacaaccgccuccuggagaucacgcgggaguucagcgugaacgcgggcgugaccacccccgucuccaccuacaugcugacgaacagcgagcuccugucccugaucaacgacaugccgaucaccaacgaccagaagaagcucaugagcaacaacgugcagaucgugcgccagcaguccuacagcaucaugugcaucaucaaggaggagguccuggccuacguggugcagcugccccucuacggggucaucgacacccccugcuggaagcugcacaccagcccccugugcacgaccaacaccaaggagggcuccaacaucugccucacccggacggaccgcgggugguacugcgacaacgccggcagcguguccuucuucccgcaggccgagaccugcaagguccagagcaaccggguguucugcgacaccaugaacucccggacccugcccagcgaggugaaccucugcaacaucgacaucuucaaccccaaguacgacugcaagaucaugacguccaagaccgacgucagcuccagcgugaucaccucccugggcgccaucgugagcugcuacgggaagaccaagugcacggcgagcaacaagugccgcggcaucaucaagaccuucuccaacgggugcgacuacgucagcaacaagggcguggacaccguguccgucggcaacacccuguacuacgugaacaagcaggagggcaagagccucuacgugaagggggagcccaucaucaacuucuacgacccgcuggucuuccccuccgacgaguucgacgccagcaucucccaggugaacgagaagaucaaccagagccuggccuucauccggaaguccgacgagcuccugcacaacgugaacgucggcaagagcaccacgaacaucaugaucaccaccaucaucaucgugaucaucgugauccugcugcuccugaucgccgucgggcuguuccucuacugcaaggcccgcuccacccccgugacgcugagcaaggaccagcuguccgggaucaacaacaucgcguucagcaacugaggacuagugaagggaacacccaaauuuaauucagccuuaagcacaauuaauuaagagugaaacguaauuguacaagcaguuggucacccaccauagggcaugaucaacaccgcaaccuuuccuuuuucccccagugauucugaaaaaccccucuucccuucagcuugcuuagauguuccaaauuuaguaagcuuaaggcggccuacagaagaaaaagaaaaaaaaggccacaaaaguucccucucacuuucaguaaauaaaauaaaagcagcaacagaaauaaagaaauaaaugaaauucaaaaugaaauaaauauuguguugugcagcauuaaaaaaucaauaaaaauuaaaaaugagcaagaucuaaaaaaaaaaaaaaaaaaaaaaaaaaaaaaaaaaaaaaaaaaaaaaaaaaaaaaaaaaaaaaaaugcaucccccccccccccccccccccccccccccccaaaggcucuuuucagagccaccagaauu

SEQ ID NO: 17038 - RNA, 2280 nt, Artificial Sequence
  mRNA product Design d-3 comprising derived and/or modified sequence from HRSV(Memphis-37)__AIY60640.1__F_DSCav1_mut5 (opt1)
gggagagggcgcuuggcuugcaaggacccugagcugcggcauugaagcacacccaacccaacucgacugaagucagccucacugaaccggaucugagaaucuucucucucugggcuugccagggcucuccgaaccuagcuagcauccucuucaauuccaacuagaaagcuuaccauggagcugcccauccucaagaccaacgccaucaccacgauccuggccgcggugacccugugcuucgccagcucccagaacaucaccgaggaguucuaccagagcacgugcuccgccgucagcaagggcuaccucuccgcccugcgcaccgggugguacaccagcgugaucaccaucgagcuguccaacaucaaggagaacaagugcaacggcaccgacgccaaggugaagcucaucaagcaggagcuggacaaguacaagaacgcggucacggagcugcagcuccugaugcagagcaccccggccgccggguccggcagcgccaucgcguccgggaucgccgugugcaaggugcugcaccucgagggcgaggucaacaagaucaagaacgcccugcugagcaccaacaaggccguggugucccucagcggcugcggggucuccgugcugaccuucaaggugcuggaccucaagaacuacaucgacaagcagcugcugcccauccucaacaagcagagcugcuccaucagcaacaucgagacggucaucgaguuccagcagaagaacaaccggcugcuggagaucacccgcgaguucuccgugaacgccggcgugaccacccccgucagcacguacaugcucaccaacagcgagcugcugucccucaucaacgacaugcccaucaccaacgaccagaagaagcugaugagcaacaacgugcagaucgugcggcagcaguccuacagcaucaugugcaucaucaaggaggagguccuggcguacguggugcagcucccgcuguacggggucaucgacacccccugcuggaagcugcacacgagcccccucugcaccaccaacaccaaggagggcuccaacaucugccugacgcgcaccgaccgggggugguacugcgacaacgccggcuccgugagcuucuucccccaggccgagaccugcaaggugcaguccaaccgcgucuucugcgacaccaugaacagccggacgcucccguccgaggugaaccugugcaacaucgacaucuucaaccccaaguacgacugcaagaucaugaccagcaagaccgacgucuccagcuccgugaucaccagccugggcgccaucguguccugcuacgggaagacgaagugcaccgccagcaacaagugccggggcaucaucaagaccuucuccaacgggugcgacuacgucagcaacaagggcguggacaccgugagcgucggcaacacgcucuacuacgugaacaagcaggaggggaagucccuguacgugaagggcgagcccaucaucaacuucuacgacccccuggucuucccgagcgacgaguucgacgcguccaucagccaggugaacgagaagaucaaccagucccucgccuucauccgcaagagcgacgagcugcugcacaacgugaacgucgggaaguccaccaccaacaucaugaucaccaccaucaucaucgugaucaucgugauccuccugcugcucaucgccgucggccuguuccuguacugcaaggcccggagcacgcccgugacccuguccaaggaccagcucagcgggaucaacaacaucgccuucuccaacugaggacuagugaagggaacacccaaauuuaauucagccuuaagcacaauuaauuaagagugaaacguaauuguacaagcaguuggucacccaccauagggcaugaucaacaccgcaaccuuuccuuuuucccccagugauucugaaaaaccccucuucccuucagcuugcuuagauguuccaaauuuaguaagcuuaaggcggccuacagaagaaaaagaaaaaaaaggccacaaaaguucccucucacuuucaguaaauaaaauaaaagcagcaacagaaauaaagaaauaaaugaaauucaaaaugaaauaaauauuguguugugcagcauuaaaaaaucaauaaaaauuaaaaaugagcaagaucuaaaaaaaaaaaaaaaaaaaaaaaaaaaaaaaaaaaaaaaaaaaaaaaaaaaaaaaaaaaaaaaaugcaucccccccccccccccccccccccccccccccaaaggcucuuuucagagccaccagaauu

SEQ ID NO: 17039 - RNA, 2280 nt, Artificial Sequence
  mRNA product Design d-3 comprising derived and/or modified sequence from HRSV(Memphis-37)__AIY60640.1__F_DSCav1_mut5 (opt2)
gggagagggcgcuuggcuugcaaggacccugagcugcggcauugaagcacacccaacccaacucgacugaagucagccucacugaaccggaucugagaaucuucucucucugggcuugccagggcucuccgaaccuagcuagcauccucuucaauuccaacuagaaagcuuaccauggagcuccccauccucaagaccaacgccaucaccaccauccucgccgccgucacccucugcuucgccuccucccagaacaucaccgaggaguucuaccaguccaccugcuccgccgucuccaagggcuaccucuccgcccuccgcaccggcugguacaccuccgucaucaccaucgagcucuccaacaucaaggagaacaagugcaacggcaccgacgccaaggucaagcucaucaagcaggagcucgacaaguacaagaacgccgucaccgagcuccagcuccucaugcaguccacccccgccgccggcuccggcuccgccaucgccuccggcaucgccgucugcaagguccuccaccucgagggcgaggucaacaagaucaagaacgcccuccucuccaccaacaaggccgucgucucccucuccggcugcggcgucuccguccucaccuucaagguccucgaccucaagaacuacaucgacaagcagcuccuccccauccucaacaagcaguccugcuccaucuccaacaucgagaccgucaucgaguuccagcagaagaacaaccgccuccucgagaucacccgcgaguucuccgucaacgccggcgucaccacccccgucuccaccuacaugcucaccaacuccgagcuccucucccucaucaacgacaugcccaucaccaacgaccagaagaagcucauguccaacaacguccagaucguccgccagcaguccuacuccaucaugugcaucaucaaggaggagguccucgccuacgucguccagcucccccucuacggcgucaucgacacccccugcuggaagcuccacaccuccccccucugcaccaccaacaccaaggagggcuccaacaucugccucacccgcaccgaccgcggcugguacugcgacaacgccggcuccgucuccuucuucccccaggccgagaccugcaagguccaguccaaccgcgucuucugcgacaccaugaacucccgcacccuccccuccgaggucaaccucugcaacaucgacaucuucaaccccaaguacgacugcaagaucaugaccuccaagaccgacgucuccuccuccgucaucaccucccucggcgccaucgucuccugcuacggcaagaccaagugcaccgccuccaacaagugccgcggcaucaucaagaccuucuccaacggcugcgacuacgucuccaacaagggcgucgacaccgucuccgucggcaacacccucuacuacgucaacaagcaggagggcaagucccucuacgucaagggcgagcccaucaucaacuucuacgacccccucgucuuccccuccgacgaguucgacgccuccaucucccaggucaacgagaagaucaaccagucccucgccuucauccgcaaguccgacgagcuccuccacaacgucaacgucggcaaguccaccaccaacaucaugaucaccaccaucaucaucgucaucaucgucauccuccuccuccucaucgccgucggccucuuccucuacugcaaggcccgcuccacccccgucacccucuccaaggaccagcucuccggcaucaacaacaucgccuucuccaacugaggacuagugaagggaacacccaaauuuaauucagccuuaagcacaauuaauuaagagugaaacguaauuguacaagcaguuggucacccaccauagggcaugaucaacaccgcaaccuuuccuuuuucccccagugauucugaaaaaccccucuucccuucagcuugcuuagauguuccaaauuuaguaagcuuaaggcggccuacagaagaaaaagaaaaaaaaggccacaaaaguucccucucacuuucaguaaauaaaauaaaagcagcaacagaaauaaagaaauaaaugaaauucaaaaugaaauaaauauuguguugugcagcauuaaaaaaucaauaaaaauuaaaaaugagcaagaucuaaaaaaaaaaaaaaaaaaaaaaaaaaaaaaaaaaaaaaaaaaaaaaaaaaaaaaaaaaaaaaaaugcaucccccccccccccccccccccccccccccccaaaggcucuuuucagagccaccagaauu

SEQ ID NO: 17040 - RNA, 2280 nt, Artificial Sequence
  mRNA product Design d-3 comprising derived and/or modified sequence from HRSV(Memphis-37)__AIY60640.1__F_DSCav1_mut5 (opt3)
gggagagggcgcuuggcuugcaaggacccugagcugcggcauugaagcacacccaacccaacucgacugaagucagccucacugaaccggaucugagaaucuucucucucugggcuugccagggcucuccgaaccuagcuagcauccucuucaauuccaacuagaaagcuuaccauggagcugcccauccucaagaccaacgccauuacaacuauacuugcugcagugacgcugugcuucgccagcucccagaauaucaccgaagaguuuuaccaaucuacauguucagcggucaguaaaggcuauuugagcgcuuuaagaacugggugguacaccuccguuauuacaaucgaacugucuaacauuaaggagaauaaaugcaacggaaccgacgccaaggugaaacuaaucaagcaggaacucgauaaguauaaaaaugcaguaacugagcugcagcuucugaugcagucgaccccugccgcugguucaggcagcgcaauagccagugggaucgcuguguguaaggucuugcaccucgagggagaagugaacaaaauuaagaaugcccugcuguccacaaacaaagcgguugugucucucagcggcugcggugucuccguguuaacguucaagguacuggaccuuaagaauuacaucgauaaacaauugcugccaauucuaaacaagcagucauguaguaucagcaauauagagacuguuauugaauuucagcagaaaaacaauaggcuccuggagaucacccgggaguucucugugaacgcaggggucacaacuccgguguccaccuauaugcuuacaaauucagaacuguugagccucauuaacgacaugcccaucaccaacgaucaaaagaaacugaugaguaauaacgugcagaucguccgccagcagucuuacuccauuaugugcauaaucaaggaggaaguuuuagccuaugugguacaacugccucucuacggagugauugacacgccauguuggaaacuucauacuagcccccugugcacaaccaauacuaaggagggcucgaacaucuguuugacacgaaccgaucguggcugguacugcgacaaugcugggucugucuccuuuuucccucaggccgaaacguguaaggugcagucaaacagaguguuuugcgauaccaugaauaguagaacacugccaagcgaggugaaccucugcaauauagacauuuucaaccccaaauaugauuguaagaucaugacuuccaaaaccgacgucucuagcucagugaucacaagucugggagcaauuguauccugcuacgguaagacuaaauguaccgcuagcaauaagugcaggggcaucauuaagacauuuucuaacgggugugauuauguuucaaauaaaggaguggacaccgucagugugggcaacacucuuuacuaugucaauaagcaagaggguaaaagccuguacgugaagggggaaccuauaaucaacuucuaugacccauugguuuuuccguccgaugaguucgacgccucuauuucgcagguuaacgagaaaaucaaucagagccucgcguuuauccggaaguccgaugaacuguuacacaacguaaaugucggaaagucaacgacaaacauuaugauaaccacuaucauuaucgugauuaucguuauacugcuacuccugaucgccgugggccuuuucuuguacugcaaagcacgcaguacccccgucacacugucuaaggaccagcucagcggcauuaauaacaucgcuuucuccaauugaggacuagugaagggaacacccaaauuuaauucagccuuaagcacaauuaauuaagagugaaacguaauuguacaagcaguuggucacccaccauagggcaugaucaacaccgcaaccuuuccuuuuucccccagugauucugaaaaaccccucuucccuucagcuugcuuagauguuccaaauuuaguaagcuuaaggcggccuacagaagaaaaagaaaaaaaaggccacaaaaguucccucucacuuucaguaaauaaaauaaaagcagcaacagaaauaaagaaauaaaugaaauucaaaaugaaauaaauauuguguugugcagcauuaaaaaaucaauaaaaauuaaaaaugagcaagaucuaaaaaaaaaaaaaaaaaaaaaaaaaaaaaaaaaaaaaaaaaaaaaaaaaaaaaaaaaaaaaaaaugcaucccccccccccccccccccccccccccccccaaaggcucuuuucagagccaccagaauu

SEQ ID NO: 17041 - RNA, 2280 nt, Artificial Sequence
  mRNA product Design d-3 comprising derived and/or modified sequence from HRSV(Memphis-37)__AIY60640.1__F_DSCav1_mut5 (opt4)
gggagagggcgcuuggcuugcaaggacccugagcugcggcauugaagcacacccaacccaacucgacugaagucagccucacugaaccggaucugagaaucuucucucucugggcuugccagggcucuccgaaccuagcuagcauccucuucaauuccaacuagaaagcuuaccauggagcugcccauccugaagaccaacgccaucaccaccauccuggccgccgugacccugugcuucgccagcagccagaacaucaccgaggaguucuaccagagcaccugcagcgccgugagcaagggcuaccugagcgcccugagaaccggcugguacaccagcgugaucaccaucgagcugagcaacaucaaggagaacaagugcaacggcaccgacgccaaggugaagcugaucaagcaggagcuggacaaguacaagaacgccgugaccgagcugcagcugcugaugcagagcacccccgccgccggcagcggcagcgccaucgccagcggcaucgccgugugcaaggugcugcaccuggagggcgaggugaacaagaucaagaacgcccugcugagcaccaacaaggccguggugagccugagcggcugcggcgugagcgugcugaccuucaaggugcuggaccugaagaacuacaucgacaagcagcugcugcccauccugaacaagcagagcugcagcaucagcaacaucgagaccgugaucgaguuccagcagaagaacaacagacugcuggagaucaccagagaguucagcgugaacgccggcgugaccacccccgugagcaccuacaugcugaccaacagcgagcugcugagccugaucaacgacaugcccaucaccaacgaccagaagaagcugaugagcaacaacgugcagaucgugagacagcagagcuacagcaucaugugcaucaucaaggaggaggugcuggccuacguggugcagcugccccuguacggcgugaucgacacccccugcuggaagcugcacaccagcccccugugcaccaccaacaccaaggagggcagcaacaucugccugaccagaaccgacagaggcugguacugcgacaacgccggcagcgugagcuucuucccccaggccgagaccugcaaggugcagagcaacagaguguucugcgacaccaugaacagcagaacccugcccagcgaggugaaccugugcaacaucgacaucuucaaccccaaguacgacugcaagaucaugaccagcaagaccgacgugagcagcagcgugaucaccagccugggcgccaucgugagcugcuacggcaagaccaagugcaccgccagcaacaagugcagaggcaucaucaagaccuucagcaacggcugcgacuacgugagcaacaagggcguggacaccgugagcgugggcaacacccuguacuacgugaacaagcaggagggcaagagccuguacgugaagggcgagcccaucaucaacuucuacgacccccugguguuccccagcgacgaguucgacgccagcaucagccaggugaacgagaagaucaaccagagccuggccuucaucagaaagagcgacgagcugcugcacaacgugaacgugggcaagagcaccaccaacaucaugaucaccaccaucaucaucgugaucaucgugauccugcugcugcugaucgccgugggccuguuccuguacugcaaggccagaagcacccccgugacccugagcaaggaccagcugagcggcaucaacaacaucgccuucagcaacugaggacuagugaagggaacacccaaauuuaauucagccuuaagcacaauuaauuaagagugaaacguaauuguacaagcaguuggucacccaccauagggcaugaucaacaccgcaaccuuuccuuuuucccccagugauucugaaaaaccccucuucccuucagcuugcuuagauguuccaaauuuaguaagcuuaaggcggccuacagaagaaaaagaaaaaaaaggccacaaaaguucccucucacuuucaguaaauaaaauaaaagcagcaacagaaauaaagaaauaaaugaaauucaaaaugaaauaaauauuguguugugcagcauuaaaaaaucaauaaaaauuaaaaaugagcaagaucuaaaaaaaaaaaaaaaaaaaaaaaaaaaaaaaaaaaaaaaaaaaaaaaaaaaaaaaaaaaaaaaaugcaucccccccccccccccccccccccccccccccaaaggcucuuuucagagccaccagaauu

SEQ ID NO: 17042 - RNA, 2280 nt, Artificial Sequence
  mRNA product Design d-3 comprising derived and/or modified sequence from HRSV(Memphis-37)__AIY60640.1__F_DSCav1_mut5 (opt5)
gggagagggcgcuuggcuugcaaggacccugagcugcggcauugaagcacacccaacccaacucgacugaagucagccucacugaaccggaucugagaaucuucucucucugggcuugccagggcucuccgaaccuagcuagcauccucuucaauuccaacuagaaagcuuaccauggagcugcccauccucaagaccaacgccauuacaacgauccuggcugccgugacccuuugcuucgcgagcucccagaauauuacagaagaguuuuaccaaucuaccuguagcgcugucuccaaaggcuaucugucugcccucagaacagggugguacaccagcguuaucacaauugaacuguccaacaucaaggagaauaaaugcaacggaaccgacgccaaggugaaacuuaucaagcaggaacuggauaaguauaaaaaugcugugacggagcuccagcugcugaugcagucuaccccugccgcuggcagcggguccgccauugcgagcggaaucgccgucuguaaggugcuccaccuggagggcgaaguuaacaaaauuaagaaugcccuucugucuacaaacaaagcuguggucucccucagcgggugcggagugucuguucugaccuucaaggugcuugaccugaagaauuacaucgauaaacaacuccugccgauucugaacaagcaguccuguagcaucucuaauauugagacagucaucgaauuucagcagaaaaacaaucggcuccuggagaucacccgcgaguucuccgugaacgcuggcgugacgacacccgucagcaccuauaugcuuacaaauuccgaacugcucucucugauuaacgacaugccuaucaccaacgaucaaaagaaacuuaugagcaauaacguucagauugugagacagcaguccuacagcaucaugugcauuaucaaggaggaagugcuggccuaugucgugcaacucccccuguacggcguuaucgacaccccuuguuggaaacugcauacaucuccccucugcacgaccaauacaaaggagggguccaacauuugucugacccggacagaucgcggaugguacugcgacaaugcgggcagcgugagcuuuuucccucaggccgaaaccuguaagguccagucuaacagaguguuuugcgauacgaugaacuccagaacacugccgucugagguuaaucucugcaauaucgacauuuucaaccccaaauaugauuguaagaucaugaccagcaaaaccgacguguccagcucugucauuacaucccugggggcuaucgugagcugcuacggaaagaccaaauguacagccucuaauaagugccggggcaucauuaagacguuuuccaacgggugugauuaugucagcaauaaaggaguggacaccguuuccgugggcaacacacuuuacuaugucaauaagcaagagggcaaaucucuguacgugaagggggaaccuaucauuaacuucuaugacccccucguuuuuccuagcgaugaguucgacgcuuccaucucucaggugaacgagaaaauuaaucagagccuggccuuuauccgcaaguccgaugaacugcuccacaacgucaaugugggaaagagcaccacaaacauuaugaucaccacgaucauuaucgugauuaucguuauucugcuucugcucaucgccgucggccuguuccuguacugcaaagcuagaucuacccccgugacacuuuccaaggaccagcucagcgggaucaauaacauugcguucucuaauugaggacuagugaagggaacacccaaauuuaauucagccuuaagcacaauuaauuaagagugaaacguaauuguacaagcaguuggucacccaccauagggcaugaucaacaccgcaaccuuuccuuuuucccccagugauucugaaaaaccccucuucccuucagcuugcuuagauguuccaaauuuaguaagcuuaaggcggccuacagaagaaaaagaaaaaaaaggccacaaaaguucccucucacuuucaguaaauaaaauaaaagcagcaacagaaauaaagaaauaaaugaaauucaaaaugaaauaaauauuguguugugcagcauuaaaaaaucaauaaaaauuaaaaaugagcaagaucuaaaaaaaaaaaaaaaaaaaaaaaaaaaaaaaaaaaaaaaaaaaaaaaaaaaaaaaaaaaaaaaaugcaucccccccccccccccccccccccccccccccaaaggcucuuuucagagccaccagaauu

SEQ ID NO: 17043 - RNA, 2280 nt, Artificial Sequence
  mRNA product Design d-3 comprising derived and/or modified sequence from HRSV(Memphis-37)__AIY60640.1__F_DSCav1_mut5 (opt6)
gggagagggcgcuuggcuugcaaggacccugagcugcggcauugaagcacacccaacccaacucgacugaagucagccucacugaaccggaucugagaaucuucucucucugggcuugccagggcucuccgaaccuagcuagcauccucuucaauuccaacuagaaagcuuaccauggaacucccaaucuuaaaaacaaacgcaauaacuacaauacucgcagcaguaacacuaugcuucgcaucaucacaaaacauaaccgaagaauuuuaccaaaguacaugcucagcaguaucaaaagguuaccucucagcccuaagaaccggaugguacacaucaguaaucacuauagaacuauccaauauaaaagaaaacaaaugcaacggcacugacgcaaaaguuaaauuaauuaaacaagaacucgauaaauauaaaaaugcaguaacagaacuacaacuacuaaugcaaagcaccccagcugcaggaagcggaucagcaaucgcaucaggaauagcaguauguaaaguacuacaccuagaaggagaagucaacaaaaucaaaaaugcacuacuaaguacaaacaaagcuguaguaagccuaucagguugcggaguaucaguauuaacauuuaaaguccucgaccuaaaaaauuacauagauaaacaacucuuaccaauacucaauaaacaaaguugcagcaucagcaacauagaaacagucaucgaauuucaacaaaaaaauaauagacuccuagaaauaacacgugaauuuucaguaaaugcuggaguaacaacaccaguaucuacauauaugcuaacaaauagcgaacuacucucacuuauuaacgauaugcccauaacaaacgaccaaaaaaaacuuaugucaaacaauguucaaauaguuagacaacaauccuacagcauaaugugcauaaucaaagaagaaguucuagcuuacguaguacaacuaccacucuaugguguuaucgacacccccuguuggaaacuucacacaucaccacuaugcacaacaaacacaaaagaaggaucaaauauuugcuuaacaagaacagauagaggaugguauugcgauaaugccggaucaguaucauuuuuuccacaagcagaaacauguaaaguacaauccaaccgaguauuuugcgacaccaugaacuccagaacacuaccaucugaagucaaccuauguaauauagauauauuuaacccaaaauaugacuguaaaaucaugacaucaaaaacugauguaaguucuaguguaauaaccagcuuaggcgccauaguaagcuguuacgguaaaacaaaaugcacagcaagcaacaaaugccgcgguauaauaaaaacauucucaaacggaugcgauuauguaaguaacaaaggaguagauacagucuccguaggcaacacauuauacuacguaaacaaacaagaaggaaaaucacuauauguaaaaggagaaccaaucauaaauuucuacgacccacuuguauuccccagcgacgaauuugaugcuuccauuucacaagucaacgaaaaaauaaaccaaucauuagccuucauaagaaaaucagacgaauuauuacauaauguuaaugucggcaaauccacaacuaauauaaugauaacaacaaucauaauaguaauaaucguuauacuacuauuacucauagcaguaggacucuucuuauauuguaaagccagauccaccccaguaacacucucaaaagaccaauuaucaggaauuaauaacaucgcauuuucaaacuaaggacuagugaagggaacacccaaauuuaauucagccuuaagcacaauuaauuaagagugaaacguaauuguacaagcaguuggucacccaccauagggcaugaucaacaccgcaaccuuuccuuuuucccccagugauucugaaaaaccccucuucccuucagcuugcuuagauguuccaaauuuaguaagcuuaaggcggccuacagaagaaaaagaaaaaaaaggccacaaaaguucccucucacuuucaguaaauaaaauaaaagcagcaacagaaauaaagaaauaaaugaaauucaaaaugaaauaaauauuguguugugcagcauuaaaaaaucaauaaaaauuaaaaaugagcaagaucuaaaaaaaaaaaaaaaaaaaaaaaaaaaaaaaaaaaaaaaaaaaaaaaaaaaaaaaaaaaaaaaaugcaucccccccccccccccccccccccccccccccaaaggcucuuuucagagccaccagaauu

SEQ ID NO: 17044 - RNA, 2280 nt, Artificial Sequence
  mRNA product Design d-3 comprising derived and/or modified sequence from HRSV(Memphis-37)__AIY60640.1__F_DSCav1_mut5 (opt11)
gggagagggcgcuuggcuugcaaggacccugagcugcggcauugaagcacacccaacccaacucgacugaagucagccucacugaaccggaucugagaaucuucucucucugggcuugccagggcucuccgaaccuagcuagcauccucuucaauuccaacuagaaagcuuaccauggaacuccccauccuuaaaaccaacgcaaucaccacaauacucgccgccgucacccucugcuuugcguccucccagaacaucaccgaagaguucuaccaaucgaccugcagcgccgucagcaagggcuaccucucagcccuccgaacaggcugguacacauccgucaucaccaucgaacucucaaacauaaaagaaaacaaguguaacggcaccgacgcgaaaguuaaacucaucaaacaagaacucgauaaauacaaaaacgcaguaaccgaacuacaacuccuaaugcaauccacacccgcagccggcagcggcuccgcaaucgccuccggcauagcagucugcaaaguccuccaccucgaaggagaagucaauaaaaucaaaaacgcccuccuauccaccaacaaagcgguugucucccuguccggaugcggaguuagcguccuaaccuucaaggugcucgaccucaaaaacuacauagacaaacaacuacuccccauacucaacaaacaaucaugcuccaucagcaacaucgagaccgucaucgaguuccaacagaaaaacaaccgccuccucgaaaucacacgagaguucuccguaaacgccggcgucacaacccccguuuccacuuacaugcucacaaacagcgaacuccucucccucaucaacgacaugccaaucaccaacgaccaaaagaaacucauguccaacaacguccaaaucguccgccaacaaagcuacagcauaaugugcaucauaaaagaagaaguacucgcguacguaguccaacuaccccuauacggcgucaucgacacccccugcuggaaacugcacacuucuccccucuguacaaccaacacuaaagaaggcucgaacaucugccucaccagaacagaccgaggaugguacugcgacaacgccggcuccgucagcuucuucccccaggccgaaacaugcaaaguacaaucaaaccgagucuucugcgacacaaugaacagcagaacucuacccuccgaaguuaaccuaugcaacaucgacaucuucaaccccaaauacgacugcaaaauaaugaccucaaaaacagacguguccagcuccguuaucaccucucucggagccaucguauccuguuauggaaaaaccaaaugcaccgccucaaacaaaugccgaggcauaaucaaaacauucucaaauggaugcgacuacguauccaacaaaggagucgacaccgucagcgugggcaauacccucuacuacgucaacaaacaggaagggaaaucccucuauguaaagggcgagcccauuauuaacuucuaugacccccucguguucccaagcgacgaguucgacgccuccauaucacaagucaaugagaaaaucaaccaaucacuagcuuucauucgcaaauccgacgaacuccuucacaacgucaacgucggcaaauccaccaccaacaucaugaucaccaccauaauuaucgucauuaucgucauacuacuccuacucaucgccgucggccucuuccucuauugcaaagcacgcucgacacccgucacccuuucaaaagaccaacuuuccggcauaaacaacauagccuucagcaacuagggacuagugaagggaacacccaaauuuaauucagccuuaagcacaauuaauuaagagugaaacguaauuguacaagcaguuggucacccaccauagggcaugaucaacaccgcaaccuuuccuuuuucccccagugauucugaaaaaccccucuucccuucagcuugcuuagauguuccaaauuuaguaagcuuaaggcggccuacagaagaaaaagaaaaaaaaggccacaaaaguucccucucacuuucaguaaauaaaauaaaagcagcaacagaaauaaagaaauaaaugaaauucaaaaugaaauaaauauuguguugugcagcauuaaaaaaucaauaaaaauuaaaaaugagcaagaucuaaaaaaaaaaaaaaaaaaaaaaaaaaaaaaaaaaaaaaaaaaaaaaaaaaaaaaaaaaaaaaaaugcaucccccccccccccccccccccccccccccccaaaggcucuuuucagagccaccagaauu

SEQ ID NO: 17045 - RNA, 1963 nt, Artificial Sequence
  mRNA product Design d-4 comprising derived and/or modified sequence from HRSV(Memphis-37)__AIY60640.1__F_DSCav1_mut5 (opt1)
gggagagucccgcagucggcguccagcggcucugcuuguucgugugugugucguugcaggccuuauucaagcuuaccauggagcugcccauccucaagaccaacgccaucaccacgauccuggccgcggugacccugugcuucgccagcucccagaacaucaccgaggaguucuaccagagcacgugcuccgccgucagcaagggcuaccucuccgcccugcgcaccgggugguacaccagcgugaucaccaucgagcuguccaacaucaaggagaacaagugcaacggcaccgacgccaaggugaagcucaucaagcaggagcuggacaaguacaagaacgcggucacggagcugcagcuccugaugcagagcaccccggccgccggcuccgggagcgcgaucgccuccggcaucgccgucugcaaggugcugcaccucgagggcgaggugaacaagaucaagaacgcccugcuguccaccaacaaggccgucgugagccucuccggcugcggggugagcguccugaccuucaaggugcuggaccucaagaacuacaucgacaagcagcugcugcccauccugaacaagcagagcugcuccaucagcaacaucgagaccgucaucgaguuccagcagaagaacaaccgccuccuggagaucacgcgggaguucagcgugaacgcgggcgugaccacccccgucuccaccuacaugcugacgaacagcgagcuccugucccugaucaacgacaugccgaucaccaacgaccagaagaagcucaugagcaacaacgugcagaucgugcgccagcaguccuacagcaucaugugcaucaucaaggaggagguccuggccuacguggugcagcugccccucuacggggucaucgacacccccugcuggaagcugcacaccagcccccugugcacgaccaacaccaaggagggcuccaacaucugccucacccggacggaccgcgggugguacugcgacaacgccggcagcguguccuucuucccgcaggccgagaccugcaagguccagagcaaccggguguucugcgacaccaugaacucccggacccugcccagcgaggugaaccucugcaacaucgacaucuucaaccccaaguacgacugcaagaucaugacguccaagaccgacgucagcuccagcgugaucaccucccugggcgccaucgugagcugcuacgggaagaccaagugcacggcgagcaacaagugccgcggcaucaucaagaccuucuccaacgggugcgacuacgucagcaacaagggcguggacaccguguccgucggcaacacccuguacuacgugaacaagcaggagggcaagagccucuacgugaagggggagcccaucaucaacuucuacgacccgcuggucuuccccuccgacgaguucgacgccagcaucucccaggugaacgagaagaucaaccagagccuggccuucauccggaaguccgacgagcuccugcacaacgugaacgucggcaagagcaccacgaacaucaugaucaccaccaucaucaucgugaucaucgugauccugcugcuccugaucgccgucgggcuguuccucuacugcaaggcccgcuccacccccgugacgcugagcaaggaccagcuguccgggaucaacaacaucgcguucagcaacugaggacuaguggaagcauuuuccuggcugauuaaaagaaauuacucagcuauggucaucuguuccuguuagaaggcuaugcagcauauuauauacuaugcgcauguuaugaaaugcauaauaaaaaauuuuaaaaaaucuaaaagaucuaaaaaaaaaaaaaaaaaaaaaaaaaaaaaaaaaaaaaaaaaaaaaaaaaaaaaaaaaaaaaaaaugcaucccccccccccccccccccccccccccccccaaaggcucuuuucagagccaccagaauu

SEQ ID NO: 17046 - RNA, 1963 nt, Artificial Sequence
  mRNA product Design d-4 comprising derived and/or modified sequence from HRSV(Memphis-37)__AIY60640.1__F_DSCav1_mut5 (opt1)
gggagagucccgcagucggcguccagcggcucugcuuguucgugugugugucguugcaggccuuauucaagcuuaccauggagcugcccauccucaagaccaacgccaucaccacgauccuggccgcggugacccugugcuucgccagcucccagaacaucaccgaggaguucuaccagagcacgugcuccgccgucagcaagggcuaccucuccgcccugcgcaccgggugguacaccagcgugaucaccaucgagcuguccaacaucaaggagaacaagugcaacggcaccgacgccaaggugaagcucaucaagcaggagcuggacaaguacaagaacgcggucacggagcugcagcuccugaugcagagcaccccggccgccggguccggcagcgccaucgcguccgggaucgccgugugcaaggugcugcaccucgagggcgaggucaacaagaucaagaacgcccugcugagcaccaacaaggccguggugucccucagcggcugcggggucuccgugcugaccuucaaggugcuggaccucaagaacuacaucgacaagcagcugcugcccauccucaacaagcagagcugcuccaucagcaacaucgagacggucaucgaguuccagcagaagaacaaccggcugcuggagaucacccgcgaguucuccgugaacgccggcgugaccacccccgucagcacguacaugcucaccaacagcgagcugcugucccucaucaacgacaugcccaucaccaacgaccagaagaagcugaugagcaacaacgugcagaucgugcggcagcaguccuacagcaucaugugcaucaucaaggaggagguccuggcguacguggugcagcucccgcuguacggggucaucgacacccccugcuggaagcugcacacgagcccccucugcaccaccaacaccaaggagggcuccaacaucugccugacgcgcaccgaccgggggugguacugcgacaacgccggcuccgugagcuucuucccccaggccgagaccugcaaggugcaguccaaccgcgucuucugcgacaccaugaacagccggacgcucccguccgaggugaaccugugcaacaucgacaucuucaaccccaaguacgacugcaagaucaugaccagcaagaccgacgucuccagcuccgugaucaccagccugggcgccaucguguccugcuacgggaagacgaagugcaccgccagcaacaagugccggggcaucaucaagaccuucuccaacgggugcgacuacgucagcaacaagggcguggacaccgugagcgucggcaacacgcucuacuacgugaacaagcaggaggggaagucccuguacgugaagggcgagcccaucaucaacuucuacgacccccuggucuucccgagcgacgaguucgacgcguccaucagccaggugaacgagaagaucaaccagucccucgccuucauccgcaagagcgacgagcugcugcacaacgugaacgucgggaaguccaccaccaacaucaugaucaccaccaucaucaucgugaucaucgugauccuccugcugcucaucgccgucggccuguuccuguacugcaaggcccggagcacgcccgugacccuguccaaggaccagcucagcgggaucaacaacaucgccuucuccaacugaggacuaguggaagcauuuuccuggcugauuaaaagaaauuacucagcuauggucaucuguuccuguuagaaggcuaugcagcauauuauauacuaugcgcauguuaugaaaugcauaauaaaaaauuuuaaaaaaucuaaaagaucuaaaaaaaaaaaaaaaaaaaaaaaaaaaaaaaaaaaaaaaaaaaaaaaaaaaaaaaaaaaaaaaaugcaucccccccccccccccccccccccccccccccaaaggcucuuuucagagccaccagaauu

SEQ ID NO: 17047 - RNA, 1963 nt, Artificial Sequence
  mRNA product Design d-4 comprising derived and/or modified sequence from HRSV(Memphis-37)__AIY60640.1__F_DSCav1_mut5 (opt2)
gggagagucccgcagucggcguccagcggcucugcuuguucgugugugugucguugcaggccuuauucaagcuuaccauggagcuccccauccucaagaccaacgccaucaccaccauccucgccgccgucacccucugcuucgccuccucccagaacaucaccgaggaguucuaccaguccaccugcuccgccgucuccaagggcuaccucuccgcccuccgcaccggcugguacaccuccgucaucaccaucgagcucuccaacaucaaggagaacaagugcaacggcaccgacgccaaggucaagcucaucaagcaggagcucgacaaguacaagaacgccgucaccgagcuccagcuccucaugcaguccacccccgccgccggcuccggcuccgccaucgccuccggcaucgccgucugcaagguccuccaccucgagggcgaggucaacaagaucaagaacgcccuccucuccaccaacaaggccgucgucucccucuccggcugcggcgucuccguccucaccuucaagguccucgaccucaagaacuacaucgacaagcagcuccuccccauccucaacaagcaguccugcuccaucuccaacaucgagaccgucaucgaguuccagcagaagaacaaccgccuccucgagaucacccgcgaguucuccgucaacgccggcgucaccacccccgucuccaccuacaugcucaccaacuccgagcuccucucccucaucaacgacaugcccaucaccaacgaccagaagaagcucauguccaacaacguccagaucguccgccagcaguccuacuccaucaugugcaucaucaaggaggagguccucgccuacgucguccagcucccccucuacggcgucaucgacacccccugcuggaagcuccacaccuccccccucugcaccaccaacaccaaggagggcuccaacaucugccucacccgcaccgaccgcggcugguacugcgacaacgccggcuccgucuccuucuucccccaggccgagaccugcaagguccaguccaaccgcgucuucugcgacaccaugaacucccgcacccuccccuccgaggucaaccucugcaacaucgacaucuucaaccccaaguacgacugcaagaucaugaccuccaagaccgacgucuccuccuccgucaucaccucccucggcgccaucgucuccugcuacggcaagaccaagugcaccgccuccaacaagugccgcggcaucaucaagaccuucuccaacggcugcgacuacgucuccaacaagggcgucgacaccgucuccgucggcaacacccucuacuacgucaacaagcaggagggcaagucccucuacgucaagggcgagcccaucaucaacuucuacgacccccucgucuuccccuccgacgaguucgacgccuccaucucccaggucaacgagaagaucaaccagucccucgccuucauccgcaaguccgacgagcuccuccacaacgucaacgucggcaaguccaccaccaacaucaugaucaccaccaucaucaucgucaucaucgucauccuccuccuccucaucgccgucggccucuuccucuacugcaaggcccgcuccacccccgucacccucuccaaggaccagcucuccggcaucaacaacaucgccuucuccaacugaggacuaguggaagcauuuuccuggcugauuaaaagaaauuacucagcuauggucaucuguuccuguuagaaggcuaugcagcauauuauauacuaugcgcauguuaugaaaugcauaauaaaaaauuuuaaaaaaucuaaaagaucuaaaaaaaaaaaaaaaaaaaaaaaaaaaaaaaaaaaaaaaaaaaaaaaaaaaaaaaaaaaaaaaaugcaucccccccccccccccccccccccccccccccaaaggcucuuuucagagccaccagaauu

SEQ ID NO: 17048 - RNA, 1963 nt, Artificial Sequence
  mRNA product Design d-4 comprising derived and/or modified sequence from HRSV(Memphis-37)__AIY60640.1__F_DSCav1_mut5 (opt3)
gggagagucccgcagucggcguccagcggcucugcuuguucgugugugugucguugcaggccuuauucaagcuuaccauggagcugcccauccucaagaccaacgccauuacaacuauacuugcugcagugacgcugugcuucgccagcucccagaauaucaccgaagaguuuuaccaaucuacauguucagcggucaguaaaggcuauuugagcgcuuuaagaacugggugguacaccuccguuauuacaaucgaacugucuaacauuaaggagaauaaaugcaacggaaccgacgccaaggugaaacuaaucaagcaggaacucgauaaguauaaaaaugcaguaacugagcugcagcuucugaugcagucgaccccugccgcugguucaggcagcgcaauagccagugggaucgcuguguguaaggucuugcaccucgagggagaagugaacaaaauuaagaaugcccugcuguccacaaacaaagcgguugugucucucagcggcugcggugucuccguguuaacguucaagguacuggaccuuaagaauuacaucgauaaacaauugcugccaauucuaaacaagcagucauguaguaucagcaauauagagacuguuauugaauuucagcagaaaaacaauaggcuccuggagaucacccgggaguucucugugaacgcaggggucacaacuccgguguccaccuauaugcuuacaaauucagaacuguugagccucauuaacgacaugcccaucaccaacgaucaaaagaaacugaugaguaauaacgugcagaucguccgccagcagucuuacuccauuaugugcauaaucaaggaggaaguuuuagccuaugugguacaacugccucucuacggagugauugacacgccauguuggaaacuucauacuagcccccugugcacaaccaauacuaaggagggcucgaacaucuguuugacacgaaccgaucguggcugguacugcgacaaugcugggucugucuccuuuuucccucaggccgaaacguguaaggugcagucaaacagaguguuuugcgauaccaugaauaguagaacacugccaagcgaggugaaccucugcaauauagacauuuucaaccccaaauaugauuguaagaucaugacuuccaaaaccgacgucucuagcucagugaucacaagucugggagcaauuguauccugcuacgguaagacuaaauguaccgcuagcaauaagugcaggggcaucauuaagacauuuucuaacgggugugauuauguuucaaauaaaggaguggacaccgucagugugggcaacacucuuuacuaugucaauaagcaagaggguaaaagccuguacgugaagggggaaccuauaaucaacuucuaugacccauugguuuuuccguccgaugaguucgacgccucuauuucgcagguuaacgagaaaaucaaucagagccucgcguuuauccggaaguccgaugaacuguuacacaacguaaaugucggaaagucaacgacaaacauuaugauaaccacuaucauuaucgugauuaucguuauacugcuacuccugaucgccgugggccuuuucuuguacugcaaagcacgcaguacccccgucacacugucuaaggaccagcucagcggcauuaauaacaucgcuuucuccaauugaggacuaguggaagcauuuuccuggcugauuaaaagaaauuacucagcuauggucaucuguuccuguuagaaggcuaugcagcauauuauauacuaugcgcauguuaugaaaugcauaauaaaaaauuuuaaaaaaucuaaaagaucuaaaaaaaaaaaaaaaaaaaaaaaaaaaaaaaaaaaaaaaaaaaaaaaaaaaaaaaaaaaaaaaaugcaucccccccccccccccccccccccccccccccaaaggcucuuuucagagccaccagaauu

SEQ ID NO: 17049 - RNA, 1963 nt, Artificial Sequence
  mRNA product Design d-4 comprising derived and/or modified sequence from HRSV(Memphis-37)__AIY60640.1__F_DSCav1_mut5 (opt4)
gggagagucccgcagucggcguccagcggcucugcuuguucgugugugugucguugcaggccuuauucaagcuuaccauggagcugcccauccugaagaccaacgccaucaccaccauccuggccgccgugacccugugcuucgccagcagccagaacaucaccgaggaguucuaccagagcaccugcagcgccgugagcaagggcuaccugagcgcccugagaaccggcugguacaccagcgugaucaccaucgagcugagcaacaucaaggagaacaagugcaacggcaccgacgccaaggugaagcugaucaagcaggagcuggacaaguacaagaacgccgugaccgagcugcagcugcugaugcagagcacccccgccgccggcagcggcagcgccaucgccagcggcaucgccgugugcaaggugcugcaccuggagggcgaggugaacaagaucaagaacgcccugcugagcaccaacaaggccguggugagccugagcggcugcggcgugagcgugcugaccuucaaggugcuggaccugaagaacuacaucgacaagcagcugcugcccauccugaacaagcagagcugcagcaucagcaacaucgagaccgugaucgaguuccagcagaagaacaacagacugcuggagaucaccagagaguucagcgugaacgccggcgugaccacccccgugagcaccuacaugcugaccaacagcgagcugcugagccugaucaacgacaugcccaucaccaacgaccagaagaagcugaugagcaacaacgugcagaucgugagacagcagagcuacagcaucaugugcaucaucaaggaggaggugcuggccuacguggugcagcugccccuguacggcgugaucgacacccccugcuggaagcugcacaccagcccccugugcaccaccaacaccaaggagggcagcaacaucugccugaccagaaccgacagaggcugguacugcgacaacgccggcagcgugagcuucuucccccaggccgagaccugcaaggugcagagcaacagaguguucugcgacaccaugaacagcagaacccugcccagcgaggugaaccugugcaacaucgacaucuucaaccccaaguacgacugcaagaucaugaccagcaagaccgacgugagcagcagcgugaucaccagccugggcgccaucgugagcugcuacggcaagaccaagugcaccgccagcaacaagugcagaggcaucaucaagaccuucagcaacggcugcgacuacgugagcaacaagggcguggacaccgugagcgugggcaacacccuguacuacgugaacaagcaggagggcaagagccuguacgugaagggcgagcccaucaucaacuucuacgacccccugguguuccccagcgacgaguucgacgccagcaucagccaggugaacgagaagaucaaccagagccuggccuucaucagaaagagcgacgagcugcugcacaacgugaacgugggcaagagcaccaccaacaucaugaucaccaccaucaucaucgugaucaucgugauccugcugcugcugaucgccgugggccuguuccuguacugcaaggccagaagcacccccgugacccugagcaaggaccagcugagcggcaucaacaacaucgccuucagcaacugaggacuaguggaagcauuuuccuggcugauuaaaagaaauuacucagcuauggucaucuguuccuguuagaaggcuaugcagcauauuauauacuaugcgcauguuaugaaaugcauaauaaaaaauuuuaaaaaaucuaaaagaucuaaaaaaaaaaaaaaaaaaaaaaaaaaaaaaaaaaaaaaaaaaaaaaaaaaaaaaaaaaaaaaaaugcaucccccccccccccccccccccccccccccccaaaggcucuuuucagagccaccagaauu

SEQ ID NO: 17050 - RNA, 1963 nt, Artificial Sequence
  mRNA product Design d-4 comprising derived and/or modified sequence from HRSV(Memphis-37)__AIY60640.1__F_DSCav1_mut5 (opt5)
gggagagucccgcagucggcguccagcggcucugcuuguucgugugugugucguugcaggccuuauucaagcuuaccauggagcugcccauccucaagaccaacgccauuacaacgauccuggcugccgugacccuuugcuucgcgagcucccagaauauuacagaagaguuuuaccaaucuaccuguagcgcugucuccaaaggcuaucugucugcccucagaacagggugguacaccagcguuaucacaauugaacuguccaacaucaaggagaauaaaugcaacggaaccgacgccaaggugaaacuuaucaagcaggaacuggauaaguauaaaaaugcugugacggagcuccagcugcugaugcagucuaccccugccgcuggcagcggguccgccauugcgagcggaaucgccgucuguaaggugcuccaccuggagggcgaaguuaacaaaauuaagaaugcccuucugucuacaaacaaagcuguggucucccucagcgggugcggagugucuguucugaccuucaaggugcuugaccugaagaauuacaucgauaaacaacuccugccgauucugaacaagcaguccuguagcaucucuaauauugagacagucaucgaauuucagcagaaaaacaaucggcuccuggagaucacccgcgaguucuccgugaacgcuggcgugacgacacccgucagcaccuauaugcuuacaaauuccgaacugcucucucugauuaacgacaugccuaucaccaacgaucaaaagaaacuuaugagcaauaacguucagauugugagacagcaguccuacagcaucaugugcauuaucaaggaggaagugcuggccuaugucgugcaacucccccuguacggcguuaucgacaccccuuguuggaaacugcauacaucuccccucugcacgaccaauacaaaggagggguccaacauuugucugacccggacagaucgcggaugguacugcgacaaugcgggcagcgugagcuuuuucccucaggccgaaaccuguaagguccagucuaacagaguguuuugcgauacgaugaacuccagaacacugccgucugagguuaaucucugcaauaucgacauuuucaaccccaaauaugauuguaagaucaugaccagcaaaaccgacguguccagcucugucauuacaucccugggggcuaucgugagcugcuacggaaagaccaaauguacagccucuaauaagugccggggcaucauuaagacguuuuccaacgggugugauuaugucagcaauaaaggaguggacaccguuuccgugggcaacacacuuuacuaugucaauaagcaagagggcaaaucucuguacgugaagggggaaccuaucauuaacuucuaugacccccucguuuuuccuagcgaugaguucgacgcuuccaucucucaggugaacgagaaaauuaaucagagccuggccuuuauccgcaaguccgaugaacugcuccacaacgucaaugugggaaagagcaccacaaacauuaugaucaccacgaucauuaucgugauuaucguuauucugcuucugcucaucgccgucggccuguuccuguacugcaaagcuagaucuacccccgugacacuuuccaaggaccagcucagcgggaucaauaacauugcguucucuaauugaggacuaguggaagcauuuuccuggcugauuaaaagaaauuacucagcuauggucaucuguuccuguuagaaggcuaugcagcauauuauauacuaugcgcauguuaugaaaugcauaauaaaaaauuuuaaaaaaucuaaaagaucuaaaaaaaaaaaaaaaaaaaaaaaaaaaaaaaaaaaaaaaaaaaaaaaaaaaaaaaaaaaaaaaaugcaucccccccccccccccccccccccccccccccaaaggcucuuuucagagccaccagaauu

SEQ ID NO: 17051 - RNA, 1963 nt, Artificial Sequence
  mRNA product Design d-4 comprising derived and/or modified sequence from HRSV(Memphis-37)__AIY60640.1__F_DSCav1_mut5 (opt6)
gggagagucccgcagucggcguccagcggcucugcuuguucgugugugugucguugcaggccuuauucaagcuuaccauggaacucccaaucuuaaaaacaaacgcaauaacuacaauacucgcagcaguaacacuaugcuucgcaucaucacaaaacauaaccgaagaauuuuaccaaaguacaugcucagcaguaucaaaagguuaccucucagcccuaagaaccggaugguacacaucaguaaucacuauagaacuauccaauauaaaagaaaacaaaugcaacggcacugacgcaaaaguuaaauuaauuaaacaagaacucgauaaauauaaaaaugcaguaacagaacuacaacuacuaaugcaaagcaccccagcugcaggaagcggaucagcaaucgcaucaggaauagcaguauguaaaguacuacaccuagaaggagaagucaacaaaaucaaaaaugcacuacuaaguacaaacaaagcuguaguaagccuaucagguugcggaguaucaguauuaacauuuaaaguccucgaccuaaaaaauuacauagauaaacaacucuuaccaauacucaauaaacaaaguugcagcaucagcaacauagaaacagucaucgaauuucaacaaaaaaauaauagacuccuagaaauaacacgugaauuuucaguaaaugcuggaguaacaacaccaguaucuacauauaugcuaacaaauagcgaacuacucucacuuauuaacgauaugcccauaacaaacgaccaaaaaaaacuuaugucaaacaauguucaaauaguuagacaacaauccuacagcauaaugugcauaaucaaagaagaaguucuagcuuacguaguacaacuaccacucuaugguguuaucgacacccccuguuggaaacuucacacaucaccacuaugcacaacaaacacaaaagaaggaucaaauauuugcuuaacaagaacagauagaggaugguauugcgauaaugccggaucaguaucauuuuuuccacaagcagaaacauguaaaguacaauccaaccgaguauuuugcgacaccaugaacuccagaacacuaccaucugaagucaaccuauguaauauagauauauuuaacccaaaauaugacuguaaaaucaugacaucaaaaacugauguaaguucuaguguaauaaccagcuuaggcgccauaguaagcuguuacgguaaaacaaaaugcacagcaagcaacaaaugccgcgguauaauaaaaacauucucaaacggaugcgauuauguaaguaacaaaggaguagauacagucuccguaggcaacacauuauacuacguaaacaaacaagaaggaaaaucacuauauguaaaaggagaaccaaucauaaauuucuacgacccacuuguauuccccagcgacgaauuugaugcuuccauuucacaagucaacgaaaaaauaaaccaaucauuagccuucauaagaaaaucagacgaauuauuacauaauguuaaugucggcaaauccacaacuaauauaaugauaacaacaaucauaauaguaauaaucguuauacuacuauuacucauagcaguaggacucuucuuauauuguaaagccagauccaccccaguaacacucucaaaagaccaauuaucaggaauuaauaacaucgcauuuucaaacuaaggacuaguggaagcauuuuccuggcugauuaaaagaaauuacucagcuauggucaucuguuccuguuagaaggcuaugcagcauauuauauacuaugcgcauguuaugaaaugcauaauaaaaaauuuuaaaaaaucuaaaagaucuaaaaaaaaaaaaaaaaaaaaaaaaaaaaaaaaaaaaaaaaaaaaaaaaaaaaaaaaaaaaaaaaugcaucccccccccccccccccccccccccccccccaaaggcucuuuucagagccaccagaauu

SEQ ID NO: 17052 - RNA, 1963 nt, Artificial Sequence
  mRNA product Design d-4 comprising derived and/or modified sequence from HRSV(Memphis-37)__AIY60640.1__F_DSCav1_mut5 (opt11)
gggagagucccgcagucggcguccagcggcucugcuuguucgugugugugucguugcaggccuuauucaagcuuaccauggaacuccccauccuuaaaaccaacgcaaucaccacaauacucgccgccgucacccucugcuuugcguccucccagaacaucaccgaagaguucuaccaaucgaccugcagcgccgucagcaagggcuaccucucagcccuccgaacaggcugguacacauccgucaucaccaucgaacucucaaacauaaaagaaaacaaguguaacggcaccgacgcgaaaguuaaacucaucaaacaagaacucgauaaauacaaaaacgcaguaaccgaacuacaacuccuaaugcaauccacacccgcagccggcagcggcuccgcaaucgccuccggcauagcagucugcaaaguccuccaccucgaaggagaagucaauaaaaucaaaaacgcccuccuauccaccaacaaagcgguugucucccuguccggaugcggaguuagcguccuaaccuucaaggugcucgaccucaaaaacuacauagacaaacaacuacuccccauacucaacaaacaaucaugcuccaucagcaacaucgagaccgucaucgaguuccaacagaaaaacaaccgccuccucgaaaucacacgagaguucuccguaaacgccggcgucacaacccccguuuccacuuacaugcucacaaacagcgaacuccucucccucaucaacgacaugccaaucaccaacgaccaaaagaaacucauguccaacaacguccaaaucguccgccaacaaagcuacagcauaaugugcaucauaaaagaagaaguacucgcguacguaguccaacuaccccuauacggcgucaucgacacccccugcuggaaacugcacacuucuccccucuguacaaccaacacuaaagaaggcucgaacaucugccucaccagaacagaccgaggaugguacugcgacaacgccggcuccgucagcuucuucccccaggccgaaacaugcaaaguacaaucaaaccgagucuucugcgacacaaugaacagcagaacucuacccuccgaaguuaaccuaugcaacaucgacaucuucaaccccaaauacgacugcaaaauaaugaccucaaaaacagacguguccagcuccguuaucaccucucucggagccaucguauccuguuauggaaaaaccaaaugcaccgccucaaacaaaugccgaggcauaaucaaaacauucucaaauggaugcgacuacguauccaacaaaggagucgacaccgucagcgugggcaauacccucuacuacgucaacaaacaggaagggaaaucccucuauguaaagggcgagcccauuauuaacuucuaugacccccucguguucccaagcgacgaguucgacgccuccauaucacaagucaaugagaaaaucaaccaaucacuagcuuucauucgcaaauccgacgaacuccuucacaacgucaacgucggcaaauccaccaccaacaucaugaucaccaccauaauuaucgucauuaucgucauacuacuccuacucaucgccgucggccucuuccucuauugcaaagcacgcucgacacccgucacccuuucaaaagaccaacuuuccggcauaaacaacauagccuucagcaacuagggacuaguggaagcauuuuccuggcugauuaaaagaaauuacucagcuauggucaucuguuccuguuagaaggcuaugcagcauauuauauacuaugcgcauguuaugaaaugcauaauaaaaaauuuuaaaaaaucuaaaagaucuaaaaaaaaaaaaaaaaaaaaaaaaaaaaaaaaaaaaaaaaaaaaaaaaaaaaaaaaaaaaaaaaugcaucccccccccccccccccccccccccccccccaaaggcucuuuucagagccaccagaauu

SEQ ID NO: 17053 - RNA, 2060 nt, Artificial Sequence
  mRNA product Design d-5 comprising derived and/or modified sequence from HRSV(Memphis-37)__AIY60640.1__F_DSCav1_mut5 (opt1)
gggagagggcgcuuggcuugcaaggacccugagcugcggcauugaagcacacccaacccaacucgacugaagucagccucacugaaccggaucugagaaucuucucucucugggcuugccagggcucuccgaaccuagcuagcauccucuucaauuccaacuagaaagcuuaccauggagcugcccauccucaagaccaacgccaucaccacgauccuggccgcggugacccugugcuucgccagcucccagaacaucaccgaggaguucuaccagagcacgugcuccgccgucagcaagggcuaccucuccgcccugcgcaccgggugguacaccagcgugaucaccaucgagcuguccaacaucaaggagaacaagugcaacggcaccgacgccaaggugaagcucaucaagcaggagcuggacaaguacaagaacgcggucacggagcugcagcuccugaugcagagcaccccggccgccggcuccgggagcgcgaucgccuccggcaucgccgucugcaaggugcugcaccucgagggcgaggugaacaagaucaagaacgcccugcuguccaccaacaaggccgucgugagccucuccggcugcggggugagcguccugaccuucaaggugcuggaccucaagaacuacaucgacaagcagcugcugcccauccugaacaagcagagcugcuccaucagcaacaucgagaccgucaucgaguuccagcagaagaacaaccgccuccuggagaucacgcgggaguucagcgugaacgcgggcgugaccacccccgucuccaccuacaugcugacgaacagcgagcuccugucccugaucaacgacaugccgaucaccaacgaccagaagaagcucaugagcaacaacgugcagaucgugcgccagcaguccuacagcaucaugugcaucaucaaggaggagguccuggccuacguggugcagcugccccucuacggggucaucgacacccccugcuggaagcugcacaccagcccccugugcacgaccaacaccaaggagggcuccaacaucugccucacccggacggaccgcgggugguacugcgacaacgccggcagcguguccuucuucccgcaggccgagaccugcaagguccagagcaaccggguguucugcgacaccaugaacucccggacccugcccagcgaggugaaccucugcaacaucgacaucuucaaccccaaguacgacugcaagaucaugacguccaagaccgacgucagcuccagcgugaucaccucccugggcgccaucgugagcugcuacgggaagaccaagugcacggcgagcaacaagugccgcggcaucaucaagaccuucuccaacgggugcgacuacgucagcaacaagggcguggacaccguguccgucggcaacacccuguacuacgugaacaagcaggagggcaagagccucuacgugaagggggagcccaucaucaacuucuacgacccgcuggucuuccccuccgacgaguucgacgccagcaucucccaggugaacgagaagaucaaccagagccuggccuucauccggaaguccgacgagcuccugcacaacgugaacgucggcaagagcaccacgaacaucaugaucaccaccaucaucaucgugaucaucgugauccugcugcuccugaucgccgucgggcuguuccucuacugcaaggcccgcuccacccccgugacgcugagcaaggaccagcuguccgggaucaacaacaucgcguucagcaacugaggacuaguggaagcauuuuccuggcugauuaaaagaaauuacucagcuauggucaucuguuccuguuagaaggcuaugcagcauauuauauacuaugcgcauguuaugaaaugcauaauaaaaaauuuuaaaaaaucuaaaagaucuaaaaaaaaaaaaaaaaaaaaaaaaaaaaaaaaaaaaaaaaaaaaaaaaaaaaaaaaaaaaaaaaugcaucccccccccccccccccccccccccccccccaaaggcucuuuucagagccaccagaauu

SEQ ID NO: 17054 - RNA, 2060 nt, Artificial Sequence
  mRNA product Design d-5 comprising derived and/or modified sequence from HRSV(Memphis-37)__AIY60640.1__F_DSCav1_mut5 (opt1)
gggagagggcgcuuggcuugcaaggacccugagcugcggcauugaagcacacccaacccaacucgacugaagucagccucacugaaccggaucugagaaucuucucucucugggcuugccagggcucuccgaaccuagcuagcauccucuucaauuccaacuagaaagcuuaccauggagcugcccauccucaagaccaacgccaucaccacgauccuggccgcggugacccugugcuucgccagcucccagaacaucaccgaggaguucuaccagagcacgugcuccgccgucagcaagggcuaccucuccgcccugcgcaccgggugguacaccagcgugaucaccaucgagcuguccaacaucaaggagaacaagugcaacggcaccgacgccaaggugaagcucaucaagcaggagcuggacaaguacaagaacgcggucacggagcugcagcuccugaugcagagcaccccggccgccggguccggcagcgccaucgcguccgggaucgccgugugcaaggugcugcaccucgagggcgaggucaacaagaucaagaacgcccugcugagcaccaacaaggccguggugucccucagcggcugcggggucuccgugcugaccuucaaggugcuggaccucaagaacuacaucgacaagcagcugcugcccauccucaacaagcagagcugcuccaucagcaacaucgagacggucaucgaguuccagcagaagaacaaccggcugcuggagaucacccgcgaguucuccgugaacgccggcgugaccacccccgucagcacguacaugcucaccaacagcgagcugcugucccucaucaacgacaugcccaucaccaacgaccagaagaagcugaugagcaacaacgugcagaucgugcggcagcaguccuacagcaucaugugcaucaucaaggaggagguccuggcguacguggugcagcucccgcuguacggggucaucgacacccccugcuggaagcugcacacgagcccccucugcaccaccaacaccaaggagggcuccaacaucugccugacgcgcaccgaccgggggugguacugcgacaacgccggcuccgugagcuucuucccccaggccgagaccugcaaggugcaguccaaccgcgucuucugcgacaccaugaacagccggacgcucccguccgaggugaaccugugcaacaucgacaucuucaaccccaaguacgacugcaagaucaugaccagcaagaccgacgucuccagcuccgugaucaccagccugggcgccaucguguccugcuacgggaagacgaagugcaccgccagcaacaagugccggggcaucaucaagaccuucuccaacgggugcgacuacgucagcaacaagggcguggacaccgugagcgucggcaacacgcucuacuacgugaacaagcaggaggggaagucccuguacgugaagggcgagcccaucaucaacuucuacgacccccuggucuucccgagcgacgaguucgacgcguccaucagccaggugaacgagaagaucaaccagucccucgccuucauccgcaagagcgacgagcugcugcacaacgugaacgucgggaaguccaccaccaacaucaugaucaccaccaucaucaucgugaucaucgugauccuccugcugcucaucgccgucggccuguuccuguacugcaaggcccggagcacgcccgugacccuguccaaggaccagcucagcgggaucaacaacaucgccuucuccaacugaggacuaguggaagcauuuuccuggcugauuaaaagaaauuacucagcuauggucaucuguuccuguuagaaggcuaugcagcauauuauauacuaugcgcauguuaugaaaugcauaauaaaaaauuuuaaaaaaucuaaaagaucuaaaaaaaaaaaaaaaaaaaaaaaaaaaaaaaaaaaaaaaaaaaaaaaaaaaaaaaaaaaaaaaaugcaucccccccccccccccccccccccccccccccaaaggcucuuuucagagccaccagaauu

SEQ ID NO: 17055 - RNA, 2060 nt, Artificial Sequence
  mRNA product Design d-5 comprising derived and/or modified sequence from HRSV(Memphis-37)__AIY60640.1__F_DSCav1_mut5 (opt2)
gggagagggcgcuuggcuugcaaggacccugagcugcggcauugaagcacacccaacccaacucgacugaagucagccucacugaaccggaucugagaaucuucucucucugggcuugccagggcucuccgaaccuagcuagcauccucuucaauuccaacuagaaagcuuaccauggagcuccccauccucaagaccaacgccaucaccaccauccucgccgccgucacccucugcuucgccuccucccagaacaucaccgaggaguucuaccaguccaccugcuccgccgucuccaagggcuaccucuccgcccuccgcaccggcugguacaccuccgucaucaccaucgagcucuccaacaucaaggagaacaagugcaacggcaccgacgccaaggucaagcucaucaagcaggagcucgacaaguacaagaacgccgucaccgagcuccagcuccucaugcaguccacccccgccgccggcuccggcuccgccaucgccuccggcaucgccgucugcaagguccuccaccucgagggcgaggucaacaagaucaagaacgcccuccucuccaccaacaaggccgucgucucccucuccggcugcggcgucuccguccucaccuucaagguccucgaccucaagaacuacaucgacaagcagcuccuccccauccucaacaagcaguccugcuccaucuccaacaucgagaccgucaucgaguuccagcagaagaacaaccgccuccucgagaucacccgcgaguucuccgucaacgccggcgucaccacccccgucuccaccuacaugcucaccaacuccgagcuccucucccucaucaacgacaugcccaucaccaacgaccagaagaagcucauguccaacaacguccagaucguccgccagcaguccuacuccaucaugugcaucaucaaggaggagguccucgccuacgucguccagcucccccucuacggcgucaucgacacccccugcuggaagcuccacaccuccccccucugcaccaccaacaccaaggagggcuccaacaucugccucacccgcaccgaccgcggcugguacugcgacaacgccggcuccgucuccuucuucccccaggccgagaccugcaagguccaguccaaccgcgucuucugcgacaccaugaacucccgcacccuccccuccgaggucaaccucugcaacaucgacaucuucaaccccaaguacgacugcaagaucaugaccuccaagaccgacgucuccuccuccgucaucaccucccucggcgccaucgucuccugcuacggcaagaccaagugcaccgccuccaacaagugccgcggcaucaucaagaccuucuccaacggcugcgacuacgucuccaacaagggcgucgacaccgucuccgucggcaacacccucuacuacgucaacaagcaggagggcaagucccucuacgucaagggcgagcccaucaucaacuucuacgacccccucgucuuccccuccgacgaguucgacgccuccaucucccaggucaacgagaagaucaaccagucccucgccuucauccgcaaguccgacgagcuccuccacaacgucaacgucggcaaguccaccaccaacaucaugaucaccaccaucaucaucgucaucaucgucauccuccuccuccucaucgccgucggccucuuccucuacugcaaggcccgcuccacccccgucacccucuccaaggaccagcucuccggcaucaacaacaucgccuucuccaacugaggacuaguggaagcauuuuccuggcugauuaaaagaaauuacucagcuauggucaucuguuccuguuagaaggcuaugcagcauauuauauacuaugcgcauguuaugaaaugcauaauaaaaaauuuuaaaaaaucuaaaagaucuaaaaaaaaaaaaaaaaaaaaaaaaaaaaaaaaaaaaaaaaaaaaaaaaaaaaaaaaaaaaaaaaugcaucccccccccccccccccccccccccccccccaaaggcucuuuucagagccaccagaauu

SEQ ID NO: 17056 - RNA, 2060 nt, Artificial Sequence
  mRNA product Design d-5 comprising derived and/or modified sequence from HRSV(Memphis-37)__AIY60640.1__F_DSCav1_mut5 (opt3)
gggagagggcgcuuggcuugcaaggacccugagcugcggcauugaagcacacccaacccaacucgacugaagucagccucacugaaccggaucugagaaucuucucucucugggcuugccagggcucuccgaaccuagcuagcauccucuucaauuccaacuagaaagcuuaccauggagcugcccauccucaagaccaacgccauuacaacuauacuugcugcagugacgcugugcuucgccagcucccagaauaucaccgaagaguuuuaccaaucuacauguucagcggucaguaaaggcuauuugagcgcuuuaagaacugggugguacaccuccguuauuacaaucgaacugucuaacauuaaggagaauaaaugcaacggaaccgacgccaaggugaaacuaaucaagcaggaacucgauaaguauaaaaaugcaguaacugagcugcagcuucugaugcagucgaccccugccgcugguucaggcagcgcaauagccagugggaucgcuguguguaaggucuugcaccucgagggagaagugaacaaaauuaagaaugcccugcuguccacaaacaaagcgguugugucucucagcggcugcggugucuccguguuaacguucaagguacuggaccuuaagaauuacaucgauaaacaauugcugccaauucuaaacaagcagucauguaguaucagcaauauagagacuguuauugaauuucagcagaaaaacaauaggcuccuggagaucacccgggaguucucugugaacgcaggggucacaacuccgguguccaccuauaugcuuacaaauucagaacuguugagccucauuaacgacaugcccaucaccaacgaucaaaagaaacugaugaguaauaacgugcagaucguccgccagcagucuuacuccauuaugugcauaaucaaggaggaaguuuuagccuaugugguacaacugccucucuacggagugauugacacgccauguuggaaacuucauacuagcccccugugcacaaccaauacuaaggagggcucgaacaucuguuugacacgaaccgaucguggcugguacugcgacaaugcugggucugucuccuuuuucccucaggccgaaacguguaaggugcagucaaacagaguguuuugcgauaccaugaauaguagaacacugccaagcgaggugaaccucugcaauauagacauuuucaaccccaaauaugauuguaagaucaugacuuccaaaaccgacgucucuagcucagugaucacaagucugggagcaauuguauccugcuacgguaagacuaaauguaccgcuagcaauaagugcaggggcaucauuaagacauuuucuaacgggugugauuauguuucaaauaaaggaguggacaccgucagugugggcaacacucuuuacuaugucaauaagcaagaggguaaaagccuguacgugaagggggaaccuauaaucaacuucuaugacccauugguuuuuccguccgaugaguucgacgccucuauuucgcagguuaacgagaaaaucaaucagagccucgcguuuauccggaaguccgaugaacuguuacacaacguaaaugucggaaagucaacgacaaacauuaugauaaccacuaucauuaucgugauuaucguuauacugcuacuccugaucgccgugggccuuuucuuguacugcaaagcacgcaguacccccgucacacugucuaaggaccagcucagcggcauuaauaacaucgcuuucuccaauugaggacuaguggaagcauuuuccuggcugauuaaaagaaauuacucagcuauggucaucuguuccuguuagaaggcuaugcagcauauuauauacuaugcgcauguuaugaaaugcauaauaaaaaauuuuaaaaaaucuaaaagaucuaaaaaaaaaaaaaaaaaaaaaaaaaaaaaaaaaaaaaaaaaaaaaaaaaaaaaaaaaaaaaaaaugcaucccccccccccccccccccccccccccccccaaaggcucuuuucagagccaccagaauu

SEQ ID NO: 17057 - RNA, 2060 nt, Artificial Sequence
  mRNA product Design d-5 comprising derived and/or modified sequence from HRSV(Memphis-37)__AIY60640.1__F_DSCav1_mut5 (opt4)
gggagagggcgcuuggcuugcaaggacccugagcugcggcauugaagcacacccaacccaacucgacugaagucagccucacugaaccggaucugagaaucuucucucucugggcuugccagggcucuccgaaccuagcuagcauccucuucaauuccaacuagaaagcuuaccauggagcugcccauccugaagaccaacgccaucaccaccauccuggccgccgugacccugugcuucgccagcagccagaacaucaccgaggaguucuaccagagcaccugcagcgccgugagcaagggcuaccugagcgcccugagaaccggcugguacaccagcgugaucaccaucgagcugagcaacaucaaggagaacaagugcaacggcaccgacgccaaggugaagcugaucaagcaggagcuggacaaguacaagaacgccgugaccgagcugcagcugcugaugcagagcacccccgccgccggcagcggcagcgccaucgccagcggcaucgccgugugcaaggugcugcaccuggagggcgaggugaacaagaucaagaacgcccugcugagcaccaacaaggccguggugagccugagcggcugcggcgugagcgugcugaccuucaaggugcuggaccugaagaacuacaucgacaagcagcugcugcccauccugaacaagcagagcugcagcaucagcaacaucgagaccgugaucgaguuccagcagaagaacaacagacugcuggagaucaccagagaguucagcgugaacgccggcgugaccacccccgugagcaccuacaugcugaccaacagcgagcugcugagccugaucaacgacaugcccaucaccaacgaccagaagaagcugaugagcaacaacgugcagaucgugagacagcagagcuacagcaucaugugcaucaucaaggaggaggugcuggccuacguggugcagcugccccuguacggcgugaucgacacccccugcuggaagcugcacaccagcccccugugcaccaccaacaccaaggagggcagcaacaucugccugaccagaaccgacagaggcugguacugcgacaacgccggcagcgugagcuucuucccccaggccgagaccugcaaggugcagagcaacagaguguucugcgacaccaugaacagcagaacccugcccagcgaggugaaccugugcaacaucgacaucuucaaccccaaguacgacugcaagaucaugaccagcaagaccgacgugagcagcagcgugaucaccagccugggcgccaucgugagcugcuacggcaagaccaagugcaccgccagcaacaagugcagaggcaucaucaagaccuucagcaacggcugcgacuacgugagcaacaagggcguggacaccgugagcgugggcaacacccuguacuacgugaacaagcaggagggcaagagccuguacgugaagggcgagcccaucaucaacuucuacgacccccugguguuccccagcgacgaguucgacgccagcaucagccaggugaacgagaagaucaaccagagccuggccuucaucagaaagagcgacgagcugcugcacaacgugaacgugggcaagagcaccaccaacaucaugaucaccaccaucaucaucgugaucaucgugauccugcugcugcugaucgccgugggccuguuccuguacugcaaggccagaagcacccccgugacccugagcaaggaccagcugagcggcaucaacaacaucgccuucagcaacugaggacuaguggaagcauuuuccuggcugauuaaaagaaauuacucagcuauggucaucuguuccuguuagaaggcuaugcagcauauuauauacuaugcgcauguuaugaaaugcauaauaaaaaauuuuaaaaaaucuaaaagaucuaaaaaaaaaaaaaaaaaaaaaaaaaaaaaaaaaaaaaaaaaaaaaaaaaaaaaaaaaaaaaaaaugcaucccccccccccccccccccccccccccccccaaaggcucuuuucagagccaccagaauu

SEQ ID NO: 17058 - RNA, 2060 nt, Artificial Sequence
  mRNA product Design d-5 comprising derived and/or modified sequence from HRSV(Memphis-37)__AIY60640.1__F_DSCav1_mut5 (opt5)
gggagagggcgcuuggcuugcaaggacccugagcugcggcauugaagcacacccaacccaacucgacugaagucagccucacugaaccggaucugagaaucuucucucucugggcuugccagggcucuccgaaccuagcuagcauccucuucaauuccaacuagaaagcuuaccauggagcugcccauccucaagaccaacgccauuacaacgauccuggcugccgugacccuuugcuucgcgagcucccagaauauuacagaagaguuuuaccaaucuaccuguagcgcugucuccaaaggcuaucugucugcccucagaacagggugguacaccagcguuaucacaauugaacuguccaacaucaaggagaauaaaugcaacggaaccgacgccaaggugaaacuuaucaagcaggaacuggauaaguauaaaaaugcugugacggagcuccagcugcugaugcagucuaccccugccgcuggcagcggguccgccauugcgagcggaaucgccgucuguaaggugcuccaccuggagggcgaaguuaacaaaauuaagaaugcccuucugucuacaaacaaagcuguggucucccucagcgggugcggagugucuguucugaccuucaaggugcuugaccugaagaauuacaucgauaaacaacuccugccgauucugaacaagcaguccuguagcaucucuaauauugagacagucaucgaauuucagcagaaaaacaaucggcuccuggagaucacccgcgaguucuccgugaacgcuggcgugacgacacccgucagcaccuauaugcuuacaaauuccgaacugcucucucugauuaacgacaugccuaucaccaacgaucaaaagaaacuuaugagcaauaacguucagauugugagacagcaguccuacagcaucaugugcauuaucaaggaggaagugcuggccuaugucgugcaacucccccuguacggcguuaucgacaccccuuguuggaaacugcauacaucuccccucugcacgaccaauacaaaggagggguccaacauuugucugacccggacagaucgcggaugguacugcgacaaugcgggcagcgugagcuuuuucccucaggccgaaaccuguaagguccagucuaacagaguguuuugcgauacgaugaacuccagaacacugccgucugagguuaaucucugcaauaucgacauuuucaaccccaaauaugauuguaagaucaugaccagcaaaaccgacguguccagcucugucauuacaucccugggggcuaucgugagcugcuacggaaagaccaaauguacagccucuaauaagugccggggcaucauuaagacguuuuccaacgggugugauuaugucagcaauaaaggaguggacaccguuuccgugggcaacacacuuuacuaugucaauaagcaagagggcaaaucucuguacgugaagggggaaccuaucauuaacuucuaugacccccucguuuuuccuagcgaugaguucgacgcuuccaucucucaggugaacgagaaaauuaaucagagccuggccuuuauccgcaaguccgaugaacugcuccacaacgucaaugugggaaagagcaccacaaacauuaugaucaccacgaucauuaucgugauuaucguuauucugcuucugcucaucgccgucggccuguuccuguacugcaaagcuagaucuacccccgugacacuuuccaaggaccagcucagcgggaucaauaacauugcguucucuaauugaggacuaguggaagcauuuuccuggcugauuaaaagaaauuacucagcuauggucaucuguuccuguuagaaggcuaugcagcauauuauauacuaugcgcauguuaugaaaugcauaauaaaaaauuuuaaaaaaucuaaaagaucuaaaaaaaaaaaaaaaaaaaaaaaaaaaaaaaaaaaaaaaaaaaaaaaaaaaaaaaaaaaaaaaaugcaucccccccccccccccccccccccccccccccaaaggcucuuuucagagccaccagaauu

SEQ ID NO: 17059 - RNA, 2060 nt, Artificial Sequence
  mRNA product Design d-5 comprising derived and/or modified sequence from HRSV(Memphis-37)__AIY60640.1__F_DSCav1_mut5 (opt6)
gggagagggcgcuuggcuugcaaggacccugagcugcggcauugaagcacacccaacccaacucgacugaagucagccucacugaaccggaucugagaaucuucucucucugggcuugccagggcucuccgaaccuagcuagcauccucuucaauuccaacuagaaagcuuaccauggaacucccaaucuuaaaaacaaacgcaauaacuacaauacucgcagcaguaacacuaugcuucgcaucaucacaaaacauaaccgaagaauuuuaccaaaguacaugcucagcaguaucaaaagguuaccucucagcccuaagaaccggaugguacacaucaguaaucacuauagaacuauccaauauaaaagaaaacaaaugcaacggcacugacgcaaaaguuaaauuaauuaaacaagaacucgauaaauauaaaaaugcaguaacagaacuacaacuacuaaugcaaagcaccccagcugcaggaagcggaucagcaaucgcaucaggaauagcaguauguaaaguacuacaccuagaaggagaagucaacaaaaucaaaaaugcacuacuaaguacaaacaaagcuguaguaagccuaucagguugcggaguaucaguauuaacauuuaaaguccucgaccuaaaaaauuacauagauaaacaacucuuaccaauacucaauaaacaaaguugcagcaucagcaacauagaaacagucaucgaauuucaacaaaaaaauaauagacuccuagaaauaacacgugaauuuucaguaaaugcuggaguaacaacaccaguaucuacauauaugcuaacaaauagcgaacuacucucacuuauuaacgauaugcccauaacaaacgaccaaaaaaaacuuaugucaaacaauguucaaauaguuagacaacaauccuacagcauaaugugcauaaucaaagaagaaguucuagcuuacguaguacaacuaccacucuaugguguuaucgacacccccuguuggaaacuucacacaucaccacuaugcacaacaaacacaaaagaaggaucaaauauuugcuuaacaagaacagauagaggaugguauugcgauaaugccggaucaguaucauuuuuuccacaagcagaaacauguaaaguacaauccaaccgaguauuuugcgacaccaugaacuccagaacacuaccaucugaagucaaccuauguaauauagauauauuuaacccaaaauaugacuguaaaaucaugacaucaaaaacugauguaaguucuaguguaauaaccagcuuaggcgccauaguaagcuguuacgguaaaacaaaaugcacagcaagcaacaaaugccgcgguauaauaaaaacauucucaaacggaugcgauuauguaaguaacaaaggaguagauacagucuccguaggcaacacauuauacuacguaaacaaacaagaaggaaaaucacuauauguaaaaggagaaccaaucauaaauuucuacgacccacuuguauuccccagcgacgaauuugaugcuuccauuucacaagucaacgaaaaaauaaaccaaucauuagccuucauaagaaaaucagacgaauuauuacauaauguuaaugucggcaaauccacaacuaauauaaugauaacaacaaucauaauaguaauaaucguuauacuacuauuacucauagcaguaggacucuucuuauauuguaaagccagauccaccccaguaacacucucaaaagaccaauuaucaggaauuaauaacaucgcauuuucaaacuaaggacuaguggaagcauuuuccuggcugauuaaaagaaauuacucagcuauggucaucuguuccuguuagaaggcuaugcagcauauuauauacuaugcgcauguuaugaaaugcauaauaaaaaauuuuaaaaaaucuaaaagaucuaaaaaaaaaaaaaaaaaaaaaaaaaaaaaaaaaaaaaaaaaaaaaaaaaaaaaaaaaaaaaaaaugcaucccccccccccccccccccccccccccccccaaaggcucuuuucagagccaccagaauu

SEQ ID NO: 17060 - RNA, 2060 nt, Artificial Sequence
  mRNA product Design d-5 comprising derived and/or modified sequence from HRSV(Memphis-37)__AIY60640.1__F_DSCav1_mut5 (opt11)
gggagagggcgcuuggcuugcaaggacccugagcugcggcauugaagcacacccaacccaacucgacugaagucagccucacugaaccggaucugagaaucuucucucucugggcuugccagggcucuccgaaccuagcuagcauccucuucaauuccaacuagaaagcuuaccauggaacuccccauccuuaaaaccaacgcaaucaccacaauacucgccgccgucacccucugcuuugcguccucccagaacaucaccgaagaguucuaccaaucgaccugcagcgccgucagcaagggcuaccucucagcccuccgaacaggcugguacacauccgucaucaccaucgaacucucaaacauaaaagaaaacaaguguaacggcaccgacgcgaaaguuaaacucaucaaacaagaacucgauaaauacaaaaacgcaguaaccgaacuacaacuccuaaugcaauccacacccgcagccggcagcggcuccgcaaucgccuccggcauagcagucugcaaaguccuccaccucgaaggagaagucaauaaaaucaaaaacgcccuccuauccaccaacaaagcgguugucucccuguccggaugcggaguuagcguccuaaccuucaaggugcucgaccucaaaaacuacauagacaaacaacuacuccccauacucaacaaacaaucaugcuccaucagcaacaucgagaccgucaucgaguuccaacagaaaaacaaccgccuccucgaaaucacacgagaguucuccguaaacgccggcgucacaacccccguuuccacuuacaugcucacaaacagcgaacuccucucccucaucaacgacaugccaaucaccaacgaccaaaagaaacucauguccaacaacguccaaaucguccgccaacaaagcuacagcauaaugugcaucauaaaagaagaaguacucgcguacguaguccaacuaccccuauacggcgucaucgacacccccugcuggaaacugcacacuucuccccucuguacaaccaacacuaaagaaggcucgaacaucugccucaccagaacagaccgaggaugguacugcgacaacgccggcuccgucagcuucuucccccaggccgaaacaugcaaaguacaaucaaaccgagucuucugcgacacaaugaacagcagaacucuacccuccgaaguuaaccuaugcaacaucgacaucuucaaccccaaauacgacugcaaaauaaugaccucaaaaacagacguguccagcuccguuaucaccucucucggagccaucguauccuguuauggaaaaaccaaaugcaccgccucaaacaaaugccgaggcauaaucaaaacauucucaaauggaugcgacuacguauccaacaaaggagucgacaccgucagcgugggcaauacccucuacuacgucaacaaacaggaagggaaaucccucuauguaaagggcgagcccauuauuaacuucuaugacccccucguguucccaagcgacgaguucgacgccuccauaucacaagucaaugagaaaaucaaccaaucacuagcuuucauucgcaaauccgacgaacuccuucacaacgucaacgucggcaaauccaccaccaacaucaugaucaccaccauaauuaucgucauuaucgucauacuacuccuacucaucgccgucggccucuuccucuauugcaaagcacgcucgacacccgucacccuuucaaaagaccaacuuuccggcauaaacaacauagccuucagcaacuagggacuaguggaagcauuuuccuggcugauuaaaagaaauuacucagcuauggucaucuguuccuguuagaaggcuaugcagcauauuauauacuaugcgcauguuaugaaaugcauaauaaaaaauuuuaaaaaaucuaaaagaucuaaaaaaaaaaaaaaaaaaaaaaaaaaaaaaaaaaaaaaaaaaaaaaaaaaaaaaaaaaaaaaaaugcaucccccccccccccccccccccccccccccccaaaggcucuuuucagagccaccagaauu

SEQ ID NO: 17061 - RNA, 1940 nt, Artificial Sequence
  mRNA product Design e-1 comprising derived and/or modified sequence from HRSV(Memphis-37)__AIY60640.1__F_DSCav1_mut5 (opt1)
gggagaauauaagcguuggcggagcgucgguuguagcacucugcgcgcccgcucuucugcugcuguuugucuacuuccuccugcuuccccgccgccgccgccgccaucaagcuuaccauggagcugcccauccucaagaccaacgccaucaccacgauccuggccgcggugacccugugcuucgccagcucccagaacaucaccgaggaguucuaccagagcacgugcuccgccgucagcaagggcuaccucuccgcccugcgcaccgggugguacaccagcgugaucaccaucgagcuguccaacaucaaggagaacaagugcaacggcaccgacgccaaggugaagcucaucaagcaggagcuggacaaguacaagaacgcggucacggagcugcagcuccugaugcagagcaccccggccgccggcuccgggagcgcgaucgccuccggcaucgccgucugcaaggugcugcaccucgagggcgaggugaacaagaucaagaacgcccugcuguccaccaacaaggccgucgugagccucuccggcugcggggugagcguccugaccuucaaggugcuggaccucaagaacuacaucgacaagcagcugcugcccauccugaacaagcagagcugcuccaucagcaacaucgagaccgucaucgaguuccagcagaagaacaaccgccuccuggagaucacgcgggaguucagcgugaacgcgggcgugaccacccccgucuccaccuacaugcugacgaacagcgagcuccugucccugaucaacgacaugccgaucaccaacgaccagaagaagcucaugagcaacaacgugcagaucgugcgccagcaguccuacagcaucaugugcaucaucaaggaggagguccuggccuacguggugcagcugccccucuacggggucaucgacacccccugcuggaagcugcacaccagcccccugugcacgaccaacaccaaggagggcuccaacaucugccucacccggacggaccgcgggugguacugcgacaacgccggcagcguguccuucuucccgcaggccgagaccugcaagguccagagcaaccggguguucugcgacaccaugaacucccggacccugcccagcgaggugaaccucugcaacaucgacaucuucaaccccaaguacgacugcaagaucaugacguccaagaccgacgucagcuccagcgugaucaccucccugggcgccaucgugagcugcuacgggaagaccaagugcacggcgagcaacaagugccgcggcaucaucaagaccuucuccaacgggugcgacuacgucagcaacaagggcguggacaccguguccgucggcaacacccuguacuacgugaacaagcaggagggcaagagccucuacgugaagggggagcccaucaucaacuucuacgacccgcuggucuuccccuccgacgaguucgacgccagcaucucccaggugaacgagaagaucaaccagagccuggccuucauccggaaguccgacgagcuccugcacaacgugaacgucggcaagagcaccacgaacaucaugaucaccaccaucaucaucgugaucaucgugauccugcugcuccugaucgccgucgggcuguuccucuacugcaaggcccgcuccacccccgugacgcugagcaaggaccagcuguccgggaucaacaacaucgcguucagcaacugaggacuaguguccaccugucccuccugggcugcuggauugucucguuuuccugccaaauaaacaggaucagcgcuuuacagaucuaaaaaaaaaaaaaaaaaaaaaaaaaaaaaaaaaaaaaaaaaaaaaaaaaaaaaaaaaaaaaaaaugcaucccccccccccccccccccccccccccccccaaaggcucuuuucagagccaccagaauu

SEQ ID NO: 17062 - RNA, 1940 nt, Artificial Sequence
  mRNA product Design e-1 comprising derived and/or modified sequence from HRSV(Memphis-37)__AIY60640.1__F_DSCav1_mut5 (opt1)
gggagaauauaagcguuggcggagcgucgguuguagcacucugcgcgcccgcucuucugcugcuguuugucuacuuccuccugcuuccccgccgccgccgccgccaucaagcuuaccauggagcugcccauccucaagaccaacgccaucaccacgauccuggccgcggugacccugugcuucgccagcucccagaacaucaccgaggaguucuaccagagcacgugcuccgccgucagcaagggcuaccucuccgcccugcgcaccgggugguacaccagcgugaucaccaucgagcuguccaacaucaaggagaacaagugcaacggcaccgacgccaaggugaagcucaucaagcaggagcuggacaaguacaagaacgcggucacggagcugcagcuccugaugcagagcaccccggccgccggguccggcagcgccaucgcguccgggaucgccgugugcaaggugcugcaccucgagggcgaggucaacaagaucaagaacgcccugcugagcaccaacaaggccguggugucccucagcggcugcggggucuccgugcugaccuucaaggugcuggaccucaagaacuacaucgacaagcagcugcugcccauccucaacaagcagagcugcuccaucagcaacaucgagacggucaucgaguuccagcagaagaacaaccggcugcuggagaucacccgcgaguucuccgugaacgccggcgugaccacccccgucagcacguacaugcucaccaacagcgagcugcugucccucaucaacgacaugcccaucaccaacgaccagaagaagcugaugagcaacaacgugcagaucgugcggcagcaguccuacagcaucaugugcaucaucaaggaggagguccuggcguacguggugcagcucccgcuguacggggucaucgacacccccugcuggaagcugcacacgagcccccucugcaccaccaacaccaaggagggcuccaacaucugccugacgcgcaccgaccgggggugguacugcgacaacgccggcuccgugagcuucuucccccaggccgagaccugcaaggugcaguccaaccgcgucuucugcgacaccaugaacagccggacgcucccguccgaggugaaccugugcaacaucgacaucuucaaccccaaguacgacugcaagaucaugaccagcaagaccgacgucuccagcuccgugaucaccagccugggcgccaucguguccugcuacgggaagacgaagugcaccgccagcaacaagugccggggcaucaucaagaccuucuccaacgggugcgacuacgucagcaacaagggcguggacaccgugagcgucggcaacacgcucuacuacgugaacaagcaggaggggaagucccuguacgugaagggcgagcccaucaucaacuucuacgacccccuggucuucccgagcgacgaguucgacgcguccaucagccaggugaacgagaagaucaaccagucccucgccuucauccgcaagagcgacgagcugcugcacaacgugaacgucgggaaguccaccaccaacaucaugaucaccaccaucaucaucgugaucaucgugauccuccugcugcucaucgccgucggccuguuccuguacugcaaggcccggagcacgcccgugacccuguccaaggaccagcucagcgggaucaacaacaucgccuucuccaacugaggacuaguguccaccugucccuccugggcugcuggauugucucguuuuccugccaaauaaacaggaucagcgcuuuacagaucuaaaaaaaaaaaaaaaaaaaaaaaaaaaaaaaaaaaaaaaaaaaaaaaaaaaaaaaaaaaaaaaaugcaucccccccccccccccccccccccccccccccaaaggcucuuuucagagccaccagaauu

SEQ ID NO: 17063 - RNA, 1940 nt, Artificial Sequence
  mRNA product Design e-1 comprising derived and/or modified sequence from HRSV(Memphis-37)__AIY60640.1__F_DSCav1_mut5 (opt2)
gggagaauauaagcguuggcggagcgucgguuguagcacucugcgcgcccgcucuucugcugcuguuugucuacuuccuccugcuuccccgccgccgccgccgccaucaagcuuaccauggagcuccccauccucaagaccaacgccaucaccaccauccucgccgccgucacccucugcuucgccuccucccagaacaucaccgaggaguucuaccaguccaccugcuccgccgucuccaagggcuaccucuccgcccuccgcaccggcugguacaccuccgucaucaccaucgagcucuccaacaucaaggagaacaagugcaacggcaccgacgccaaggucaagcucaucaagcaggagcucgacaaguacaagaacgccgucaccgagcuccagcuccucaugcaguccacccccgccgccggcuccggcuccgccaucgccuccggcaucgccgucugcaagguccuccaccucgagggcgaggucaacaagaucaagaacgcccuccucuccaccaacaaggccgucgucucccucuccggcugcggcgucuccguccucaccuucaagguccucgaccucaagaacuacaucgacaagcagcuccuccccauccucaacaagcaguccugcuccaucuccaacaucgagaccgucaucgaguuccagcagaagaacaaccgccuccucgagaucacccgcgaguucuccgucaacgccggcgucaccacccccgucuccaccuacaugcucaccaacuccgagcuccucucccucaucaacgacaugcccaucaccaacgaccagaagaagcucauguccaacaacguccagaucguccgccagcaguccuacuccaucaugugcaucaucaaggaggagguccucgccuacgucguccagcucccccucuacggcgucaucgacacccccugcuggaagcuccacaccuccccccucugcaccaccaacaccaaggagggcuccaacaucugccucacccgcaccgaccgcggcugguacugcgacaacgccggcuccgucuccuucuucccccaggccgagaccugcaagguccaguccaaccgcgucuucugcgacaccaugaacucccgcacccuccccuccgaggucaaccucugcaacaucgacaucuucaaccccaaguacgacugcaagaucaugaccuccaagaccgacgucuccuccuccgucaucaccucccucggcgccaucgucuccugcuacggcaagaccaagugcaccgccuccaacaagugccgcggcaucaucaagaccuucuccaacggcugcgacuacgucuccaacaagggcgucgacaccgucuccgucggcaacacccucuacuacgucaacaagcaggagggcaagucccucuacgucaagggcgagcccaucaucaacuucuacgacccccucgucuuccccuccgacgaguucgacgccuccaucucccaggucaacgagaagaucaaccagucccucgccuucauccgcaaguccgacgagcuccuccacaacgucaacgucggcaaguccaccaccaacaucaugaucaccaccaucaucaucgucaucaucgucauccuccuccuccucaucgccgucggccucuuccucuacugcaaggcccgcuccacccccgucacccucuccaaggaccagcucuccggcaucaacaacaucgccuucuccaacugaggacuaguguccaccugucccuccugggcugcuggauugucucguuuuccugccaaauaaacaggaucagcgcuuuacagaucuaaaaaaaaaaaaaaaaaaaaaaaaaaaaaaaaaaaaaaaaaaaaaaaaaaaaaaaaaaaaaaaaugcaucccccccccccccccccccccccccccccccaaaggcucuuuucagagccaccagaauu

SEQ ID NO: 17064 - RNA, 1940 nt, Artificial Sequence
  mRNA product Design e-1 comprising derived and/or modified sequence from HRSV(Memphis-37)__AIY60640.1__F_DSCav1_mut5 (opt3)
gggagaauauaagcguuggcggagcgucgguuguagcacucugcgcgcccgcucuucugcugcuguuugucuacuuccuccugcuuccccgccgccgccgccgccaucaagcuuaccauggagcugcccauccucaagaccaacgccauuacaacuauacuugcugcagugacgcugugcuucgccagcucccagaauaucaccgaagaguuuuaccaaucuacauguucagcggucaguaaaggcuauuugagcgcuuuaagaacugggugguacaccuccguuauuacaaucgaacugucuaacauuaaggagaauaaaugcaacggaaccgacgccaaggugaaacuaaucaagcaggaacucgauaaguauaaaaaugcaguaacugagcugcagcuucugaugcagucgaccccugccgcugguucaggcagcgcaauagccagugggaucgcuguguguaaggucuugcaccucgagggagaagugaacaaaauuaagaaugcccugcuguccacaaacaaagcgguugugucucucagcggcugcggugucuccguguuaacguucaagguacuggaccuuaagaauuacaucgauaaacaauugcugccaauucuaaacaagcagucauguaguaucagcaauauagagacuguuauugaauuucagcagaaaaacaauaggcuccuggagaucacccgggaguucucugugaacgcaggggucacaacuccgguguccaccuauaugcuuacaaauucagaacuguugagccucauuaacgacaugcccaucaccaacgaucaaaagaaacugaugaguaauaacgugcagaucguccgccagcagucuuacuccauuaugugcauaaucaaggaggaaguuuuagccuaugugguacaacugccucucuacggagugauugacacgccauguuggaaacuucauacuagcccccugugcacaaccaauacuaaggagggcucgaacaucuguuugacacgaaccgaucguggcugguacugcgacaaugcugggucugucuccuuuuucccucaggccgaaacguguaaggugcagucaaacagaguguuuugcgauaccaugaauaguagaacacugccaagcgaggugaaccucugcaauauagacauuuucaaccccaaauaugauuguaagaucaugacuuccaaaaccgacgucucuagcucagugaucacaagucugggagcaauuguauccugcuacgguaagacuaaauguaccgcuagcaauaagugcaggggcaucauuaagacauuuucuaacgggugugauuauguuucaaauaaaggaguggacaccgucagugugggcaacacucuuuacuaugucaauaagcaagaggguaaaagccuguacgugaagggggaaccuauaaucaacuucuaugacccauugguuuuuccguccgaugaguucgacgccucuauuucgcagguuaacgagaaaaucaaucagagccucgcguuuauccggaaguccgaugaacuguuacacaacguaaaugucggaaagucaacgacaaacauuaugauaaccacuaucauuaucgugauuaucguuauacugcuacuccugaucgccgugggccuuuucuuguacugcaaagcacgcaguacccccgucacacugucuaaggaccagcucagcggcauuaauaacaucgcuuucuccaauugaggacuaguguccaccugucccuccugggcugcuggauugucucguuuuccugccaaauaaacaggaucagcgcuuuacagaucuaaaaaaaaaaaaaaaaaaaaaaaaaaaaaaaaaaaaaaaaaaaaaaaaaaaaaaaaaaaaaaaaugcaucccccccccccccccccccccccccccccccaaaggcucuuuucagagccaccagaauu

SEQ ID NO: 17065 - RNA, 1940 nt, Artificial Sequence
  mRNA product Design e-1 comprising derived and/or modified sequence from HRSV(Memphis-37)__AIY60640.1__F_DSCav1_mut5 (opt4)
gggagaauauaagcguuggcggagcgucgguuguagcacucugcgcgcccgcucuucugcugcuguuugucuacuuccuccugcuuccccgccgccgccgccgccaucaagcuuaccauggagcugcccauccugaagaccaacgccaucaccaccauccuggccgccgugacccugugcuucgccagcagccagaacaucaccgaggaguucuaccagagcaccugcagcgccgugagcaagggcuaccugagcgcccugagaaccggcugguacaccagcgugaucaccaucgagcugagcaacaucaaggagaacaagugcaacggcaccgacgccaaggugaagcugaucaagcaggagcuggacaaguacaagaacgccgugaccgagcugcagcugcugaugcagagcacccccgccgccggcagcggcagcgccaucgccagcggcaucgccgugugcaaggugcugcaccuggagggcgaggugaacaagaucaagaacgcccugcugagcaccaacaaggccguggugagccugagcggcugcggcgugagcgugcugaccuucaaggugcuggaccugaagaacuacaucgacaagcagcugcugcccauccugaacaagcagagcugcagcaucagcaacaucgagaccgugaucgaguuccagcagaagaacaacagacugcuggagaucaccagagaguucagcgugaacgccggcgugaccacccccgugagcaccuacaugcugaccaacagcgagcugcugagccugaucaacgacaugcccaucaccaacgaccagaagaagcugaugagcaacaacgugcagaucgugagacagcagagcuacagcaucaugugcaucaucaaggaggaggugcuggccuacguggugcagcugccccuguacggcgugaucgacacccccugcuggaagcugcacaccagcccccugugcaccaccaacaccaaggagggcagcaacaucugccugaccagaaccgacagaggcugguacugcgacaacgccggcagcgugagcuucuucccccaggccgagaccugcaaggugcagagcaacagaguguucugcgacaccaugaacagcagaacccugcccagcgaggugaaccugugcaacaucgacaucuucaaccccaaguacgacugcaagaucaugaccagcaagaccgacgugagcagcagcgugaucaccagccugggcgccaucgugagcugcuacggcaagaccaagugcaccgccagcaacaagugcagaggcaucaucaagaccuucagcaacggcugcgacuacgugagcaacaagggcguggacaccgugagcgugggcaacacccuguacuacgugaacaagcaggagggcaagagccuguacgugaagggcgagcccaucaucaacuucuacgacccccugguguuccccagcgacgaguucgacgccagcaucagccaggugaacgagaagaucaaccagagccuggccuucaucagaaagagcgacgagcugcugcacaacgugaacgugggcaagagcaccaccaacaucaugaucaccaccaucaucaucgugaucaucgugauccugcugcugcugaucgccgugggccuguuccuguacugcaaggccagaagcacccccgugacccugagcaaggaccagcugagcggcaucaacaacaucgccuucagcaacugaggacuaguguccaccugucccuccugggcugcuggauugucucguuuuccugccaaauaaacaggaucagcgcuuuacagaucuaaaaaaaaaaaaaaaaaaaaaaaaaaaaaaaaaaaaaaaaaaaaaaaaaaaaaaaaaaaaaaaaugcaucccccccccccccccccccccccccccccccaaaggcucuuuucagagccaccagaauu

SEQ ID NO: 17066 - RNA, 1940 nt, Artificial Sequence
  mRNA product Design e-1 comprising derived and/or modified sequence from HRSV(Memphis-37)__AIY60640.1__F_DSCav1_mut5 (opt5)
gggagaauauaagcguuggcggagcgucgguuguagcacucugcgcgcccgcucuucugcugcuguuugucuacuuccuccugcuuccccgccgccgccgccgccaucaagcuuaccauggagcugcccauccucaagaccaacgccauuacaacgauccuggcugccgugacccuuugcuucgcgagcucccagaauauuacagaagaguuuuaccaaucuaccuguagcgcugucuccaaaggcuaucugucugcccucagaacagggugguacaccagcguuaucacaauugaacuguccaacaucaaggagaauaaaugcaacggaaccgacgccaaggugaaacuuaucaagcaggaacuggauaaguauaaaaaugcugugacggagcuccagcugcugaugcagucuaccccugccgcuggcagcggguccgccauugcgagcggaaucgccgucuguaaggugcuccaccuggagggcgaaguuaacaaaauuaagaaugcccuucugucuacaaacaaagcuguggucucccucagcgggugcggagugucuguucugaccuucaaggugcuugaccugaagaauuacaucgauaaacaacuccugccgauucugaacaagcaguccuguagcaucucuaauauugagacagucaucgaauuucagcagaaaaacaaucggcuccuggagaucacccgcgaguucuccgugaacgcuggcgugacgacacccgucagcaccuauaugcuuacaaauuccgaacugcucucucugauuaacgacaugccuaucaccaacgaucaaaagaaacuuaugagcaauaacguucagauugugagacagcaguccuacagcaucaugugcauuaucaaggaggaagugcuggccuaugucgugcaacucccccuguacggcguuaucgacaccccuuguuggaaacugcauacaucuccccucugcacgaccaauacaaaggagggguccaacauuugucugacccggacagaucgcggaugguacugcgacaaugcgggcagcgugagcuuuuucccucaggccgaaaccuguaagguccagucuaacagaguguuuugcgauacgaugaacuccagaacacugccgucugagguuaaucucugcaauaucgacauuuucaaccccaaauaugauuguaagaucaugaccagcaaaaccgacguguccagcucugucauuacaucccugggggcuaucgugagcugcuacggaaagaccaaauguacagccucuaauaagugccggggcaucauuaagacguuuuccaacgggugugauuaugucagcaauaaaggaguggacaccguuuccgugggcaacacacuuuacuaugucaauaagcaagagggcaaaucucuguacgugaagggggaaccuaucauuaacuucuaugacccccucguuuuuccuagcgaugaguucgacgcuuccaucucucaggugaacgagaaaauuaaucagagccuggccuuuauccgcaaguccgaugaacugcuccacaacgucaaugugggaaagagcaccacaaacauuaugaucaccacgaucauuaucgugauuaucguuauucugcuucugcucaucgccgucggccuguuccuguacugcaaagcuagaucuacccccgugacacuuuccaaggaccagcucagcgggaucaauaacauugcguucucuaauugaggacuaguguccaccugucccuccugggcugcuggauugucucguuuuccugccaaauaaacaggaucagcgcuuuacagaucuaaaaaaaaaaaaaaaaaaaaaaaaaaaaaaaaaaaaaaaaaaaaaaaaaaaaaaaaaaaaaaaaugcaucccccccccccccccccccccccccccccccaaaggcucuuuucagagccaccagaauu

SEQ ID NO: 17067 - RNA, 1940 nt, Artificial Sequence
  mRNA product Design e-1 comprising derived and/or modified sequence from HRSV(Memphis-37)__AIY60640.1__F_DSCav1_mut5 (opt6)
gggagaauauaagcguuggcggagcgucgguuguagcacucugcgcgcccgcucuucugcugcuguuugucuacuuccuccugcuuccccgccgccgccgccgccaucaagcuuaccauggaacucccaaucuuaaaaacaaacgcaauaacuacaauacucgcagcaguaacacuaugcuucgcaucaucacaaaacauaaccgaagaauuuuaccaaaguacaugcucagcaguaucaaaagguuaccucucagcccuaagaaccggaugguacacaucaguaaucacuauagaacuauccaauauaaaagaaaacaaaugcaacggcacugacgcaaaaguuaaauuaauuaaacaagaacucgauaaauauaaaaaugcaguaacagaacuacaacuacuaaugcaaagcaccccagcugcaggaagcggaucagcaaucgcaucaggaauagcaguauguaaaguacuacaccuagaaggagaagucaacaaaaucaaaaaugcacuacuaaguacaaacaaagcuguaguaagccuaucagguugcggaguaucaguauuaacauuuaaaguccucgaccuaaaaaauuacauagauaaacaacucuuaccaauacucaauaaacaaaguugcagcaucagcaacauagaaacagucaucgaauuucaacaaaaaaauaauagacuccuagaaauaacacgugaauuuucaguaaaugcuggaguaacaacaccaguaucuacauauaugcuaacaaauagcgaacuacucucacuuauuaacgauaugcccauaacaaacgaccaaaaaaaacuuaugucaaacaauguucaaauaguuagacaacaauccuacagcauaaugugcauaaucaaagaagaaguucuagcuuacguaguacaacuaccacucuaugguguuaucgacacccccuguuggaaacuucacacaucaccacuaugcacaacaaacacaaaagaaggaucaaauauuugcuuaacaagaacagauagaggaugguauugcgauaaugccggaucaguaucauuuuuuccacaagcagaaacauguaaaguacaauccaaccgaguauuuugcgacaccaugaacuccagaacacuaccaucugaagucaaccuauguaauauagauauauuuaacccaaaauaugacuguaaaaucaugacaucaaaaacugauguaaguucuaguguaauaaccagcuuaggcgccauaguaagcuguuacgguaaaacaaaaugcacagcaagcaacaaaugccgcgguauaauaaaaacauucucaaacggaugcgauuauguaaguaacaaaggaguagauacagucuccguaggcaacacauuauacuacguaaacaaacaagaaggaaaaucacuauauguaaaaggagaaccaaucauaaauuucuacgacccacuuguauuccccagcgacgaauuugaugcuuccauuucacaagucaacgaaaaaauaaaccaaucauuagccuucauaagaaaaucagacgaauuauuacauaauguuaaugucggcaaauccacaacuaauauaaugauaacaacaaucauaauaguaauaaucguuauacuacuauuacucauagcaguaggacucuucuuauauuguaaagccagauccaccccaguaacacucucaaaagaccaauuaucaggaauuaauaacaucgcauuuucaaacuaaggacuaguguccaccugucccuccugggcugcuggauugucucguuuuccugccaaauaaacaggaucagcgcuuuacagaucuaaaaaaaaaaaaaaaaaaaaaaaaaaaaaaaaaaaaaaaaaaaaaaaaaaaaaaaaaaaaaaaaugcaucccccccccccccccccccccccccccccccaaaggcucuuuucagagccaccagaauu

SEQ ID NO: 17068 - RNA, 1940 nt, Artificial Sequence
  mRNA product Design e-1 comprising derived and/or modified sequence from HRSV(Memphis-37)__AIY60640.1__F_DSCav1_mut5 (opt11)
gggagaauauaagcguuggcggagcgucgguuguagcacucugcgcgcccgcucuucugcugcuguuugucuacuuccuccugcuuccccgccgccgccgccgccaucaagcuuaccauggaacuccccauccuuaaaaccaacgcaaucaccacaauacucgccgccgucacccucugcuuugcguccucccagaacaucaccgaagaguucuaccaaucgaccugcagcgccgucagcaagggcuaccucucagcccuccgaacaggcugguacacauccgucaucaccaucgaacucucaaacauaaaagaaaacaaguguaacggcaccgacgcgaaaguuaaacucaucaaacaagaacucgauaaauacaaaaacgcaguaaccgaacuacaacuccuaaugcaauccacacccgcagccggcagcggcuccgcaaucgccuccggcauagcagucugcaaaguccuccaccucgaaggagaagucaauaaaaucaaaaacgcccuccuauccaccaacaaagcgguugucucccuguccggaugcggaguuagcguccuaaccuucaaggugcucgaccucaaaaacuacauagacaaacaacuacuccccauacucaacaaacaaucaugcuccaucagcaacaucgagaccgucaucgaguuccaacagaaaaacaaccgccuccucgaaaucacacgagaguucuccguaaacgccggcgucacaacccccguuuccacuuacaugcucacaaacagcgaacuccucucccucaucaacgacaugccaaucaccaacgaccaaaagaaacucauguccaacaacguccaaaucguccgccaacaaagcuacagcauaaugugcaucauaaaagaagaaguacucgcguacguaguccaacuaccccuauacggcgucaucgacacccccugcuggaaacugcacacuucuccccucuguacaaccaacacuaaagaaggcucgaacaucugccucaccagaacagaccgaggaugguacugcgacaacgccggcuccgucagcuucuucccccaggccgaaacaugcaaaguacaaucaaaccgagucuucugcgacacaaugaacagcagaacucuacccuccgaaguuaaccuaugcaacaucgacaucuucaaccccaaauacgacugcaaaauaaugaccucaaaaacagacguguccagcuccguuaucaccucucucggagccaucguauccuguuauggaaaaaccaaaugcaccgccucaaacaaaugccgaggcauaaucaaaacauucucaaauggaugcgacuacguauccaacaaaggagucgacaccgucagcgugggcaauacccucuacuacgucaacaaacaggaagggaaaucccucuauguaaagggcgagcccauuauuaacuucuaugacccccucguguucccaagcgacgaguucgacgccuccauaucacaagucaaugagaaaaucaaccaaucacuagcuuucauucgcaaauccgacgaacuccuucacaacgucaacgucggcaaauccaccaccaacaucaugaucaccaccauaauuaucgucauuaucgucauacuacuccuacucaucgccgucggccucuuccucuauugcaaagcacgcucgacacccgucacccuuucaaaagaccaacuuuccggcauaaacaacauagccuucagcaacuagggacuaguguccaccugucccuccugggcugcuggauugucucguuuuccugccaaauaaacaggaucagcgcuuuacagaucuaaaaaaaaaaaaaaaaaaaaaaaaaaaaaaaaaaaaaaaaaaaaaaaaaaaaaaaaaaaaaaaaugcaucccccccccccccccccccccccccccccccaaaggcucuuuucagagccaccagaauu

SEQ ID NO: 17069 - RNA, 1922 nt, Artificial Sequence
  mRNA product Design e-2 comprising derived and/or modified sequence from HRSV(Memphis-37)__AIY60640.1__F_DSCav1_mut5 (opt1)
gggagacccgugacccggaaguuguacggcuacgcgacuuucccucccacaaacccucgcgcccuuccuuuccuacuugggcccggcagaaagcuuaccauggagcugcccauccucaagaccaacgccaucaccacgauccuggccgcggugacccugugcuucgccagcucccagaacaucaccgaggaguucuaccagagcacgugcuccgccgucagcaagggcuaccucuccgcccugcgcaccgggugguacaccagcgugaucaccaucgagcuguccaacaucaaggagaacaagugcaacggcaccgacgccaaggugaagcucaucaagcaggagcuggacaaguacaagaacgcggucacggagcugcagcuccugaugcagagcaccccggccgccggcuccgggagcgcgaucgccuccggcaucgccgucugcaaggugcugcaccucgagggcgaggugaacaagaucaagaacgcccugcuguccaccaacaaggccgucgugagccucuccggcugcggggugagcguccugaccuucaaggugcuggaccucaagaacuacaucgacaagcagcugcugcccauccugaacaagcagagcugcuccaucagcaacaucgagaccgucaucgaguuccagcagaagaacaaccgccuccuggagaucacgcgggaguucagcgugaacgcgggcgugaccacccccgucuccaccuacaugcugacgaacagcgagcuccugucccugaucaacgacaugccgaucaccaacgaccagaagaagcucaugagcaacaacgugcagaucgugcgccagcaguccuacagcaucaugugcaucaucaaggaggagguccuggccuacguggugcagcugccccucuacggggucaucgacacccccugcuggaagcugcacaccagcccccugugcacgaccaacaccaaggagggcuccaacaucugccucacccggacggaccgcgggugguacugcgacaacgccggcagcguguccuucuucccgcaggccgagaccugcaagguccagagcaaccggguguucugcgacaccaugaacucccggacccugcccagcgaggugaaccucugcaacaucgacaucuucaaccccaaguacgacugcaagaucaugacguccaagaccgacgucagcuccagcgugaucaccucccugggcgccaucgugagcugcuacgggaagaccaagugcacggcgagcaacaagugccgcggcaucaucaagaccuucuccaacgggugcgacuacgucagcaacaagggcguggacaccguguccgucggcaacacccuguacuacgugaacaagcaggagggcaagagccucuacgugaagggggagcccaucaucaacuucuacgacccgcuggucuuccccuccgacgaguucgacgccagcaucucccaggugaacgagaagaucaaccagagccuggccuucauccggaaguccgacgagcuccugcacaacgugaacgucggcaagagcaccacgaacaucaugaucaccaccaucaucaucgugaucaucgugauccugcugcuccugaucgccgucgggcuguuccucuacugcaaggcccgcuccacccccgugacgcugagcaaggaccagcuguccgggaucaacaacaucgcguucagcaacugaggacuaguguccaccugucccuccugggcugcuggauugucucguuuuccugccaaauaaacaggaucagcgcuuuacagaucuaaaaaaaaaaaaaaaaaaaaaaaaaaaaaaaaaaaaaaaaaaaaaaaaaaaaaaaaaaaaaaaaugcaucccccccccccccccccccccccccccccccaaaggcucuuuucagagccaccagaauu

SEQ ID NO: 17070 - RNA, 1922 nt, Artificial Sequence
  mRNA product Design e-2 comprising derived and/or modified sequence from HRSV(Memphis-37)__AIY60640.1__F_DSCav1_mut5 (opt1)
gggagacccgugacccggaaguuguacggcuacgcgacuuucccucccacaaacccucgcgcccuuccuuuccuacuugggcccggcagaaagcuuaccauggagcugcccauccucaagaccaacgccaucaccacgauccuggccgcggugacccugugcuucgccagcucccagaacaucaccgaggaguucuaccagagcacgugcuccgccgucagcaagggcuaccucuccgcccugcgcaccgggugguacaccagcgugaucaccaucgagcuguccaacaucaaggagaacaagugcaacggcaccgacgccaaggugaagcucaucaagcaggagcuggacaaguacaagaacgcggucacggagcugcagcuccugaugcagagcaccccggccgccggguccggcagcgccaucgcguccgggaucgccgugugcaaggugcugcaccucgagggcgaggucaacaagaucaagaacgcccugcugagcaccaacaaggccguggugucccucagcggcugcggggucuccgugcugaccuucaaggugcuggaccucaagaacuacaucgacaagcagcugcugcccauccucaacaagcagagcugcuccaucagcaacaucgagacggucaucgaguuccagcagaagaacaaccggcugcuggagaucacccgcgaguucuccgugaacgccggcgugaccacccccgucagcacguacaugcucaccaacagcgagcugcugucccucaucaacgacaugcccaucaccaacgaccagaagaagcugaugagcaacaacgugcagaucgugcggcagcaguccuacagcaucaugugcaucaucaaggaggagguccuggcguacguggugcagcucccgcuguacggggucaucgacacccccugcuggaagcugcacacgagcccccucugcaccaccaacaccaaggagggcuccaacaucugccugacgcgcaccgaccgggggugguacugcgacaacgccggcuccgugagcuucuucccccaggccgagaccugcaaggugcaguccaaccgcgucuucugcgacaccaugaacagccggacgcucccguccgaggugaaccugugcaacaucgacaucuucaaccccaaguacgacugcaagaucaugaccagcaagaccgacgucuccagcuccgugaucaccagccugggcgccaucguguccugcuacgggaagacgaagugcaccgccagcaacaagugccggggcaucaucaagaccuucuccaacgggugcgacuacgucagcaacaagggcguggacaccgugagcgucggcaacacgcucuacuacgugaacaagcaggaggggaagucccuguacgugaagggcgagcccaucaucaacuucuacgacccccuggucuucccgagcgacgaguucgacgcguccaucagccaggugaacgagaagaucaaccagucccucgccuucauccgcaagagcgacgagcugcugcacaacgugaacgucgggaaguccaccaccaacaucaugaucaccaccaucaucaucgugaucaucgugauccuccugcugcucaucgccgucggccuguuccuguacugcaaggcccggagcacgcccgugacccuguccaaggaccagcucagcgggaucaacaacaucgccuucuccaacugaggacuaguguccaccugucccuccugggcugcuggauugucucguuuuccugccaaauaaacaggaucagcgcuuuacagaucuaaaaaaaaaaaaaaaaaaaaaaaaaaaaaaaaaaaaaaaaaaaaaaaaaaaaaaaaaaaaaaaaugcaucccccccccccccccccccccccccccccccaaaggcucuuuucagagccaccagaauu

SEQ ID NO: 17071 - RNA, 1922 nt, Artificial Sequence
  mRNA product Design e-2 comprising derived and/or modified sequence from HRSV(Memphis-37)__AIY60640.1__F_DSCav1_mut5 (opt2)
gggagacccgugacccggaaguuguacggcuacgcgacuuucccucccacaaacccucgcgcccuuccuuuccuacuugggcccggcagaaagcuuaccauggagcuccccauccucaagaccaacgccaucaccaccauccucgccgccgucacccucugcuucgccuccucccagaacaucaccgaggaguucuaccaguccaccugcuccgccgucuccaagggcuaccucuccgcccuccgcaccggcugguacaccuccgucaucaccaucgagcucuccaacaucaaggagaacaagugcaacggcaccgacgccaaggucaagcucaucaagcaggagcucgacaaguacaagaacgccgucaccgagcuccagcuccucaugcaguccacccccgccgccggcuccggcuccgccaucgccuccggcaucgccgucugcaagguccuccaccucgagggcgaggucaacaagaucaagaacgcccuccucuccaccaacaaggccgucgucucccucuccggcugcggcgucuccguccucaccuucaagguccucgaccucaagaacuacaucgacaagcagcuccuccccauccucaacaagcaguccugcuccaucuccaacaucgagaccgucaucgaguuccagcagaagaacaaccgccuccucgagaucacccgcgaguucuccgucaacgccggcgucaccacccccgucuccaccuacaugcucaccaacuccgagcuccucucccucaucaacgacaugcccaucaccaacgaccagaagaagcucauguccaacaacguccagaucguccgccagcaguccuacuccaucaugugcaucaucaaggaggagguccucgccuacgucguccagcucccccucuacggcgucaucgacacccccugcuggaagcuccacaccuccccccucugcaccaccaacaccaaggagggcuccaacaucugccucacccgcaccgaccgcggcugguacugcgacaacgccggcuccgucuccuucuucccccaggccgagaccugcaagguccaguccaaccgcgucuucugcgacaccaugaacucccgcacccuccccuccgaggucaaccucugcaacaucgacaucuucaaccccaaguacgacugcaagaucaugaccuccaagaccgacgucuccuccuccgucaucaccucccucggcgccaucgucuccugcuacggcaagaccaagugcaccgccuccaacaagugccgcggcaucaucaagaccuucuccaacggcugcgacuacgucuccaacaagggcgucgacaccgucuccgucggcaacacccucuacuacgucaacaagcaggagggcaagucccucuacgucaagggcgagcccaucaucaacuucuacgacccccucgucuuccccuccgacgaguucgacgccuccaucucccaggucaacgagaagaucaaccagucccucgccuucauccgcaaguccgacgagcuccuccacaacgucaacgucggcaaguccaccaccaacaucaugaucaccaccaucaucaucgucaucaucgucauccuccuccuccucaucgccgucggccucuuccucuacugcaaggcccgcuccacccccgucacccucuccaaggaccagcucuccggcaucaacaacaucgccuucuccaacugaggacuaguguccaccugucccuccugggcugcuggauugucucguuuuccugccaaauaaacaggaucagcgcuuuacagaucuaaaaaaaaaaaaaaaaaaaaaaaaaaaaaaaaaaaaaaaaaaaaaaaaaaaaaaaaaaaaaaaaugcaucccccccccccccccccccccccccccccccaaaggcucuuuucagagccaccagaauu

SEQ ID NO: 17072 - RNA, 1922 nt, Artificial Sequence
  mRNA product Design e-2 comprising derived and/or modified sequence from HRSV(Memphis-37)__AIY60640.1__F_DSCav1_mut5 (opt3)
gggagacccgugacccggaaguuguacggcuacgcgacuuucccucccacaaacccucgcgcccuuccuuuccuacuugggcccggcagaaagcuuaccauggagcugcccauccucaagaccaacgccauuacaacuauacuugcugcagugacgcugugcuucgccagcucccagaauaucaccgaagaguuuuaccaaucuacauguucagcggucaguaaaggcuauuugagcgcuuuaagaacugggugguacaccuccguuauuacaaucgaacugucuaacauuaaggagaauaaaugcaacggaaccgacgccaaggugaaacuaaucaagcaggaacucgauaaguauaaaaaugcaguaacugagcugcagcuucugaugcagucgaccccugccgcugguucaggcagcgcaauagccagugggaucgcuguguguaaggucuugcaccucgagggagaagugaacaaaauuaagaaugcccugcuguccacaaacaaagcgguugugucucucagcggcugcggugucuccguguuaacguucaagguacuggaccuuaagaauuacaucgauaaacaauugcugccaauucuaaacaagcagucauguaguaucagcaauauagagacuguuauugaauuucagcagaaaaacaauaggcuccuggagaucacccgggaguucucugugaacgcaggggucacaacuccgguguccaccuauaugcuuacaaauucagaacuguugagccucauuaacgacaugcccaucaccaacgaucaaaagaaacugaugaguaauaacgugcagaucguccgccagcagucuuacuccauuaugugcauaaucaaggaggaaguuuuagccuaugugguacaacugccucucuacggagugauugacacgccauguuggaaacuucauacuagcccccugugcacaaccaauacuaaggagggcucgaacaucuguuugacacgaaccgaucguggcugguacugcgacaaugcugggucugucuccuuuuucccucaggccgaaacguguaaggugcagucaaacagaguguuuugcgauaccaugaauaguagaacacugccaagcgaggugaaccucugcaauauagacauuuucaaccccaaauaugauuguaagaucaugacuuccaaaaccgacgucucuagcucagugaucacaagucugggagcaauuguauccugcuacgguaagacuaaauguaccgcuagcaauaagugcaggggcaucauuaagacauuuucuaacgggugugauuauguuucaaauaaaggaguggacaccgucagugugggcaacacucuuuacuaugucaauaagcaagaggguaaaagccuguacgugaagggggaaccuauaaucaacuucuaugacccauugguuuuuccguccgaugaguucgacgccucuauuucgcagguuaacgagaaaaucaaucagagccucgcguuuauccggaaguccgaugaacuguuacacaacguaaaugucggaaagucaacgacaaacauuaugauaaccacuaucauuaucgugauuaucguuauacugcuacuccugaucgccgugggccuuuucuuguacugcaaagcacgcaguacccccgucacacugucuaaggaccagcucagcggcauuaauaacaucgcuuucuccaauugaggacuaguguccaccugucccuccugggcugcuggauugucucguuuuccugccaaauaaacaggaucagcgcuuuacagaucuaaaaaaaaaaaaaaaaaaaaaaaaaaaaaaaaaaaaaaaaaaaaaaaaaaaaaaaaaaaaaaaaugcaucccccccccccccccccccccccccccccccaaaggcucuuuucagagccaccagaauu

SEQ ID NO: 17073 - RNA, 1922 nt, Artificial Sequence
  mRNA product Design e-2 comprising derived and/or modified sequence from HRSV(Memphis-37)__AIY60640.1__F_DSCav1_mut5 (opt4)
gggagacccgugacccggaaguuguacggcuacgcgacuuucccucccacaaacccucgcgcccuuccuuuccuacuugggcccggcagaaagcuuaccauggagcugcccauccugaagaccaacgccaucaccaccauccuggccgccgugacccugugcuucgccagcagccagaacaucaccgaggaguucuaccagagcaccugcagcgccgugagcaagggcuaccugagcgcccugagaaccggcugguacaccagcgugaucaccaucgagcugagcaacaucaaggagaacaagugcaacggcaccgacgccaaggugaagcugaucaagcaggagcuggacaaguacaagaacgccgugaccgagcugcagcugcugaugcagagcacccccgccgccggcagcggcagcgccaucgccagcggcaucgccgugugcaaggugcugcaccuggagggcgaggugaacaagaucaagaacgcccugcugagcaccaacaaggccguggugagccugagcggcugcggcgugagcgugcugaccuucaaggugcuggaccugaagaacuacaucgacaagcagcugcugcccauccugaacaagcagagcugcagcaucagcaacaucgagaccgugaucgaguuccagcagaagaacaacagacugcuggagaucaccagagaguucagcgugaacgccggcgugaccacccccgugagcaccuacaugcugaccaacagcgagcugcugagccugaucaacgacaugcccaucaccaacgaccagaagaagcugaugagcaacaacgugcagaucgugagacagcagagcuacagcaucaugugcaucaucaaggaggaggugcuggccuacguggugcagcugccccuguacggcgugaucgacacccccugcuggaagcugcacaccagcccccugugcaccaccaacaccaaggagggcagcaacaucugccugaccagaaccgacagaggcugguacugcgacaacgccggcagcgugagcuucuucccccaggccgagaccugcaaggugcagagcaacagaguguucugcgacaccaugaacagcagaacccugcccagcgaggugaaccugugcaacaucgacaucuucaaccccaaguacgacugcaagaucaugaccagcaagaccgacgugagcagcagcgugaucaccagccugggcgccaucgugagcugcuacggcaagaccaagugcaccgccagcaacaagugcagaggcaucaucaagaccuucagcaacggcugcgacuacgugagcaacaagggcguggacaccgugagcgugggcaacacccuguacuacgugaacaagcaggagggcaagagccuguacgugaagggcgagcccaucaucaacuucuacgacccccugguguuccccagcgacgaguucgacgccagcaucagccaggugaacgagaagaucaaccagagccuggccuucaucagaaagagcgacgagcugcugcacaacgugaacgugggcaagagcaccaccaacaucaugaucaccaccaucaucaucgugaucaucgugauccugcugcugcugaucgccgugggccuguuccuguacugcaaggccagaagcacccccgugacccugagcaaggaccagcugagcggcaucaacaacaucgccuucagcaacugaggacuaguguccaccugucccuccugggcugcuggauugucucguuuuccugccaaauaaacaggaucagcgcuuuacagaucuaaaaaaaaaaaaaaaaaaaaaaaaaaaaaaaaaaaaaaaaaaaaaaaaaaaaaaaaaaaaaaaaugcaucccccccccccccccccccccccccccccccaaaggcucuuuucagagccaccagaauu

SEQ ID NO: 17074 - RNA, 1922 nt, Artificial Sequence
  mRNA product Design e-2 comprising derived and/or modified sequence from HRSV(Memphis-37)__AIY60640.1__F_DSCav1_mut5 (opt5)
gggagacccgugacccggaaguuguacggcuacgcgacuuucccucccacaaacccucgcgcccuuccuuuccuacuugggcccggcagaaagcuuaccauggagcugcccauccucaagaccaacgccauuacaacgauccuggcugccgugacccuuugcuucgcgagcucccagaauauuacagaagaguuuuaccaaucuaccuguagcgcugucuccaaaggcuaucugucugcccucagaacagggugguacaccagcguuaucacaauugaacuguccaacaucaaggagaauaaaugcaacggaaccgacgccaaggugaaacuuaucaagcaggaacuggauaaguauaaaaaugcugugacggagcuccagcugcugaugcagucuaccccugccgcuggcagcggguccgccauugcgagcggaaucgccgucuguaaggugcuccaccuggagggcgaaguuaacaaaauuaagaaugcccuucugucuacaaacaaagcuguggucucccucagcgggugcggagugucuguucugaccuucaaggugcuugaccugaagaauuacaucgauaaacaacuccugccgauucugaacaagcaguccuguagcaucucuaauauugagacagucaucgaauuucagcagaaaaacaaucggcuccuggagaucacccgcgaguucuccgugaacgcuggcgugacgacacccgucagcaccuauaugcuuacaaauuccgaacugcucucucugauuaacgacaugccuaucaccaacgaucaaaagaaacuuaugagcaauaacguucagauugugagacagcaguccuacagcaucaugugcauuaucaaggaggaagugcuggccuaugucgugcaacucccccuguacggcguuaucgacaccccuuguuggaaacugcauacaucuccccucugcacgaccaauacaaaggagggguccaacauuugucugacccggacagaucgcggaugguacugcgacaaugcgggcagcgugagcuuuuucccucaggccgaaaccuguaagguccagucuaacagaguguuuugcgauacgaugaacuccagaacacugccgucugagguuaaucucugcaauaucgacauuuucaaccccaaauaugauuguaagaucaugaccagcaaaaccgacguguccagcucugucauuacaucccugggggcuaucgugagcugcuacggaaagaccaaauguacagccucuaauaagugccggggcaucauuaagacguuuuccaacgggugugauuaugucagcaauaaaggaguggacaccguuuccgugggcaacacacuuuacuaugucaauaagcaagagggcaaaucucuguacgugaagggggaaccuaucauuaacuucuaugacccccucguuuuuccuagcgaugaguucgacgcuuccaucucucaggugaacgagaaaauuaaucagagccuggccuuuauccgcaaguccgaugaacugcuccacaacgucaaugugggaaagagcaccacaaacauuaugaucaccacgaucauuaucgugauuaucguuauucugcuucugcucaucgccgucggccuguuccuguacugcaaagcuagaucuacccccgugacacuuuccaaggaccagcucagcgggaucaauaacauugcguucucuaauugaggacuaguguccaccugucccuccugggcugcuggauugucucguuuuccugccaaauaaacaggaucagcgcuuuacagaucuaaaaaaaaaaaaaaaaaaaaaaaaaaaaaaaaaaaaaaaaaaaaaaaaaaaaaaaaaaaaaaaaugcaucccccccccccccccccccccccccccccccaaaggcucuuuucagagccaccagaauu

SEQ ID NO: 17075 - RNA, 1922 nt, Artificial Sequence
  mRNA product Design e-2 comprising derived and/or modified sequence from HRSV(Memphis-37)__AIY60640.1__F_DSCav1_mut5 (opt6)
gggagacccgugacccggaaguuguacggcuacgcgacuuucccucccacaaacccucgcgcccuuccuuuccuacuugggcccggcagaaagcuuaccauggaacucccaaucuuaaaaacaaacgcaauaacuacaauacucgcagcaguaacacuaugcuucgcaucaucacaaaacauaaccgaagaauuuuaccaaaguacaugcucagcaguaucaaaagguuaccucucagcccuaagaaccggaugguacacaucaguaaucacuauagaacuauccaauauaaaagaaaacaaaugcaacggcacugacgcaaaaguuaaauuaauuaaacaagaacucgauaaauauaaaaaugcaguaacagaacuacaacuacuaaugcaaagcaccccagcugcaggaagcggaucagcaaucgcaucaggaauagcaguauguaaaguacuacaccuagaaggagaagucaacaaaaucaaaaaugcacuacuaaguacaaacaaagcuguaguaagccuaucagguugcggaguaucaguauuaacauuuaaaguccucgaccuaaaaaauuacauagauaaacaacucuuaccaauacucaauaaacaaaguugcagcaucagcaacauagaaacagucaucgaauuucaacaaaaaaauaauagacuccuagaaauaacacgugaauuuucaguaaaugcuggaguaacaacaccaguaucuacauauaugcuaacaaauagcgaacuacucucacuuauuaacgauaugcccauaacaaacgaccaaaaaaaacuuaugucaaacaauguucaaauaguuagacaacaauccuacagcauaaugugcauaaucaaagaagaaguucuagcuuacguaguacaacuaccacucuaugguguuaucgacacccccuguuggaaacuucacacaucaccacuaugcacaacaaacacaaaagaaggaucaaauauuugcuuaacaagaacagauagaggaugguauugcgauaaugccggaucaguaucauuuuuuccacaagcagaaacauguaaaguacaauccaaccgaguauuuugcgacaccaugaacuccagaacacuaccaucugaagucaaccuauguaauauagauauauuuaacccaaaauaugacuguaaaaucaugacaucaaaaacugauguaaguucuaguguaauaaccagcuuaggcgccauaguaagcuguuacgguaaaacaaaaugcacagcaagcaacaaaugccgcgguauaauaaaaacauucucaaacggaugcgauuauguaaguaacaaaggaguagauacagucuccguaggcaacacauuauacuacguaaacaaacaagaaggaaaaucacuauauguaaaaggagaaccaaucauaaauuucuacgacccacuuguauuccccagcgacgaauuugaugcuuccauuucacaagucaacgaaaaaauaaaccaaucauuagccuucauaagaaaaucagacgaauuauuacauaauguuaaugucggcaaauccacaacuaauauaaugauaacaacaaucauaauaguaauaaucguuauacuacuauuacucauagcaguaggacucuucuuauauuguaaagccagauccaccccaguaacacucucaaaagaccaauuaucaggaauuaauaacaucgcauuuucaaacuaaggacuaguguccaccugucccuccugggcugcuggauugucucguuuuccugccaaauaaacaggaucagcgcuuuacagaucuaaaaaaaaaaaaaaaaaaaaaaaaaaaaaaaaaaaaaaaaaaaaaaaaaaaaaaaaaaaaaaaaugcaucccccccccccccccccccccccccccccccaaaggcucuuuucagagccaccagaauu

SEQ ID NO: 17076 - RNA, 1922 nt, Artificial Sequence
  mRNA product Design e-2 comprising derived and/or modified sequence from HRSV(Memphis-37)__AIY60640.1__F_DSCav1_mut5 (opt11)
gggagacccgugacccggaaguuguacggcuacgcgacuuucccucccacaaacccucgcgcccuuccuuuccuacuugggcccggcagaaagcuuaccauggaacuccccauccuuaaaaccaacgcaaucaccacaauacucgccgccgucacccucugcuuugcguccucccagaacaucaccgaagaguucuaccaaucgaccugcagcgccgucagcaagggcuaccucucagcccuccgaacaggcugguacacauccgucaucaccaucgaacucucaaacauaaaagaaaacaaguguaacggcaccgacgcgaaaguuaaacucaucaaacaagaacucgauaaauacaaaaacgcaguaaccgaacuacaacuccuaaugcaauccacacccgcagccggcagcggcuccgcaaucgccuccggcauagcagucugcaaaguccuccaccucgaaggagaagucaauaaaaucaaaaacgcccuccuauccaccaacaaagcgguugucucccuguccggaugcggaguuagcguccuaaccuucaaggugcucgaccucaaaaacuacauagacaaacaacuacuccccauacucaacaaacaaucaugcuccaucagcaacaucgagaccgucaucgaguuccaacagaaaaacaaccgccuccucgaaaucacacgagaguucuccguaaacgccggcgucacaacccccguuuccacuuacaugcucacaaacagcgaacuccucucccucaucaacgacaugccaaucaccaacgaccaaaagaaacucauguccaacaacguccaaaucguccgccaacaaagcuacagcauaaugugcaucauaaaagaagaaguacucgcguacguaguccaacuaccccuauacggcgucaucgacacccccugcuggaaacugcacacuucuccccucuguacaaccaacacuaaagaaggcucgaacaucugccucaccagaacagaccgaggaugguacugcgacaacgccggcuccgucagcuucuucccccaggccgaaacaugcaaaguacaaucaaaccgagucuucugcgacacaaugaacagcagaacucuacccuccgaaguuaaccuaugcaacaucgacaucuucaaccccaaauacgacugcaaaauaaugaccucaaaaacagacguguccagcuccguuaucaccucucucggagccaucguauccuguuauggaaaaaccaaaugcaccgccucaaacaaaugccgaggcauaaucaaaacauucucaaauggaugcgacuacguauccaacaaaggagucgacaccgucagcgugggcaauacccucuacuacgucaacaaacaggaagggaaaucccucuauguaaagggcgagcccauuauuaacuucuaugacccccucguguucccaagcgacgaguucgacgccuccauaucacaagucaaugagaaaaucaaccaaucacuagcuuucauucgcaaauccgacgaacuccuucacaacgucaacgucggcaaauccaccaccaacaucaugaucaccaccauaauuaucgucauuaucgucauacuacuccuacucaucgccgucggccucuuccucuauugcaaagcacgcucgacacccgucacccuuucaaaagaccaacuuuccggcauaaacaacauagccuucagcaacuagggacuaguguccaccugucccuccugggcugcuggauugucucguuuuccugccaaauaaacaggaucagcgcuuuacagaucuaaaaaaaaaaaaaaaaaaaaaaaaaaaaaaaaaaaaaaaaaaaaaaaaaaaaaaaaaaaaaaaaugcaucccccccccccccccccccccccccccccccaaaggcucuuuucagagccaccagaauu

SEQ ID NO: 17077 - RNA, 1892 nt, Artificial Sequence
  mRNA product Design e-3 comprising derived and/or modified sequence from HRSV(Memphis-37)__AIY60640.1__F_DSCav1_mut5 (opt1)
gggagacuuucccauucuguagcagaauuugguguugccuguggucuuggucccgcggagaagcuuaccauggagcugcccauccucaagaccaacgccaucaccacgauccuggccgcggugacccugugcuucgccagcucccagaacaucaccgaggaguucuaccagagcacgugcuccgccgucagcaagggcuaccucuccgcccugcgcaccgggugguacaccagcgugaucaccaucgagcuguccaacaucaaggagaacaagugcaacggcaccgacgccaaggugaagcucaucaagcaggagcuggacaaguacaagaacgcggucacggagcugcagcuccugaugcagagcaccccggccgccggcuccgggagcgcgaucgccuccggcaucgccgucugcaaggugcugcaccucgagggcgaggugaacaagaucaagaacgcccugcuguccaccaacaaggccgucgugagccucuccggcugcggggugagcguccugaccuucaaggugcuggaccucaagaacuacaucgacaagcagcugcugcccauccugaacaagcagagcugcuccaucagcaacaucgagaccgucaucgaguuccagcagaagaacaaccgccuccuggagaucacgcgggaguucagcgugaacgcgggcgugaccacccccgucuccaccuacaugcugacgaacagcgagcuccugucccugaucaacgacaugccgaucaccaacgaccagaagaagcucaugagcaacaacgugcagaucgugcgccagcaguccuacagcaucaugugcaucaucaaggaggagguccuggccuacguggugcagcugccccucuacggggucaucgacacccccugcuggaagcugcacaccagcccccugugcacgaccaacaccaaggagggcuccaacaucugccucacccggacggaccgcgggugguacugcgacaacgccggcagcguguccuucuucccgcaggccgagaccugcaagguccagagcaaccggguguucugcgacaccaugaacucccggacccugcccagcgaggugaaccucugcaacaucgacaucuucaaccccaaguacgacugcaagaucaugacguccaagaccgacgucagcuccagcgugaucaccucccugggcgccaucgugagcugcuacgggaagaccaagugcacggcgagcaacaagugccgcggcaucaucaagaccuucuccaacgggugcgacuacgucagcaacaagggcguggacaccguguccgucggcaacacccuguacuacgugaacaagcaggagggcaagagccucuacgugaagggggagcccaucaucaacuucuacgacccgcuggucuuccccuccgacgaguucgacgccagcaucucccaggugaacgagaagaucaaccagagccuggccuucauccggaaguccgacgagcuccugcacaacgugaacgucggcaagagcaccacgaacaucaugaucaccaccaucaucaucgugaucaucgugauccugcugcuccugaucgccgucgggcuguuccucuacugcaaggcccgcuccacccccgugacgcugagcaaggaccagcuguccgggaucaacaacaucgcguucagcaacugaggacuaguguccaccugucccuccugggcugcuggauugucucguuuuccugccaaauaaacaggaucagcgcuuuacagaucuaaaaaaaaaaaaaaaaaaaaaaaaaaaaaaaaaaaaaaaaaaaaaaaaaaaaaaaaaaaaaaaaugcaucccccccccccccccccccccccccccccccaaaggcucuuuucagagccaccagaauu

SEQ ID NO: 17078 - RNA, 1892 nt, Artificial Sequence
  mRNA product Design e-3 comprising derived and/or modified sequence from HRSV(Memphis-37)__AIY60640.1__F_DSCav1_mut5 (opt1)
gggagacuuucccauucuguagcagaauuugguguugccuguggucuuggucccgcggagaagcuuaccauggagcugcccauccucaagaccaacgccaucaccacgauccuggccgcggugacccugugcuucgccagcucccagaacaucaccgaggaguucuaccagagcacgugcuccgccgucagcaagggcuaccucuccgcccugcgcaccgggugguacaccagcgugaucaccaucgagcuguccaacaucaaggagaacaagugcaacggcaccgacgccaaggugaagcucaucaagcaggagcuggacaaguacaagaacgcggucacggagcugcagcuccugaugcagagcaccccggccgccggguccggcagcgccaucgcguccgggaucgccgugugcaaggugcugcaccucgagggcgaggucaacaagaucaagaacgcccugcugagcaccaacaaggccguggugucccucagcggcugcggggucuccgugcugaccuucaaggugcuggaccucaagaacuacaucgacaagcagcugcugcccauccucaacaagcagagcugcuccaucagcaacaucgagacggucaucgaguuccagcagaagaacaaccggcugcuggagaucacccgcgaguucuccgugaacgccggcgugaccacccccgucagcacguacaugcucaccaacagcgagcugcugucccucaucaacgacaugcccaucaccaacgaccagaagaagcugaugagcaacaacgugcagaucgugcggcagcaguccuacagcaucaugugcaucaucaaggaggagguccuggcguacguggugcagcucccgcuguacggggucaucgacacccccugcuggaagcugcacacgagcccccucugcaccaccaacaccaaggagggcuccaacaucugccugacgcgcaccgaccgggggugguacugcgacaacgccggcuccgugagcuucuucccccaggccgagaccugcaaggugcaguccaaccgcgucuucugcgacaccaugaacagccggacgcucccguccgaggugaaccugugcaacaucgacaucuucaaccccaaguacgacugcaagaucaugaccagcaagaccgacgucuccagcuccgugaucaccagccugggcgccaucguguccugcuacgggaagacgaagugcaccgccagcaacaagugccggggcaucaucaagaccuucuccaacgggugcgacuacgucagcaacaagggcguggacaccgugagcgucggcaacacgcucuacuacgugaacaagcaggaggggaagucccuguacgugaagggcgagcccaucaucaacuucuacgacccccuggucuucccgagcgacgaguucgacgcguccaucagccaggugaacgagaagaucaaccagucccucgccuucauccgcaagagcgacgagcugcugcacaacgugaacgucgggaaguccaccaccaacaucaugaucaccaccaucaucaucgugaucaucgugauccuccugcugcucaucgccgucggccuguuccuguacugcaaggcccggagcacgcccgugacccuguccaaggaccagcucagcgggaucaacaacaucgccuucuccaacugaggacuaguguccaccugucccuccugggcugcuggauugucucguuuuccugccaaauaaacaggaucagcgcuuuacagaucuaaaaaaaaaaaaaaaaaaaaaaaaaaaaaaaaaaaaaaaaaaaaaaaaaaaaaaaaaaaaaaaaugcaucccccccccccccccccccccccccccccccaaaggcucuuuucagagccaccagaauu

SEQ ID NO: 17079 - RNA, 1892 nt, Artificial Sequence
  mRNA product Design e-3 comprising derived and/or modified sequence from HRSV(Memphis-37)__AIY60640.1__F_DSCav1_mut5 (opt2)
gggagacuuucccauucuguagcagaauuugguguugccuguggucuuggucccgcggagaagcuuaccauggagcuccccauccucaagaccaacgccaucaccaccauccucgccgccgucacccucugcuucgccuccucccagaacaucaccgaggaguucuaccaguccaccugcuccgccgucuccaagggcuaccucuccgcccuccgcaccggcugguacaccuccgucaucaccaucgagcucuccaacaucaaggagaacaagugcaacggcaccgacgccaaggucaagcucaucaagcaggagcucgacaaguacaagaacgccgucaccgagcuccagcuccucaugcaguccacccccgccgccggcuccggcuccgccaucgccuccggcaucgccgucugcaagguccuccaccucgagggcgaggucaacaagaucaagaacgcccuccucuccaccaacaaggccgucgucucccucuccggcugcggcgucuccguccucaccuucaagguccucgaccucaagaacuacaucgacaagcagcuccuccccauccucaacaagcaguccugcuccaucuccaacaucgagaccgucaucgaguuccagcagaagaacaaccgccuccucgagaucacccgcgaguucuccgucaacgccggcgucaccacccccgucuccaccuacaugcucaccaacuccgagcuccucucccucaucaacgacaugcccaucaccaacgaccagaagaagcucauguccaacaacguccagaucguccgccagcaguccuacuccaucaugugcaucaucaaggaggagguccucgccuacgucguccagcucccccucuacggcgucaucgacacccccugcuggaagcuccacaccuccccccucugcaccaccaacaccaaggagggcuccaacaucugccucacccgcaccgaccgcggcugguacugcgacaacgccggcuccgucuccuucuucccccaggccgagaccugcaagguccaguccaaccgcgucuucugcgacaccaugaacucccgcacccuccccuccgaggucaaccucugcaacaucgacaucuucaaccccaaguacgacugcaagaucaugaccuccaagaccgacgucuccuccuccgucaucaccucccucggcgccaucgucuccugcuacggcaagaccaagugcaccgccuccaacaagugccgcggcaucaucaagaccuucuccaacggcugcgacuacgucuccaacaagggcgucgacaccgucuccgucggcaacacccucuacuacgucaacaagcaggagggcaagucccucuacgucaagggcgagcccaucaucaacuucuacgacccccucgucuuccccuccgacgaguucgacgccuccaucucccaggucaacgagaagaucaaccagucccucgccuucauccgcaaguccgacgagcuccuccacaacgucaacgucggcaaguccaccaccaacaucaugaucaccaccaucaucaucgucaucaucgucauccuccuccuccucaucgccgucggccucuuccucuacugcaaggcccgcuccacccccgucacccucuccaaggaccagcucuccggcaucaacaacaucgccuucuccaacugaggacuaguguccaccugucccuccugggcugcuggauugucucguuuuccugccaaauaaacaggaucagcgcuuuacagaucuaaaaaaaaaaaaaaaaaaaaaaaaaaaaaaaaaaaaaaaaaaaaaaaaaaaaaaaaaaaaaaaaugcaucccccccccccccccccccccccccccccccaaaggcucuuuucagagccaccagaauu

SEQ ID NO: 17080 - RNA, 1892 nt, Artificial Sequence
  mRNA product Design e-3 comprising derived and/or modified sequence from HRSV(Memphis-37)__AIY60640.1__F_DSCav1_mut5 (opt3)
gggagacuuucccauucuguagcagaauuugguguugccuguggucuuggucccgcggagaagcuuaccauggagcugcccauccucaagaccaacgccauuacaacuauacuugcugcagugacgcugugcuucgccagcucccagaauaucaccgaagaguuuuaccaaucuacauguucagcggucaguaaaggcuauuugagcgcuuuaagaacugggugguacaccuccguuauuacaaucgaacugucuaacauuaaggagaauaaaugcaacggaaccgacgccaaggugaaacuaaucaagcaggaacucgauaaguauaaaaaugcaguaacugagcugcagcuucugaugcagucgaccccugccgcugguucaggcagcgcaauagccagugggaucgcuguguguaaggucuugcaccucgagggagaagugaacaaaauuaagaaugcccugcuguccacaaacaaagcgguugugucucucagcggcugcggugucuccguguuaacguucaagguacuggaccuuaagaauuacaucgauaaacaauugcugccaauucuaaacaagcagucauguaguaucagcaauauagagacuguuauugaauuucagcagaaaaacaauaggcuccuggagaucacccgggaguucucugugaacgcaggggucacaacuccgguguccaccuauaugcuuacaaauucagaacuguugagccucauuaacgacaugcccaucaccaacgaucaaaagaaacugaugaguaauaacgugcagaucguccgccagcagucuuacuccauuaugugcauaaucaaggaggaaguuuuagccuaugugguacaacugccucucuacggagugauugacacgccauguuggaaacuucauacuagcccccugugcacaaccaauacuaaggagggcucgaacaucuguuugacacgaaccgaucguggcugguacugcgacaaugcugggucugucuccuuuuucccucaggccgaaacguguaaggugcagucaaacagaguguuuugcgauaccaugaauaguagaacacugccaagcgaggugaaccucugcaauauagacauuuucaaccccaaauaugauuguaagaucaugacuuccaaaaccgacgucucuagcucagugaucacaagucugggagcaauuguauccugcuacgguaagacuaaauguaccgcuagcaauaagugcaggggcaucauuaagacauuuucuaacgggugugauuauguuucaaauaaaggaguggacaccgucagugugggcaacacucuuuacuaugucaauaagcaagaggguaaaagccuguacgugaagggggaaccuauaaucaacuucuaugacccauugguuuuuccguccgaugaguucgacgccucuauuucgcagguuaacgagaaaaucaaucagagccucgcguuuauccggaaguccgaugaacuguuacacaacguaaaugucggaaagucaacgacaaacauuaugauaaccacuaucauuaucgugauuaucguuauacugcuacuccugaucgccgugggccuuuucuuguacugcaaagcacgcaguacccccgucacacugucuaaggaccagcucagcggcauuaauaacaucgcuuucuccaauugaggacuaguguccaccugucccuccugggcugcuggauugucucguuuuccugccaaauaaacaggaucagcgcuuuacagaucuaaaaaaaaaaaaaaaaaaaaaaaaaaaaaaaaaaaaaaaaaaaaaaaaaaaaaaaaaaaaaaaaugcaucccccccccccccccccccccccccccccccaaaggcucuuuucagagccaccagaauu

SEQ ID NO: 17081 - RNA, 1892 nt, Artificial Sequence
  mRNA product Design e-3 comprising derived and/or modified sequence from HRSV(Memphis-37)__AIY60640.1__F_DSCav1_mut5 (opt4)
gggagacuuucccauucuguagcagaauuugguguugccuguggucuuggucccgcggagaagcuuaccauggagcugcccauccugaagaccaacgccaucaccaccauccuggccgccgugacccugugcuucgccagcagccagaacaucaccgaggaguucuaccagagcaccugcagcgccgugagcaagggcuaccugagcgcccugagaaccggcugguacaccagcgugaucaccaucgagcugagcaacaucaaggagaacaagugcaacggcaccgacgccaaggugaagcugaucaagcaggagcuggacaaguacaagaacgccgugaccgagcugcagcugcugaugcagagcacccccgccgccggcagcggcagcgccaucgccagcggcaucgccgugugcaaggugcugcaccuggagggcgaggugaacaagaucaagaacgcccugcugagcaccaacaaggccguggugagccugagcggcugcggcgugagcgugcugaccuucaaggugcuggaccugaagaacuacaucgacaagcagcugcugcccauccugaacaagcagagcugcagcaucagcaacaucgagaccgugaucgaguuccagcagaagaacaacagacugcuggagaucaccagagaguucagcgugaacgccggcgugaccacccccgugagcaccuacaugcugaccaacagcgagcugcugagccugaucaacgacaugcccaucaccaacgaccagaagaagcugaugagcaacaacgugcagaucgugagacagcagagcuacagcaucaugugcaucaucaaggaggaggugcuggccuacguggugcagcugccccuguacggcgugaucgacacccccugcuggaagcugcacaccagcccccugugcaccaccaacaccaaggagggcagcaacaucugccugaccagaaccgacagaggcugguacugcgacaacgccggcagcgugagcuucuucccccaggccgagaccugcaaggugcagagcaacagaguguucugcgacaccaugaacagcagaacccugcccagcgaggugaaccugugcaacaucgacaucuucaaccccaaguacgacugcaagaucaugaccagcaagaccgacgugagcagcagcgugaucaccagccugggcgccaucgugagcugcuacggcaagaccaagugcaccgccagcaacaagugcagaggcaucaucaagaccuucagcaacggcugcgacuacgugagcaacaagggcguggacaccgugagcgugggcaacacccuguacuacgugaacaagcaggagggcaagagccuguacgugaagggcgagcccaucaucaacuucuacgacccccugguguuccccagcgacgaguucgacgccagcaucagccaggugaacgagaagaucaaccagagccuggccuucaucagaaagagcgacgagcugcugcacaacgugaacgugggcaagagcaccaccaacaucaugaucaccaccaucaucaucgugaucaucgugauccugcugcugcugaucgccgugggccuguuccuguacugcaaggccagaagcacccccgugacccugagcaaggaccagcugagcggcaucaacaacaucgccuucagcaacugaggacuaguguccaccugucccuccugggcugcuggauugucucguuuuccugccaaauaaacaggaucagcgcuuuacagaucuaaaaaaaaaaaaaaaaaaaaaaaaaaaaaaaaaaaaaaaaaaaaaaaaaaaaaaaaaaaaaaaaugcaucccccccccccccccccccccccccccccccaaaggcucuuuucagagccaccagaauu

SEQ ID NO: 17082 - RNA, 1892 nt, Artificial Sequence
  mRNA product Design e-3 comprising derived and/or modified sequence from HRSV(Memphis-37)__AIY60640.1__F_DSCav1_mut5 (opt5)
gggagacuuucccauucuguagcagaauuugguguugccuguggucuuggucccgcggagaagcuuaccauggagcugcccauccucaagaccaacgccauuacaacgauccuggcugccgugacccuuugcuucgcgagcucccagaauauuacagaagaguuuuaccaaucuaccuguagcgcugucuccaaaggcuaucugucugcccucagaacagggugguacaccagcguuaucacaauugaacuguccaacaucaaggagaauaaaugcaacggaaccgacgccaaggugaaacuuaucaagcaggaacuggauaaguauaaaaaugcugugacggagcuccagcugcugaugcagucuaccccugccgcuggcagcggguccgccauugcgagcggaaucgccgucuguaaggugcuccaccuggagggcgaaguuaacaaaauuaagaaugcccuucugucuacaaacaaagcuguggucucccucagcgggugcggagugucuguucugaccuucaaggugcuugaccugaagaauuacaucgauaaacaacuccugccgauucugaacaagcaguccuguagcaucucuaauauugagacagucaucgaauuucagcagaaaaacaaucggcuccuggagaucacccgcgaguucuccgugaacgcuggcgugacgacacccgucagcaccuauaugcuuacaaauuccgaacugcucucucugauuaacgacaugccuaucaccaacgaucaaaagaaacuuaugagcaauaacguucagauugugagacagcaguccuacagcaucaugugcauuaucaaggaggaagugcuggccuaugucgugcaacucccccuguacggcguuaucgacaccccuuguuggaaacugcauacaucuccccucugcacgaccaauacaaaggagggguccaacauuugucugacccggacagaucgcggaugguacugcgacaaugcgggcagcgugagcuuuuucccucaggccgaaaccuguaagguccagucuaacagaguguuuugcgauacgaugaacuccagaacacugccgucugagguuaaucucugcaauaucgacauuuucaaccccaaauaugauuguaagaucaugaccagcaaaaccgacguguccagcucugucauuacaucccugggggcuaucgugagcugcuacggaaagaccaaauguacagccucuaauaagugccggggcaucauuaagacguuuuccaacgggugugauuaugucagcaauaaaggaguggacaccguuuccgugggcaacacacuuuacuaugucaauaagcaagagggcaaaucucuguacgugaagggggaaccuaucauuaacuucuaugacccccucguuuuuccuagcgaugaguucgacgcuuccaucucucaggugaacgagaaaauuaaucagagccuggccuuuauccgcaaguccgaugaacugcuccacaacgucaaugugggaaagagcaccacaaacauuaugaucaccacgaucauuaucgugauuaucguuauucugcuucugcucaucgccgucggccuguuccuguacugcaaagcuagaucuacccccgugacacuuuccaaggaccagcucagcgggaucaauaacauugcguucucuaauugaggacuaguguccaccugucccuccugggcugcuggauugucucguuuuccugccaaauaaacaggaucagcgcuuuacagaucuaaaaaaaaaaaaaaaaaaaaaaaaaaaaaaaaaaaaaaaaaaaaaaaaaaaaaaaaaaaaaaaaugcaucccccccccccccccccccccccccccccccaaaggcucuuuucagagccaccagaauu

SEQ ID NO: 17083 - RNA, 1892 nt, Artificial Sequence
  mRNA product Design e-3 comprising derived and/or modified sequence from HRSV(Memphis-37)__AIY60640.1__F_DSCav1_mut5 (opt6)
gggagacuuucccauucuguagcagaauuugguguugccuguggucuuggucccgcggagaagcuuaccauggaacucccaaucuuaaaaacaaacgcaauaacuacaauacucgcagcaguaacacuaugcuucgcaucaucacaaaacauaaccgaagaauuuuaccaaaguacaugcucagcaguaucaaaagguuaccucucagcccuaagaaccggaugguacacaucaguaaucacuauagaacuauccaauauaaaagaaaacaaaugcaacggcacugacgcaaaaguuaaauuaauuaaacaagaacucgauaaauauaaaaaugcaguaacagaacuacaacuacuaaugcaaagcaccccagcugcaggaagcggaucagcaaucgcaucaggaauagcaguauguaaaguacuacaccuagaaggagaagucaacaaaaucaaaaaugcacuacuaaguacaaacaaagcuguaguaagccuaucagguugcggaguaucaguauuaacauuuaaaguccucgaccuaaaaaauuacauagauaaacaacucuuaccaauacucaauaaacaaaguugcagcaucagcaacauagaaacagucaucgaauuucaacaaaaaaauaauagacuccuagaaauaacacgugaauuuucaguaaaugcuggaguaacaacaccaguaucuacauauaugcuaacaaauagcgaacuacucucacuuauuaacgauaugcccauaacaaacgaccaaaaaaaacuuaugucaaacaauguucaaauaguuagacaacaauccuacagcauaaugugcauaaucaaagaagaaguucuagcuuacguaguacaacuaccacucuaugguguuaucgacacccccuguuggaaacuucacacaucaccacuaugcacaacaaacacaaaagaaggaucaaauauuugcuuaacaagaacagauagaggaugguauugcgauaaugccggaucaguaucauuuuuuccacaagcagaaacauguaaaguacaauccaaccgaguauuuugcgacaccaugaacuccagaacacuaccaucugaagucaaccuauguaauauagauauauuuaacccaaaauaugacuguaaaaucaugacaucaaaaacugauguaaguucuaguguaauaaccagcuuaggcgccauaguaagcuguuacgguaaaacaaaaugcacagcaagcaacaaaugccgcgguauaauaaaaacauucucaaacggaugcgauuauguaaguaacaaaggaguagauacagucuccguaggcaacacauuauacuacguaaacaaacaagaaggaaaaucacuauauguaaaaggagaaccaaucauaaauuucuacgacccacuuguauuccccagcgacgaauuugaugcuuccauuucacaagucaacgaaaaaauaaaccaaucauuagccuucauaagaaaaucagacgaauuauuacauaauguuaaugucggcaaauccacaacuaauauaaugauaacaacaaucauaauaguaauaaucguuauacuacuauuacucauagcaguaggacucuucuuauauuguaaagccagauccaccccaguaacacucucaaaagaccaauuaucaggaauuaauaacaucgcauuuucaaacuaaggacuaguguccaccugucccuccugggcugcuggauugucucguuuuccugccaaauaaacaggaucagcgcuuuacagaucuaaaaaaaaaaaaaaaaaaaaaaaaaaaaaaaaaaaaaaaaaaaaaaaaaaaaaaaaaaaaaaaaugcaucccccccccccccccccccccccccccccccaaaggcucuuuucagagccaccagaauu

SEQ ID NO: 17084 - RNA, 1892 nt, Artificial Sequence
  mRNA product Design e-3 comprising derived and/or modified sequence from HRSV(Memphis-37)__AIY60640.1__F_DSCav1_mut5 (opt11)
gggagacuuucccauucuguagcagaauuugguguugccuguggucuuggucccgcggagaagcuuaccauggaacuccccauccuuaaaaccaacgcaaucaccacaauacucgccgccgucacccucugcuuugcguccucccagaacaucaccgaagaguucuaccaaucgaccugcagcgccgucagcaagggcuaccucucagcccuccgaacaggcugguacacauccgucaucaccaucgaacucucaaacauaaaagaaaacaaguguaacggcaccgacgcgaaaguuaaacucaucaaacaagaacucgauaaauacaaaaacgcaguaaccgaacuacaacuccuaaugcaauccacacccgcagccggcagcggcuccgcaaucgccuccggcauagcagucugcaaaguccuccaccucgaaggagaagucaauaaaaucaaaaacgcccuccuauccaccaacaaagcgguugucucccuguccggaugcggaguuagcguccuaaccuucaaggugcucgaccucaaaaacuacauagacaaacaacuacuccccauacucaacaaacaaucaugcuccaucagcaacaucgagaccgucaucgaguuccaacagaaaaacaaccgccuccucgaaaucacacgagaguucuccguaaacgccggcgucacaacccccguuuccacuuacaugcucacaaacagcgaacuccucucccucaucaacgacaugccaaucaccaacgaccaaaagaaacucauguccaacaacguccaaaucguccgccaacaaagcuacagcauaaugugcaucauaaaagaagaaguacucgcguacguaguccaacuaccccuauacggcgucaucgacacccccugcuggaaacugcacacuucuccccucuguacaaccaacacuaaagaaggcucgaacaucugccucaccagaacagaccgaggaugguacugcgacaacgccggcuccgucagcuucuucccccaggccgaaacaugcaaaguacaaucaaaccgagucuucugcgacacaaugaacagcagaacucuacccuccgaaguuaaccuaugcaacaucgacaucuucaaccccaaauacgacugcaaaauaaugaccucaaaaacagacguguccagcuccguuaucaccucucucggagccaucguauccuguuauggaaaaaccaaaugcaccgccucaaacaaaugccgaggcauaaucaaaacauucucaaauggaugcgacuacguauccaacaaaggagucgacaccgucagcgugggcaauacccucuacuacgucaacaaacaggaagggaaaucccucuauguaaagggcgagcccauuauuaacuucuaugacccccucguguucccaagcgacgaguucgacgccuccauaucacaagucaaugagaaaaucaaccaaucacuagcuuucauucgcaaauccgacgaacuccuucacaacgucaacgucggcaaauccaccaccaacaucaugaucaccaccauaauuaucgucauuaucgucauacuacuccuacucaucgccgucggccucuuccucuauugcaaagcacgcucgacacccgucacccuuucaaaagaccaacuuuccggcauaaacaacauagccuucagcaacuagggacuaguguccaccugucccuccugggcugcuggauugucucguuuuccugccaaauaaacaggaucagcgcuuuacagaucuaaaaaaaaaaaaaaaaaaaaaaaaaaaaaaaaaaaaaaaaaaaaaaaaaaaaaaaaaaaaaaaaugcaucccccccccccccccccccccccccccccccaaaggcucuuuucagagccaccagaauu

SEQ ID NO: 17085 - RNA, 1946 nt, Artificial Sequence
  mRNA product Design e-4 comprising derived and/or modified sequence from HRSV(Memphis-37)__AIY60640.1__F_DSCav1_mut5 (opt1)
gggagacuccugucgggcggaaguaggaggaguagaguuuaaaaacaguacucuuuuuccgguucgggacguaguugaagcaacgacaagccggauaaccgcucuugagacaggaagcuuaccauggagcugcccauccucaagaccaacgccaucaccacgauccuggccgcggugacccugugcuucgccagcucccagaacaucaccgaggaguucuaccagagcacgugcuccgccgucagcaagggcuaccucuccgcccugcgcaccgggugguacaccagcgugaucaccaucgagcuguccaacaucaaggagaacaagugcaacggcaccgacgccaaggugaagcucaucaagcaggagcuggacaaguacaagaacgcggucacggagcugcagcuccugaugcagagcaccccggccgccggcuccgggagcgcgaucgccuccggcaucgccgucugcaaggugcugcaccucgagggcgaggugaacaagaucaagaacgcccugcuguccaccaacaaggccgucgugagccucuccggcugcggggugagcguccugaccuucaaggugcuggaccucaagaacuacaucgacaagcagcugcugcccauccugaacaagcagagcugcuccaucagcaacaucgagaccgucaucgaguuccagcagaagaacaaccgccuccuggagaucacgcgggaguucagcgugaacgcgggcgugaccacccccgucuccaccuacaugcugacgaacagcgagcuccugucccugaucaacgacaugccgaucaccaacgaccagaagaagcucaugagcaacaacgugcagaucgugcgccagcaguccuacagcaucaugugcaucaucaaggaggagguccuggccuacguggugcagcugccccucuacggggucaucgacacccccugcuggaagcugcacaccagcccccugugcacgaccaacaccaaggagggcuccaacaucugccucacccggacggaccgcgggugguacugcgacaacgccggcagcguguccuucuucccgcaggccgagaccugcaagguccagagcaaccggguguucugcgacaccaugaacucccggacccugcccagcgaggugaaccucugcaacaucgacaucuucaaccccaaguacgacugcaagaucaugacguccaagaccgacgucagcuccagcgugaucaccucccugggcgccaucgugagcugcuacgggaagaccaagugcacggcgagcaacaagugccgcggcaucaucaagaccuucuccaacgggugcgacuacgucagcaacaagggcguggacaccguguccgucggcaacacccuguacuacgugaacaagcaggagggcaagagccucuacgugaagggggagcccaucaucaacuucuacgacccgcuggucuuccccuccgacgaguucgacgccagcaucucccaggugaacgagaagaucaaccagagccuggccuucauccggaaguccgacgagcuccugcacaacgugaacgucggcaagagcaccacgaacaucaugaucaccaccaucaucaucgugaucaucgugauccugcugcuccugaucgccgucgggcuguuccucuacugcaaggcccgcuccacccccgugacgcugagcaaggaccagcuguccgggaucaacaacaucgcguucagcaacugaggacuaguguccaccugucccuccugggcugcuggauugucucguuuuccugccaaauaaacaggaucagcgcuuuacagaucuaaaaaaaaaaaaaaaaaaaaaaaaaaaaaaaaaaaaaaaaaaaaaaaaaaaaaaaaaaaaaaaaugcaucccccccccccccccccccccccccccccccaaaggcucuuuucagagccaccagaauu

SEQ ID NO: 17086 - RNA, 1946 nt, Artificial Sequence
  mRNA product Design e-4 comprising derived and/or modified sequence from HRSV(Memphis-37)__AIY60640.1__F_DSCav1_mut5 (opt1)
gggagacuccugucgggcggaaguaggaggaguagaguuuaaaaacaguacucuuuuuccgguucgggacguaguugaagcaacgacaagccggauaaccgcucuugagacaggaagcuuaccauggagcugcccauccucaagaccaacgccaucaccacgauccuggccgcggugacccugugcuucgccagcucccagaacaucaccgaggaguucuaccagagcacgugcuccgccgucagcaagggcuaccucuccgcccugcgcaccgggugguacaccagcgugaucaccaucgagcuguccaacaucaaggagaacaagugcaacggcaccgacgccaaggugaagcucaucaagcaggagcuggacaaguacaagaacgcggucacggagcugcagcuccugaugcagagcaccccggccgccggguccggcagcgccaucgcguccgggaucgccgugugcaaggugcugcaccucgagggcgaggucaacaagaucaagaacgcccugcugagcaccaacaaggccguggugucccucagcggcugcggggucuccgugcugaccuucaaggugcuggaccucaagaacuacaucgacaagcagcugcugcccauccucaacaagcagagcugcuccaucagcaacaucgagacggucaucgaguuccagcagaagaacaaccggcugcuggagaucacccgcgaguucuccgugaacgccggcgugaccacccccgucagcacguacaugcucaccaacagcgagcugcugucccucaucaacgacaugcccaucaccaacgaccagaagaagcugaugagcaacaacgugcagaucgugcggcagcaguccuacagcaucaugugcaucaucaaggaggagguccuggcguacguggugcagcucccgcuguacggggucaucgacacccccugcuggaagcugcacacgagcccccucugcaccaccaacaccaaggagggcuccaacaucugccugacgcgcaccgaccgggggugguacugcgacaacgccggcuccgugagcuucuucccccaggccgagaccugcaaggugcaguccaaccgcgucuucugcgacaccaugaacagccggacgcucccguccgaggugaaccugugcaacaucgacaucuucaaccccaaguacgacugcaagaucaugaccagcaagaccgacgucuccagcuccgugaucaccagccugggcgccaucguguccugcuacgggaagacgaagugcaccgccagcaacaagugccggggcaucaucaagaccuucuccaacgggugcgacuacgucagcaacaagggcguggacaccgugagcgucggcaacacgcucuacuacgugaacaagcaggaggggaagucccuguacgugaagggcgagcccaucaucaacuucuacgacccccuggucuucccgagcgacgaguucgacgcguccaucagccaggugaacgagaagaucaaccagucccucgccuucauccgcaagagcgacgagcugcugcacaacgugaacgucgggaaguccaccaccaacaucaugaucaccaccaucaucaucgugaucaucgugauccuccugcugcucaucgccgucggccuguuccuguacugcaaggcccggagcacgcccgugacccuguccaaggaccagcucagcgggaucaacaacaucgccuucuccaacugaggacuaguguccaccugucccuccugggcugcuggauugucucguuuuccugccaaauaaacaggaucagcgcuuuacagaucuaaaaaaaaaaaaaaaaaaaaaaaaaaaaaaaaaaaaaaaaaaaaaaaaaaaaaaaaaaaaaaaaugcaucccccccccccccccccccccccccccccccaaaggcucuuuucagagccaccagaauu

SEQ ID NO: 17087 - RNA, 1946 nt, Artificial Sequence
  mRNA product Design e-4 comprising derived and/or modified sequence from HRSV(Memphis-37)__AIY60640.1__F_DSCav1_mut5 (opt2)
gggagacuccugucgggcggaaguaggaggaguagaguuuaaaaacaguacucuuuuuccgguucgggacguaguugaagcaacgacaagccggauaaccgcucuugagacaggaagcuuaccauggagcuccccauccucaagaccaacgccaucaccaccauccucgccgccgucacccucugcuucgccuccucccagaacaucaccgaggaguucuaccaguccaccugcuccgccgucuccaagggcuaccucuccgcccuccgcaccggcugguacaccuccgucaucaccaucgagcucuccaacaucaaggagaacaagugcaacggcaccgacgccaaggucaagcucaucaagcaggagcucgacaaguacaagaacgccgucaccgagcuccagcuccucaugcaguccacccccgccgccggcuccggcuccgccaucgccuccggcaucgccgucugcaagguccuccaccucgagggcgaggucaacaagaucaagaacgcccuccucuccaccaacaaggccgucgucucccucuccggcugcggcgucuccguccucaccuucaagguccucgaccucaagaacuacaucgacaagcagcuccuccccauccucaacaagcaguccugcuccaucuccaacaucgagaccgucaucgaguuccagcagaagaacaaccgccuccucgagaucacccgcgaguucuccgucaacgccggcgucaccacccccgucuccaccuacaugcucaccaacuccgagcuccucucccucaucaacgacaugcccaucaccaacgaccagaagaagcucauguccaacaacguccagaucguccgccagcaguccuacuccaucaugugcaucaucaaggaggagguccucgccuacgucguccagcucccccucuacggcgucaucgacacccccugcuggaagcuccacaccuccccccucugcaccaccaacaccaaggagggcuccaacaucugccucacccgcaccgaccgcggcugguacugcgacaacgccggcuccgucuccuucuucccccaggccgagaccugcaagguccaguccaaccgcgucuucugcgacaccaugaacucccgcacccuccccuccgaggucaaccucugcaacaucgacaucuucaaccccaaguacgacugcaagaucaugaccuccaagaccgacgucuccuccuccgucaucaccucccucggcgccaucgucuccugcuacggcaagaccaagugcaccgccuccaacaagugccgcggcaucaucaagaccuucuccaacggcugcgacuacgucuccaacaagggcgucgacaccgucuccgucggcaacacccucuacuacgucaacaagcaggagggcaagucccucuacgucaagggcgagcccaucaucaacuucuacgacccccucgucuuccccuccgacgaguucgacgccuccaucucccaggucaacgagaagaucaaccagucccucgccuucauccgcaaguccgacgagcuccuccacaacgucaacgucggcaaguccaccaccaacaucaugaucaccaccaucaucaucgucaucaucgucauccuccuccuccucaucgccgucggccucuuccucuacugcaaggcccgcuccacccccgucacccucuccaaggaccagcucuccggcaucaacaacaucgccuucuccaacugaggacuaguguccaccugucccuccugggcugcuggauugucucguuuuccugccaaauaaacaggaucagcgcuuuacagaucuaaaaaaaaaaaaaaaaaaaaaaaaaaaaaaaaaaaaaaaaaaaaaaaaaaaaaaaaaaaaaaaaugcaucccccccccccccccccccccccccccccccaaaggcucuuuucagagccaccagaauu

SEQ ID NO: 17088 - RNA, 1946 nt, Artificial Sequence
  mRNA product Design e-4 comprising derived and/or modified sequence from HRSV(Memphis-37)__AIY60640.1__F_DSCav1_mut5 (opt3)
gggagacuccugucgggcggaaguaggaggaguagaguuuaaaaacaguacucuuuuuccgguucgggacguaguugaagcaacgacaagccggauaaccgcucuugagacaggaagcuuaccauggagcugcccauccucaagaccaacgccauuacaacuauacuugcugcagugacgcugugcuucgccagcucccagaauaucaccgaagaguuuuaccaaucuacauguucagcggucaguaaaggcuauuugagcgcuuuaagaacugggugguacaccuccguuauuacaaucgaacugucuaacauuaaggagaauaaaugcaacggaaccgacgccaaggugaaacuaaucaagcaggaacucgauaaguauaaaaaugcaguaacugagcugcagcuucugaugcagucgaccccugccgcugguucaggcagcgcaauagccagugggaucgcuguguguaaggucuugcaccucgagggagaagugaacaaaauuaagaaugcccugcuguccacaaacaaagcgguugugucucucagcggcugcggugucuccguguuaacguucaagguacuggaccuuaagaauuacaucgauaaacaauugcugccaauucuaaacaagcagucauguaguaucagcaauauagagacuguuauugaauuucagcagaaaaacaauaggcuccuggagaucacccgggaguucucugugaacgcaggggucacaacuccgguguccaccuauaugcuuacaaauucagaacuguugagccucauuaacgacaugcccaucaccaacgaucaaaagaaacugaugaguaauaacgugcagaucguccgccagcagucuuacuccauuaugugcauaaucaaggaggaaguuuuagccuaugugguacaacugccucucuacggagugauugacacgccauguuggaaacuucauacuagcccccugugcacaaccaauacuaaggagggcucgaacaucuguuugacacgaaccgaucguggcugguacugcgacaaugcugggucugucuccuuuuucccucaggccgaaacguguaaggugcagucaaacagaguguuuugcgauaccaugaauaguagaacacugccaagcgaggugaaccucugcaauauagacauuuucaaccccaaauaugauuguaagaucaugacuuccaaaaccgacgucucuagcucagugaucacaagucugggagcaauuguauccugcuacgguaagacuaaauguaccgcuagcaauaagugcaggggcaucauuaagacauuuucuaacgggugugauuauguuucaaauaaaggaguggacaccgucagugugggcaacacucuuuacuaugucaauaagcaagaggguaaaagccuguacgugaagggggaaccuauaaucaacuucuaugacccauugguuuuuccguccgaugaguucgacgccucuauuucgcagguuaacgagaaaaucaaucagagccucgcguuuauccggaaguccgaugaacuguuacacaacguaaaugucggaaagucaacgacaaacauuaugauaaccacuaucauuaucgugauuaucguuauacugcuacuccugaucgccgugggccuuuucuuguacugcaaagcacgcaguacccccgucacacugucuaaggaccagcucagcggcauuaauaacaucgcuuucuccaauugaggacuaguguccaccugucccuccugggcugcuggauugucucguuuuccugccaaauaaacaggaucagcgcuuuacagaucuaaaaaaaaaaaaaaaaaaaaaaaaaaaaaaaaaaaaaaaaaaaaaaaaaaaaaaaaaaaaaaaaugcaucccccccccccccccccccccccccccccccaaaggcucuuuucagagccaccagaauu

SEQ ID NO: 17089 - RNA, 1946 nt, Artificial Sequence
  mRNA product Design e-4 comprising derived and/or modified sequence from HRSV(Memphis-37)__AIY60640.1__F_DSCav1_mut5 (opt4)
gggagacuccugucgggcggaaguaggaggaguagaguuuaaaaacaguacucuuuuuccgguucgggacguaguugaagcaacgacaagccggauaaccgcucuugagacaggaagcuuaccauggagcugcccauccugaagaccaacgccaucaccaccauccuggccgccgugacccugugcuucgccagcagccagaacaucaccgaggaguucuaccagagcaccugcagcgccgugagcaagggcuaccugagcgcccugagaaccggcugguacaccagcgugaucaccaucgagcugagcaacaucaaggagaacaagugcaacggcaccgacgccaaggugaagcugaucaagcaggagcuggacaaguacaagaacgccgugaccgagcugcagcugcugaugcagagcacccccgccgccggcagcggcagcgccaucgccagcggcaucgccgugugcaaggugcugcaccuggagggcgaggugaacaagaucaagaacgcccugcugagcaccaacaaggccguggugagccugagcggcugcggcgugagcgugcugaccuucaaggugcuggaccugaagaacuacaucgacaagcagcugcugcccauccugaacaagcagagcugcagcaucagcaacaucgagaccgugaucgaguuccagcagaagaacaacagacugcuggagaucaccagagaguucagcgugaacgccggcgugaccacccccgugagcaccuacaugcugaccaacagcgagcugcugagccugaucaacgacaugcccaucaccaacgaccagaagaagcugaugagcaacaacgugcagaucgugagacagcagagcuacagcaucaugugcaucaucaaggaggaggugcuggccuacguggugcagcugccccuguacggcgugaucgacacccccugcuggaagcugcacaccagcccccugugcaccaccaacaccaaggagggcagcaacaucugccugaccagaaccgacagaggcugguacugcgacaacgccggcagcgugagcuucuucccccaggccgagaccugcaaggugcagagcaacagaguguucugcgacaccaugaacagcagaacccugcccagcgaggugaaccugugcaacaucgacaucuucaaccccaaguacgacugcaagaucaugaccagcaagaccgacgugagcagcagcgugaucaccagccugggcgccaucgugagcugcuacggcaagaccaagugcaccgccagcaacaagugcagaggcaucaucaagaccuucagcaacggcugcgacuacgugagcaacaagggcguggacaccgugagcgugggcaacacccuguacuacgugaacaagcaggagggcaagagccuguacgugaagggcgagcccaucaucaacuucuacgacccccugguguuccccagcgacgaguucgacgccagcaucagccaggugaacgagaagaucaaccagagccuggccuucaucagaaagagcgacgagcugcugcacaacgugaacgugggcaagagcaccaccaacaucaugaucaccaccaucaucaucgugaucaucgugauccugcugcugcugaucgccgugggccuguuccuguacugcaaggccagaagcacccccgugacccugagcaaggaccagcugagcggcaucaacaacaucgccuucagcaacugaggacuaguguccaccugucccuccugggcugcuggauugucucguuuuccugccaaauaaacaggaucagcgcuuuacagaucuaaaaaaaaaaaaaaaaaaaaaaaaaaaaaaaaaaaaaaaaaaaaaaaaaaaaaaaaaaaaaaaaugcaucccccccccccccccccccccccccccccccaaaggcucuuuucagagccaccagaauu

SEQ ID NO: 17090 - RNA, 1946 nt, Artificial Sequence
  mRNA product Design e-4 comprising derived and/or modified sequence from HRSV(Memphis-37)__AIY60640.1__F_DSCav1_mut5 (opt5)
gggagacuccugucgggcggaaguaggaggaguagaguuuaaaaacaguacucuuuuuccgguucgggacguaguugaagcaacgacaagccggauaaccgcucuugagacaggaagcuuaccauggagcugcccauccucaagaccaacgccauuacaacgauccuggcugccgugacccuuugcuucgcgagcucccagaauauuacagaagaguuuuaccaaucuaccuguagcgcugucuccaaaggcuaucugucugcccucagaacagggugguacaccagcguuaucacaauugaacuguccaacaucaaggagaauaaaugcaacggaaccgacgccaaggugaaacuuaucaagcaggaacuggauaaguauaaaaaugcugugacggagcuccagcugcugaugcagucuaccccugccgcuggcagcggguccgccauugcgagcggaaucgccgucuguaaggugcuccaccuggagggcgaaguuaacaaaauuaagaaugcccuucugucuacaaacaaagcuguggucucccucagcgggugcggagugucuguucugaccuucaaggugcuugaccugaagaauuacaucgauaaacaacuccugccgauucugaacaagcaguccuguagcaucucuaauauugagacagucaucgaauuucagcagaaaaacaaucggcuccuggagaucacccgcgaguucuccgugaacgcuggcgugacgacacccgucagcaccuauaugcuuacaaauuccgaacugcucucucugauuaacgacaugccuaucaccaacgaucaaaagaaacuuaugagcaauaacguucagauugugagacagcaguccuacagcaucaugugcauuaucaaggaggaagugcuggccuaugucgugcaacucccccuguacggcguuaucgacaccccuuguuggaaacugcauacaucuccccucugcacgaccaauacaaaggagggguccaacauuugucugacccggacagaucgcggaugguacugcgacaaugcgggcagcgugagcuuuuucccucaggccgaaaccuguaagguccagucuaacagaguguuuugcgauacgaugaacuccagaacacugccgucugagguuaaucucugcaauaucgacauuuucaaccccaaauaugauuguaagaucaugaccagcaaaaccgacguguccagcucugucauuacaucccugggggcuaucgugagcugcuacggaaagaccaaauguacagccucuaauaagugccggggcaucauuaagacguuuuccaacgggugugauuaugucagcaauaaaggaguggacaccguuuccgugggcaacacacuuuacuaugucaauaagcaagagggcaaaucucuguacgugaagggggaaccuaucauuaacuucuaugacccccucguuuuuccuagcgaugaguucgacgcuuccaucucucaggugaacgagaaaauuaaucagagccuggccuuuauccgcaaguccgaugaacugcuccacaacgucaaugugggaaagagcaccacaaacauuaugaucaccacgaucauuaucgugauuaucguuauucugcuucugcucaucgccgucggccuguuccuguacugcaaagcuagaucuacccccgugacacuuuccaaggaccagcucagcgggaucaauaacauugcguucucuaauugaggacuaguguccaccugucccuccugggcugcuggauugucucguuuuccugccaaauaaacaggaucagcgcuuuacagaucuaaaaaaaaaaaaaaaaaaaaaaaaaaaaaaaaaaaaaaaaaaaaaaaaaaaaaaaaaaaaaaaaugcaucccccccccccccccccccccccccccccccaaaggcucuuuucagagccaccagaauu

SEQ ID NO: 17091 - RNA, 1946 nt, Artificial Sequence
  mRNA product Design e-4 comprising derived and/or modified sequence from HRSV(Memphis-37)__AIY60640.1__F_DSCav1_mut5 (opt6)
gggagacuccugucgggcggaaguaggaggaguagaguuuaaaaacaguacucuuuuuccgguucgggacguaguugaagcaacgacaagccggauaaccgcucuugagacaggaagcuuaccauggaacucccaaucuuaaaaacaaacgcaauaacuacaauacucgcagcaguaacacuaugcuucgcaucaucacaaaacauaaccgaagaauuuuaccaaaguacaugcucagcaguaucaaaagguuaccucucagcccuaagaaccggaugguacacaucaguaaucacuauagaacuauccaauauaaaagaaaacaaaugcaacggcacugacgcaaaaguuaaauuaauuaaacaagaacucgauaaauauaaaaaugcaguaacagaacuacaacuacuaaugcaaagcaccccagcugcaggaagcggaucagcaaucgcaucaggaauagcaguauguaaaguacuacaccuagaaggagaagucaacaaaaucaaaaaugcacuacuaaguacaaacaaagcuguaguaagccuaucagguugcggaguaucaguauuaacauuuaaaguccucgaccuaaaaaauuacauagauaaacaacucuuaccaauacucaauaaacaaaguugcagcaucagcaacauagaaacagucaucgaauuucaacaaaaaaauaauagacuccuagaaauaacacgugaauuuucaguaaaugcuggaguaacaacaccaguaucuacauauaugcuaacaaauagcgaacuacucucacuuauuaacgauaugcccauaacaaacgaccaaaaaaaacuuaugucaaacaauguucaaauaguuagacaacaauccuacagcauaaugugcauaaucaaagaagaaguucuagcuuacguaguacaacuaccacucuaugguguuaucgacacccccuguuggaaacuucacacaucaccacuaugcacaacaaacacaaaagaaggaucaaauauuugcuuaacaagaacagauagaggaugguauugcgauaaugccggaucaguaucauuuuuuccacaagcagaaacauguaaaguacaauccaaccgaguauuuugcgacaccaugaacuccagaacacuaccaucugaagucaaccuauguaauauagauauauuuaacccaaaauaugacuguaaaaucaugacaucaaaaacugauguaaguucuaguguaauaaccagcuuaggcgccauaguaagcuguuacgguaaaacaaaaugcacagcaagcaacaaaugccgcgguauaauaaaaacauucucaaacggaugcgauuauguaaguaacaaaggaguagauacagucuccguaggcaacacauuauacuacguaaacaaacaagaaggaaaaucacuauauguaaaaggagaaccaaucauaaauuucuacgacccacuuguauuccccagcgacgaauuugaugcuuccauuucacaagucaacgaaaaaauaaaccaaucauuagccuucauaagaaaaucagacgaauuauuacauaauguuaaugucggcaaauccacaacuaauauaaugauaacaacaaucauaauaguaauaaucguuauacuacuauuacucauagcaguaggacucuucuuauauuguaaagccagauccaccccaguaacacucucaaaagaccaauuaucaggaauuaauaacaucgcauuuucaaacuaaggacuaguguccaccugucccuccugggcugcuggauugucucguuuuccugccaaauaaacaggaucagcgcuuuacagaucuaaaaaaaaaaaaaaaaaaaaaaaaaaaaaaaaaaaaaaaaaaaaaaaaaaaaaaaaaaaaaaaaugcaucccccccccccccccccccccccccccccccaaaggcucuuuucagagccaccagaauu

SEQ ID NO: 17092 - RNA, 1946 nt, Artificial Sequence
  mRNA product Design e-4 comprising derived and/or modified sequence from HRSV(Memphis-37)__AIY60640.1__F_DSCav1_mut5 (opt11)
gggagacuccugucgggcggaaguaggaggaguagaguuuaaaaacaguacucuuuuuccgguucgggacguaguugaagcaacgacaagccggauaaccgcucuugagacaggaagcuuaccauggaacuccccauccuuaaaaccaacgcaaucaccacaauacucgccgccgucacccucugcuuugcguccucccagaacaucaccgaagaguucuaccaaucgaccugcagcgccgucagcaagggcuaccucucagcccuccgaacaggcugguacacauccgucaucaccaucgaacucucaaacauaaaagaaaacaaguguaacggcaccgacgcgaaaguuaaacucaucaaacaagaacucgauaaauacaaaaacgcaguaaccgaacuacaacuccuaaugcaauccacacccgcagccggcagcggcuccgcaaucgccuccggcauagcagucugcaaaguccuccaccucgaaggagaagucaauaaaaucaaaaacgcccuccuauccaccaacaaagcgguugucucccuguccggaugcggaguuagcguccuaaccuucaaggugcucgaccucaaaaacuacauagacaaacaacuacuccccauacucaacaaacaaucaugcuccaucagcaacaucgagaccgucaucgaguuccaacagaaaaacaaccgccuccucgaaaucacacgagaguucuccguaaacgccggcgucacaacccccguuuccacuuacaugcucacaaacagcgaacuccucucccucaucaacgacaugccaaucaccaacgaccaaaagaaacucauguccaacaacguccaaaucguccgccaacaaagcuacagcauaaugugcaucauaaaagaagaaguacucgcguacguaguccaacuaccccuauacggcgucaucgacacccccugcuggaaacugcacacuucuccccucuguacaaccaacacuaaagaaggcucgaacaucugccucaccagaacagaccgaggaugguacugcgacaacgccggcuccgucagcuucuucccccaggccgaaacaugcaaaguacaaucaaaccgagucuucugcgacacaaugaacagcagaacucuacccuccgaaguuaaccuaugcaacaucgacaucuucaaccccaaauacgacugcaaaauaaugaccucaaaaacagacguguccagcuccguuaucaccucucucggagccaucguauccuguuauggaaaaaccaaaugcaccgccucaaacaaaugccgaggcauaaucaaaacauucucaaauggaugcgacuacguauccaacaaaggagucgacaccgucagcgugggcaauacccucuacuacgucaacaaacaggaagggaaaucccucuauguaaagggcgagcccauuauuaacuucuaugacccccucguguucccaagcgacgaguucgacgccuccauaucacaagucaaugagaaaaucaaccaaucacuagcuuucauucgcaaauccgacgaacuccuucacaacgucaacgucggcaaauccaccaccaacaucaugaucaccaccauaauuaucgucauuaucgucauacuacuccuacucaucgccgucggccucuuccucuauugcaaagcacgcucgacacccgucacccuuucaaaagaccaacuuuccggcauaaacaacauagccuucagcaacuagggacuaguguccaccugucccuccugggcugcuggauugucucguuuuccugccaaauaaacaggaucagcgcuuuacagaucuaaaaaaaaaaaaaaaaaaaaaaaaaaaaaaaaaaaaaaaaaaaaaaaaaaaaaaaaaaaaaaaaugcaucccccccccccccccccccccccccccccccaaaggcucuuuucagagccaccagaauu

SEQ ID NO: 17093 - RNA, 1913 nt, Artificial Sequence
  mRNA product Design e-5 comprising derived and/or modified sequence from HRSV(Memphis-37)__AIY60640.1__F_DSCav1_mut5 (opt1)
gggagagcggcucggccauuuugucccagucaguccggaggcugcggcugcagaaguaccgccugcggaguaacugcaaagaagcuuaccauggagcugcccauccucaagaccaacgccaucaccacgauccuggccgcggugacccugugcuucgccagcucccagaacaucaccgaggaguucuaccagagcacgugcuccgccgucagcaagggcuaccucuccgcccugcgcaccgggugguacaccagcgugaucaccaucgagcuguccaacaucaaggagaacaagugcaacggcaccgacgccaaggugaagcucaucaagcaggagcuggacaaguacaagaacgcggucacggagcugcagcuccugaugcagagcaccccggccgccggcuccgggagcgcgaucgccuccggcaucgccgucugcaaggugcugcaccucgagggcgaggugaacaagaucaagaacgcccugcuguccaccaacaaggccgucgugagccucuccggcugcggggugagcguccugaccuucaaggugcuggaccucaagaacuacaucgacaagcagcugcugcccauccugaacaagcagagcugcuccaucagcaacaucgagaccgucaucgaguuccagcagaagaacaaccgccuccuggagaucacgcgggaguucagcgugaacgcgggcgugaccacccccgucuccaccuacaugcugacgaacagcgagcuccugucccugaucaacgacaugccgaucaccaacgaccagaagaagcucaugagcaacaacgugcagaucgugcgccagcaguccuacagcaucaugugcaucaucaaggaggagguccuggccuacguggugcagcugccccucuacggggucaucgacacccccugcuggaagcugcacaccagcccccugugcacgaccaacaccaaggagggcuccaacaucugccucacccggacggaccgcgggugguacugcgacaacgccggcagcguguccuucuucccgcaggccgagaccugcaagguccagagcaaccggguguucugcgacaccaugaacucccggacccugcccagcgaggugaaccucugcaacaucgacaucuucaaccccaaguacgacugcaagaucaugacguccaagaccgacgucagcuccagcgugaucaccucccugggcgccaucgugagcugcuacgggaagaccaagugcacggcgagcaacaagugccgcggcaucaucaagaccuucuccaacgggugcgacuacgucagcaacaagggcguggacaccguguccgucggcaacacccuguacuacgugaacaagcaggagggcaagagccucuacgugaagggggagcccaucaucaacuucuacgacccgcuggucuuccccuccgacgaguucgacgccagcaucucccaggugaacgagaagaucaaccagagccuggccuucauccggaaguccgacgagcuccugcacaacgugaacgucggcaagagcaccacgaacaucaugaucaccaccaucaucaucgugaucaucgugauccugcugcuccugaucgccgucgggcuguuccucuacugcaaggcccgcuccacccccgugacgcugagcaaggaccagcuguccgggaucaacaacaucgcguucagcaacugaggacuaguguccaccugucccuccugggcugcuggauugucucguuuuccugccaaauaaacaggaucagcgcuuuacagaucuaaaaaaaaaaaaaaaaaaaaaaaaaaaaaaaaaaaaaaaaaaaaaaaaaaaaaaaaaaaaaaaaugcaucccccccccccccccccccccccccccccccaaaggcucuuuucagagccaccagaauu

SEQ ID NO: 17094 - RNA, 1913 nt, Artificial Sequence
  mRNA product Design e-5 comprising derived and/or modified sequence from HRSV(Memphis-37)__AIY60640.1__F_DSCav1_mut5 (opt1)
gggagagcggcucggccauuuugucccagucaguccggaggcugcggcugcagaaguaccgccugcggaguaacugcaaagaagcuuaccauggagcugcccauccucaagaccaacgccaucaccacgauccuggccgcggugacccugugcuucgccagcucccagaacaucaccgaggaguucuaccagagcacgugcuccgccgucagcaagggcuaccucuccgcccugcgcaccgggugguacaccagcgugaucaccaucgagcuguccaacaucaaggagaacaagugcaacggcaccgacgccaaggugaagcucaucaagcaggagcuggacaaguacaagaacgcggucacggagcugcagcuccugaugcagagcaccccggccgccggguccggcagcgccaucgcguccgggaucgccgugugcaaggugcugcaccucgagggcgaggucaacaagaucaagaacgcccugcugagcaccaacaaggccguggugucccucagcggcugcggggucuccgugcugaccuucaaggugcuggaccucaagaacuacaucgacaagcagcugcugcccauccucaacaagcagagcugcuccaucagcaacaucgagacggucaucgaguuccagcagaagaacaaccggcugcuggagaucacccgcgaguucuccgugaacgccggcgugaccacccccgucagcacguacaugcucaccaacagcgagcugcugucccucaucaacgacaugcccaucaccaacgaccagaagaagcugaugagcaacaacgugcagaucgugcggcagcaguccuacagcaucaugugcaucaucaaggaggagguccuggcguacguggugcagcucccgcuguacggggucaucgacacccccugcuggaagcugcacacgagcccccucugcaccaccaacaccaaggagggcuccaacaucugccugacgcgcaccgaccgggggugguacugcgacaacgccggcuccgugagcuucuucccccaggccgagaccugcaaggugcaguccaaccgcgucuucugcgacaccaugaacagccggacgcucccguccgaggugaaccugugcaacaucgacaucuucaaccccaaguacgacugcaagaucaugaccagcaagaccgacgucuccagcuccgugaucaccagccugggcgccaucguguccugcuacgggaagacgaagugcaccgccagcaacaagugccggggcaucaucaagaccuucuccaacgggugcgacuacgucagcaacaagggcguggacaccgugagcgucggcaacacgcucuacuacgugaacaagcaggaggggaagucccuguacgugaagggcgagcccaucaucaacuucuacgacccccuggucuucccgagcgacgaguucgacgcguccaucagccaggugaacgagaagaucaaccagucccucgccuucauccgcaagagcgacgagcugcugcacaacgugaacgucgggaaguccaccaccaacaucaugaucaccaccaucaucaucgugaucaucgugauccuccugcugcucaucgccgucggccuguuccuguacugcaaggcccggagcacgcccgugacccuguccaaggaccagcucagcgggaucaacaacaucgccuucuccaacugaggacuaguguccaccugucccuccugggcugcuggauugucucguuuuccugccaaauaaacaggaucagcgcuuuacagaucuaaaaaaaaaaaaaaaaaaaaaaaaaaaaaaaaaaaaaaaaaaaaaaaaaaaaaaaaaaaaaaaaugcaucccccccccccccccccccccccccccccccaaaggcucuuuucagagccaccagaauu

SEQ ID NO: 17095 - RNA, 1913 nt, Artificial Sequence
  mRNA product Design e-5 comprising derived and/or modified sequence from HRSV(Memphis-37)__AIY60640.1__F_DSCav1_mut5 (opt2)
gggagagcggcucggccauuuugucccagucaguccggaggcugcggcugcagaaguaccgccugcggaguaacugcaaagaagcuuaccauggagcuccccauccucaagaccaacgccaucaccaccauccucgccgccgucacccucugcuucgccuccucccagaacaucaccgaggaguucuaccaguccaccugcuccgccgucuccaagggcuaccucuccgcccuccgcaccggcugguacaccuccgucaucaccaucgagcucuccaacaucaaggagaacaagugcaacggcaccgacgccaaggucaagcucaucaagcaggagcucgacaaguacaagaacgccgucaccgagcuccagcuccucaugcaguccacccccgccgccggcuccggcuccgccaucgccuccggcaucgccgucugcaagguccuccaccucgagggcgaggucaacaagaucaagaacgcccuccucuccaccaacaaggccgucgucucccucuccggcugcggcgucuccguccucaccuucaagguccucgaccucaagaacuacaucgacaagcagcuccuccccauccucaacaagcaguccugcuccaucuccaacaucgagaccgucaucgaguuccagcagaagaacaaccgccuccucgagaucacccgcgaguucuccgucaacgccggcgucaccacccccgucuccaccuacaugcucaccaacuccgagcuccucucccucaucaacgacaugcccaucaccaacgaccagaagaagcucauguccaacaacguccagaucguccgccagcaguccuacuccaucaugugcaucaucaaggaggagguccucgccuacgucguccagcucccccucuacggcgucaucgacacccccugcuggaagcuccacaccuccccccucugcaccaccaacaccaaggagggcuccaacaucugccucacccgcaccgaccgcggcugguacugcgacaacgccggcuccgucuccuucuucccccaggccgagaccugcaagguccaguccaaccgcgucuucugcgacaccaugaacucccgcacccuccccuccgaggucaaccucugcaacaucgacaucuucaaccccaaguacgacugcaagaucaugaccuccaagaccgacgucuccuccuccgucaucaccucccucggcgccaucgucuccugcuacggcaagaccaagugcaccgccuccaacaagugccgcggcaucaucaagaccuucuccaacggcugcgacuacgucuccaacaagggcgucgacaccgucuccgucggcaacacccucuacuacgucaacaagcaggagggcaagucccucuacgucaagggcgagcccaucaucaacuucuacgacccccucgucuuccccuccgacgaguucgacgccuccaucucccaggucaacgagaagaucaaccagucccucgccuucauccgcaaguccgacgagcuccuccacaacgucaacgucggcaaguccaccaccaacaucaugaucaccaccaucaucaucgucaucaucgucauccuccuccuccucaucgccgucggccucuuccucuacugcaaggcccgcuccacccccgucacccucuccaaggaccagcucuccggcaucaacaacaucgccuucuccaacugaggacuaguguccaccugucccuccugggcugcuggauugucucguuuuccugccaaauaaacaggaucagcgcuuuacagaucuaaaaaaaaaaaaaaaaaaaaaaaaaaaaaaaaaaaaaaaaaaaaaaaaaaaaaaaaaaaaaaaaugcaucccccccccccccccccccccccccccccccaaaggcucuuuucagagccaccagaauu

SEQ ID NO: 17096 - RNA, 1913 nt, Artificial Sequence
  mRNA product Design e-5 comprising derived and/or modified sequence from HRSV(Memphis-37)__AIY60640.1__F_DSCav1_mut5 (opt3)
gggagagcggcucggccauuuugucccagucaguccggaggcugcggcugcagaaguaccgccugcggaguaacugcaaagaagcuuaccauggagcugcccauccucaagaccaacgccauuacaacuauacuugcugcagugacgcugugcuucgccagcucccagaauaucaccgaagaguuuuaccaaucuacauguucagcggucaguaaaggcuauuugagcgcuuuaagaacugggugguacaccuccguuauuacaaucgaacugucuaacauuaaggagaauaaaugcaacggaaccgacgccaaggugaaacuaaucaagcaggaacucgauaaguauaaaaaugcaguaacugagcugcagcuucugaugcagucgaccccugccgcugguucaggcagcgcaauagccagugggaucgcuguguguaaggucuugcaccucgagggagaagugaacaaaauuaagaaugcccugcuguccacaaacaaagcgguugugucucucagcggcugcggugucuccguguuaacguucaagguacuggaccuuaagaauuacaucgauaaacaauugcugccaauucuaaacaagcagucauguaguaucagcaauauagagacuguuauugaauuucagcagaaaaacaauaggcuccuggagaucacccgggaguucucugugaacgcaggggucacaacuccgguguccaccuauaugcuuacaaauucagaacuguugagccucauuaacgacaugcccaucaccaacgaucaaaagaaacugaugaguaauaacgugcagaucguccgccagcagucuuacuccauuaugugcauaaucaaggaggaaguuuuagccuaugugguacaacugccucucuacggagugauugacacgccauguuggaaacuucauacuagcccccugugcacaaccaauacuaaggagggcucgaacaucuguuugacacgaaccgaucguggcugguacugcgacaaugcugggucugucuccuuuuucccucaggccgaaacguguaaggugcagucaaacagaguguuuugcgauaccaugaauaguagaacacugccaagcgaggugaaccucugcaauauagacauuuucaaccccaaauaugauuguaagaucaugacuuccaaaaccgacgucucuagcucagugaucacaagucugggagcaauuguauccugcuacgguaagacuaaauguaccgcuagcaauaagugcaggggcaucauuaagacauuuucuaacgggugugauuauguuucaaauaaaggaguggacaccgucagugugggcaacacucuuuacuaugucaauaagcaagaggguaaaagccuguacgugaagggggaaccuauaaucaacuucuaugacccauugguuuuuccguccgaugaguucgacgccucuauuucgcagguuaacgagaaaaucaaucagagccucgcguuuauccggaaguccgaugaacuguuacacaacguaaaugucggaaagucaacgacaaacauuaugauaaccacuaucauuaucgugauuaucguuauacugcuacuccugaucgccgugggccuuuucuuguacugcaaagcacgcaguacccccgucacacugucuaaggaccagcucagcggcauuaauaacaucgcuuucuccaauugaggacuaguguccaccugucccuccugggcugcuggauugucucguuuuccugccaaauaaacaggaucagcgcuuuacagaucuaaaaaaaaaaaaaaaaaaaaaaaaaaaaaaaaaaaaaaaaaaaaaaaaaaaaaaaaaaaaaaaaugcaucccccccccccccccccccccccccccccccaaaggcucuuuucagagccaccagaauu

SEQ ID NO: 17097 - RNA, 1913 nt, Artificial Sequence
  mRNA product Design e-5 comprising derived and/or modified sequence from HRSV(Memphis-37)__AIY60640.1__F_DSCav1_mut5 (opt4)
gggagagcggcucggccauuuugucccagucaguccggaggcugcggcugcagaaguaccgccugcggaguaacugcaaagaagcuuaccauggagcugcccauccugaagaccaacgccaucaccaccauccuggccgccgugacccugugcuucgccagcagccagaacaucaccgaggaguucuaccagagcaccugcagcgccgugagcaagggcuaccugagcgcccugagaaccggcugguacaccagcgugaucaccaucgagcugagcaacaucaaggagaacaagugcaacggcaccgacgccaaggugaagcugaucaagcaggagcuggacaaguacaagaacgccgugaccgagcugcagcugcugaugcagagcacccccgccgccggcagcggcagcgccaucgccagcggcaucgccgugugcaaggugcugcaccuggagggcgaggugaacaagaucaagaacgcccugcugagcaccaacaaggccguggugagccugagcggcugcggcgugagcgugcugaccuucaaggugcuggaccugaagaacuacaucgacaagcagcugcugcccauccugaacaagcagagcugcagcaucagcaacaucgagaccgugaucgaguuccagcagaagaacaacagacugcuggagaucaccagagaguucagcgugaacgccggcgugaccacccccgugagcaccuacaugcugaccaacagcgagcugcugagccugaucaacgacaugcccaucaccaacgaccagaagaagcugaugagcaacaacgugcagaucgugagacagcagagcuacagcaucaugugcaucaucaaggaggaggugcuggccuacguggugcagcugccccuguacggcgugaucgacacccccugcuggaagcugcacaccagcccccugugcaccaccaacaccaaggagggcagcaacaucugccugaccagaaccgacagaggcugguacugcgacaacgccggcagcgugagcuucuucccccaggccgagaccugcaaggugcagagcaacagaguguucugcgacaccaugaacagcagaacccugcccagcgaggugaaccugugcaacaucgacaucuucaaccccaaguacgacugcaagaucaugaccagcaagaccgacgugagcagcagcgugaucaccagccugggcgccaucgugagcugcuacggcaagaccaagugcaccgccagcaacaagugcagaggcaucaucaagaccuucagcaacggcugcgacuacgugagcaacaagggcguggacaccgugagcgugggcaacacccuguacuacgugaacaagcaggagggcaagagccuguacgugaagggcgagcccaucaucaacuucuacgacccccugguguuccccagcgacgaguucgacgccagcaucagccaggugaacgagaagaucaaccagagccuggccuucaucagaaagagcgacgagcugcugcacaacgugaacgugggcaagagcaccaccaacaucaugaucaccaccaucaucaucgugaucaucgugauccugcugcugcugaucgccgugggccuguuccuguacugcaaggccagaagcacccccgugacccugagcaaggaccagcugagcggcaucaacaacaucgccuucagcaacugaggacuaguguccaccugucccuccugggcugcuggauugucucguuuuccugccaaauaaacaggaucagcgcuuuacagaucuaaaaaaaaaaaaaaaaaaaaaaaaaaaaaaaaaaaaaaaaaaaaaaaaaaaaaaaaaaaaaaaaugcaucccccccccccccccccccccccccccccccaaaggcucuuuucagagccaccagaauu

SEQ ID NO: 17098 - RNA, 1913 nt, Artificial Sequence
  mRNA product Design e-5 comprising derived and/or modified sequence from HRSV(Memphis-37)__AIY60640.1__F_DSCav1_mut5 (opt5)
gggagagcggcucggccauuuugucccagucaguccggaggcugcggcugcagaaguaccgccugcggaguaacugcaaagaagcuuaccauggagcugcccauccucaagaccaacgccauuacaacgauccuggcugccgugacccuuugcuucgcgagcucccagaauauuacagaagaguuuuaccaaucuaccuguagcgcugucuccaaaggcuaucugucugcccucagaacagggugguacaccagcguuaucacaauugaacuguccaacaucaaggagaauaaaugcaacggaaccgacgccaaggugaaacuuaucaagcaggaacuggauaaguauaaaaaugcugugacggagcuccagcugcugaugcagucuaccccugccgcuggcagcggguccgccauugcgagcggaaucgccgucuguaaggugcuccaccuggagggcgaaguuaacaaaauuaagaaugcccuucugucuacaaacaaagcuguggucucccucagcgggugcggagugucuguucugaccuucaaggugcuugaccugaagaauuacaucgauaaacaacuccugccgauucugaacaagcaguccuguagcaucucuaauauugagacagucaucgaauuucagcagaaaaacaaucggcuccuggagaucacccgcgaguucuccgugaacgcuggcgugacgacacccgucagcaccuauaugcuuacaaauuccgaacugcucucucugauuaacgacaugccuaucaccaacgaucaaaagaaacuuaugagcaauaacguucagauugugagacagcaguccuacagcaucaugugcauuaucaaggaggaagugcuggccuaugucgugcaacucccccuguacggcguuaucgacaccccuuguuggaaacugcauacaucuccccucugcacgaccaauacaaaggagggguccaacauuugucugacccggacagaucgcggaugguacugcgacaaugcgggcagcgugagcuuuuucccucaggccgaaaccuguaagguccagucuaacagaguguuuugcgauacgaugaacuccagaacacugccgucugagguuaaucucugcaauaucgacauuuucaaccccaaauaugauuguaagaucaugaccagcaaaaccgacguguccagcucugucauuacaucccugggggcuaucgugagcugcuacggaaagaccaaauguacagccucuaauaagugccggggcaucauuaagacguuuuccaacgggugugauuaugucagcaauaaaggaguggacaccguuuccgugggcaacacacuuuacuaugucaauaagcaagagggcaaaucucuguacgugaagggggaaccuaucauuaacuucuaugacccccucguuuuuccuagcgaugaguucgacgcuuccaucucucaggugaacgagaaaauuaaucagagccuggccuuuauccgcaaguccgaugaacugcuccacaacgucaaugugggaaagagcaccacaaacauuaugaucaccacgaucauuaucgugauuaucguuauucugcuucugcucaucgccgucggccuguuccuguacugcaaagcuagaucuacccccgugacacuuuccaaggaccagcucagcgggaucaauaacauugcguucucuaauugaggacuaguguccaccugucccuccugggcugcuggauugucucguuuuccugccaaauaaacaggaucagcgcuuuacagaucuaaaaaaaaaaaaaaaaaaaaaaaaaaaaaaaaaaaaaaaaaaaaaaaaaaaaaaaaaaaaaaaaugcaucccccccccccccccccccccccccccccccaaaggcucuuuucagagccaccagaauu

SEQ ID NO: 17099 - RNA, 1913 nt, Artificial Sequence
  mRNA product Design e-5 comprising derived and/or modified sequence from HRSV(Memphis-37)__AIY60640.1__F_DSCav1_mut5 (opt6)
gggagagcggcucggccauuuugucccagucaguccggaggcugcggcugcagaaguaccgccugcggaguaacugcaaagaagcuuaccauggaacucccaaucuuaaaaacaaacgcaauaacuacaauacucgcagcaguaacacuaugcuucgcaucaucacaaaacauaaccgaagaauuuuaccaaaguacaugcucagcaguaucaaaagguuaccucucagcccuaagaaccggaugguacacaucaguaaucacuauagaacuauccaauauaaaagaaaacaaaugcaacggcacugacgcaaaaguuaaauuaauuaaacaagaacucgauaaauauaaaaaugcaguaacagaacuacaacuacuaaugcaaagcaccccagcugcaggaagcggaucagcaaucgcaucaggaauagcaguauguaaaguacuacaccuagaaggagaagucaacaaaaucaaaaaugcacuacuaaguacaaacaaagcuguaguaagccuaucagguugcggaguaucaguauuaacauuuaaaguccucgaccuaaaaaauuacauagauaaacaacucuuaccaauacucaauaaacaaaguugcagcaucagcaacauagaaacagucaucgaauuucaacaaaaaaauaauagacuccuagaaauaacacgugaauuuucaguaaaugcuggaguaacaacaccaguaucuacauauaugcuaacaaauagcgaacuacucucacuuauuaacgauaugcccauaacaaacgaccaaaaaaaacuuaugucaaacaauguucaaauaguuagacaacaauccuacagcauaaugugcauaaucaaagaagaaguucuagcuuacguaguacaacuaccacucuaugguguuaucgacacccccuguuggaaacuucacacaucaccacuaugcacaacaaacacaaaagaaggaucaaauauuugcuuaacaagaacagauagaggaugguauugcgauaaugccggaucaguaucauuuuuuccacaagcagaaacauguaaaguacaauccaaccgaguauuuugcgacaccaugaacuccagaacacuaccaucugaagucaaccuauguaauauagauauauuuaacccaaaauaugacuguaaaaucaugacaucaaaaacugauguaaguucuaguguaauaaccagcuuaggcgccauaguaagcuguuacgguaaaacaaaaugcacagcaagcaacaaaugccgcgguauaauaaaaacauucucaaacggaugcgauuauguaaguaacaaaggaguagauacagucuccguaggcaacacauuauacuacguaaacaaacaagaaggaaaaucacuauauguaaaaggagaaccaaucauaaauuucuacgacccacuuguauuccccagcgacgaauuugaugcuuccauuucacaagucaacgaaaaaauaaaccaaucauuagccuucauaagaaaaucagacgaauuauuacauaauguuaaugucggcaaauccacaacuaauauaaugauaacaacaaucauaauaguaauaaucguuauacuacuauuacucauagcaguaggacucuucuuauauuguaaagccagauccaccccaguaacacucucaaaagaccaauuaucaggaauuaauaacaucgcauuuucaaacuaaggacuaguguccaccugucccuccugggcugcuggauugucucguuuuccugccaaauaaacaggaucagcgcuuuacagaucuaaaaaaaaaaaaaaaaaaaaaaaaaaaaaaaaaaaaaaaaaaaaaaaaaaaaaaaaaaaaaaaaugcaucccccccccccccccccccccccccccccccaaaggcucuuuucagagccaccagaauu

SEQ ID NO: 17100 - RNA, 1913 nt, Artificial Sequence
  mRNA product Design e-5 comprising derived and/or modified sequence from HRSV(Memphis-37)__AIY60640.1__F_DSCav1_mut5 (opt11)
gggagagcggcucggccauuuugucccagucaguccggaggcugcggcugcagaaguaccgccugcggaguaacugcaaagaagcuuaccauggaacuccccauccuuaaaaccaacgcaaucaccacaauacucgccgccgucacccucugcuuugcguccucccagaacaucaccgaagaguucuaccaaucgaccugcagcgccgucagcaagggcuaccucucagcccuccgaacaggcugguacacauccgucaucaccaucgaacucucaaacauaaaagaaaacaaguguaacggcaccgacgcgaaaguuaaacucaucaaacaagaacucgauaaauacaaaaacgcaguaaccgaacuacaacuccuaaugcaauccacacccgcagccggcagcggcuccgcaaucgccuccggcauagcagucugcaaaguccuccaccucgaaggagaagucaauaaaaucaaaaacgcccuccuauccaccaacaaagcgguugucucccuguccggaugcggaguuagcguccuaaccuucaaggugcucgaccucaaaaacuacauagacaaacaacuacuccccauacucaacaaacaaucaugcuccaucagcaacaucgagaccgucaucgaguuccaacagaaaaacaaccgccuccucgaaaucacacgagaguucuccguaaacgccggcgucacaacccccguuuccacuuacaugcucacaaacagcgaacuccucucccucaucaacgacaugccaaucaccaacgaccaaaagaaacucauguccaacaacguccaaaucguccgccaacaaagcuacagcauaaugugcaucauaaaagaagaaguacucgcguacguaguccaacuaccccuauacggcgucaucgacacccccugcuggaaacugcacacuucuccccucuguacaaccaacacuaaagaaggcucgaacaucugccucaccagaacagaccgaggaugguacugcgacaacgccggcuccgucagcuucuucccccaggccgaaacaugcaaaguacaaucaaaccgagucuucugcgacacaaugaacagcagaacucuacccuccgaaguuaaccuaugcaacaucgacaucuucaaccccaaauacgacugcaaaauaaugaccucaaaaacagacguguccagcuccguuaucaccucucucggagccaucguauccuguuauggaaaaaccaaaugcaccgccucaaacaaaugccgaggcauaaucaaaacauucucaaauggaugcgacuacguauccaacaaaggagucgacaccgucagcgugggcaauacccucuacuacgucaacaaacaggaagggaaaucccucuauguaaagggcgagcccauuauuaacuucuaugacccccucguguucccaagcgacgaguucgacgccuccauaucacaagucaaugagaaaaucaaccaaucacuagcuuucauucgcaaauccgacgaacuccuucacaacgucaacgucggcaaauccaccaccaacaucaugaucaccaccauaauuaucgucauuaucgucauacuacuccuacucaucgccgucggccucuuccucuauugcaaagcacgcucgacacccgucacccuuucaaaagaccaacuuuccggcauaaacaacauagccuucagcaacuagggacuaguguccaccugucccuccugggcugcuggauugucucguuuuccugccaaauaaacaggaucagcgcuuuacagaucuaaaaaaaaaaaaaaaaaaaaaaaaaaaaaaaaaaaaaaaaaaaaaaaaaaaaaaaaaaaaaaaaugcaucccccccccccccccccccccccccccccccaaaggcucuuuucagagccaccagaauu

SEQ ID NO: 17101 - RNA, 1980 nt, Artificial Sequence
  mRNA product Design e-6 comprising derived and/or modified sequence from HRSV(Memphis-37)__AIY60640.1__F_DSCav1_mut5 (opt1)
gggagagcggcucggccauuuugucccagucaguccggaggcugcggcugcagaaguaccgccugcggaguaacugcaaagaagcuuaccauggagcugcccauccucaagaccaacgccaucaccacgauccuggccgcggugacccugugcuucgccagcucccagaacaucaccgaggaguucuaccagagcacgugcuccgccgucagcaagggcuaccucuccgcccugcgcaccgggugguacaccagcgugaucaccaucgagcuguccaacaucaaggagaacaagugcaacggcaccgacgccaaggugaagcucaucaagcaggagcuggacaaguacaagaacgcggucacggagcugcagcuccugaugcagagcaccccggccgccggcuccgggagcgcgaucgccuccggcaucgccgucugcaaggugcugcaccucgagggcgaggugaacaagaucaagaacgcccugcuguccaccaacaaggccgucgugagccucuccggcugcggggugagcguccugaccuucaaggugcuggaccucaagaacuacaucgacaagcagcugcugcccauccugaacaagcagagcugcuccaucagcaacaucgagaccgucaucgaguuccagcagaagaacaaccgccuccuggagaucacgcgggaguucagcgugaacgcgggcgugaccacccccgucuccaccuacaugcugacgaacagcgagcuccugucccugaucaacgacaugccgaucaccaacgaccagaagaagcucaugagcaacaacgugcagaucgugcgccagcaguccuacagcaucaugugcaucaucaaggaggagguccuggccuacguggugcagcugccccucuacggggucaucgacacccccugcuggaagcugcacaccagcccccugugcacgaccaacaccaaggagggcuccaacaucugccucacccggacggaccgcgggugguacugcgacaacgccggcagcguguccuucuucccgcaggccgagaccugcaagguccagagcaaccggguguucugcgacaccaugaacucccggacccugcccagcgaggugaaccucugcaacaucgacaucuucaaccccaaguacgacugcaagaucaugacguccaagaccgacgucagcuccagcgugaucaccucccugggcgccaucgugagcugcuacgggaagaccaagugcacggcgagcaacaagugccgcggcaucaucaagaccuucuccaacgggugcgacuacgucagcaacaagggcguggacaccguguccgucggcaacacccuguacuacgugaacaagcaggagggcaagagccucuacgugaagggggagcccaucaucaacuucuacgacccgcuggucuuccccuccgacgaguucgacgccagcaucucccaggugaacgagaagaucaaccagagccuggccuucauccggaaguccgacgagcuccugcacaacgugaacgucggcaagagcaccacgaacaucaugaucaccaccaucaucaucgugaucaucgugauccugcugcuccugaucgccgucgggcuguuccucuacugcaaggcccgcuccacccccgugacgcugagcaaggaccagcuguccgggaucaacaacaucgcguucagcaacugaggacuaguacuggcugcaucucccuuuccucuguccuccauccuucucccaggauggugaagggggaccugguacccagugauccccaccccaggauccuaaaucaugacuuaccugcuaauaaaaacucauuggaaaagugagaagaucuaaaaaaaaaaaaaaaaaaaaaaaaaaaaaaaaaaaaaaaaaaaaaaaaaaaaaaaaaaaaaaaaugcaucccccccccccccccccccccccccccccccaaaggcucuuuucagagccaccagaauu

SEQ ID NO: 17102 - RNA, 1980 nt, Artificial Sequence
  mRNA product Design e-6 comprising derived and/or modified sequence from HRSV(Memphis-37)__AIY60640.1__F_DSCav1_mut5 (opt1)
gggagagcggcucggccauuuugucccagucaguccggaggcugcggcugcagaaguaccgccugcggaguaacugcaaagaagcuuaccauggagcugcccauccucaagaccaacgccaucaccacgauccuggccgcggugacccugugcuucgccagcucccagaacaucaccgaggaguucuaccagagcacgugcuccgccgucagcaagggcuaccucuccgcccugcgcaccgggugguacaccagcgugaucaccaucgagcuguccaacaucaaggagaacaagugcaacggcaccgacgccaaggugaagcucaucaagcaggagcuggacaaguacaagaacgcggucacggagcugcagcuccugaugcagagcaccccggccgccggguccggcagcgccaucgcguccgggaucgccgugugcaaggugcugcaccucgagggcgaggucaacaagaucaagaacgcccugcugagcaccaacaaggccguggugucccucagcggcugcggggucuccgugcugaccuucaaggugcuggaccucaagaacuacaucgacaagcagcugcugcccauccucaacaagcagagcugcuccaucagcaacaucgagacggucaucgaguuccagcagaagaacaaccggcugcuggagaucacccgcgaguucuccgugaacgccggcgugaccacccccgucagcacguacaugcucaccaacagcgagcugcugucccucaucaacgacaugcccaucaccaacgaccagaagaagcugaugagcaacaacgugcagaucgugcggcagcaguccuacagcaucaugugcaucaucaaggaggagguccuggcguacguggugcagcucccgcuguacggggucaucgacacccccugcuggaagcugcacacgagcccccucugcaccaccaacaccaaggagggcuccaacaucugccugacgcgcaccgaccgggggugguacugcgacaacgccggcuccgugagcuucuucccccaggccgagaccugcaaggugcaguccaaccgcgucuucugcgacaccaugaacagccggacgcucccguccgaggugaaccugugcaacaucgacaucuucaaccccaaguacgacugcaagaucaugaccagcaagaccgacgucuccagcuccgugaucaccagccugggcgccaucguguccugcuacgggaagacgaagugcaccgccagcaacaagugccggggcaucaucaagaccuucuccaacgggugcgacuacgucagcaacaagggcguggacaccgugagcgucggcaacacgcucuacuacgugaacaagcaggaggggaagucccuguacgugaagggcgagcccaucaucaacuucuacgacccccuggucuucccgagcgacgaguucgacgcguccaucagccaggugaacgagaagaucaaccagucccucgccuucauccgcaagagcgacgagcugcugcacaacgugaacgucgggaaguccaccaccaacaucaugaucaccaccaucaucaucgugaucaucgugauccuccugcugcucaucgccgucggccuguuccuguacugcaaggcccggagcacgcccgugacccuguccaaggaccagcucagcgggaucaacaacaucgccuucuccaacugaggacuaguacuggcugcaucucccuuuccucuguccuccauccuucucccaggauggugaagggggaccugguacccagugauccccaccccaggauccuaaaucaugacuuaccugcuaauaaaaacucauuggaaaagugagaagaucuaaaaaaaaaaaaaaaaaaaaaaaaaaaaaaaaaaaaaaaaaaaaaaaaaaaaaaaaaaaaaaaaugcaucccccccccccccccccccccccccccccccaaaggcucuuuucagagccaccagaauu

SEQ ID NO: 17103 - RNA, 1980 nt, Artificial Sequence
  mRNA product Design e-6 comprising derived and/or modified sequence from HRSV(Memphis-37)__AIY60640.1__F_DSCav1_mut5 (opt2)
gggagagcggcucggccauuuugucccagucaguccggaggcugcggcugcagaaguaccgccugcggaguaacugcaaagaagcuuaccauggagcuccccauccucaagaccaacgccaucaccaccauccucgccgccgucacccucugcuucgccuccucccagaacaucaccgaggaguucuaccaguccaccugcuccgccgucuccaagggcuaccucuccgcccuccgcaccggcugguacaccuccgucaucaccaucgagcucuccaacaucaaggagaacaagugcaacggcaccgacgccaaggucaagcucaucaagcaggagcucgacaaguacaagaacgccgucaccgagcuccagcuccucaugcaguccacccccgccgccggcuccggcuccgccaucgccuccggcaucgccgucugcaagguccuccaccucgagggcgaggucaacaagaucaagaacgcccuccucuccaccaacaaggccgucgucucccucuccggcugcggcgucuccguccucaccuucaagguccucgaccucaagaacuacaucgacaagcagcuccuccccauccucaacaagcaguccugcuccaucuccaacaucgagaccgucaucgaguuccagcagaagaacaaccgccuccucgagaucacccgcgaguucuccgucaacgccggcgucaccacccccgucuccaccuacaugcucaccaacuccgagcuccucucccucaucaacgacaugcccaucaccaacgaccagaagaagcucauguccaacaacguccagaucguccgccagcaguccuacuccaucaugugcaucaucaaggaggagguccucgccuacgucguccagcucccccucuacggcgucaucgacacccccugcuggaagcuccacaccuccccccucugcaccaccaacaccaaggagggcuccaacaucugccucacccgcaccgaccgcggcugguacugcgacaacgccggcuccgucuccuucuucccccaggccgagaccugcaagguccaguccaaccgcgucuucugcgacaccaugaacucccgcacccuccccuccgaggucaaccucugcaacaucgacaucuucaaccccaaguacgacugcaagaucaugaccuccaagaccgacgucuccuccuccgucaucaccucccucggcgccaucgucuccugcuacggcaagaccaagugcaccgccuccaacaagugccgcggcaucaucaagaccuucuccaacggcugcgacuacgucuccaacaagggcgucgacaccgucuccgucggcaacacccucuacuacgucaacaagcaggagggcaagucccucuacgucaagggcgagcccaucaucaacuucuacgacccccucgucuuccccuccgacgaguucgacgccuccaucucccaggucaacgagaagaucaaccagucccucgccuucauccgcaaguccgacgagcuccuccacaacgucaacgucggcaaguccaccaccaacaucaugaucaccaccaucaucaucgucaucaucgucauccuccuccuccucaucgccgucggccucuuccucuacugcaaggcccgcuccacccccgucacccucuccaaggaccagcucuccggcaucaacaacaucgccuucuccaacugaggacuaguacuggcugcaucucccuuuccucuguccuccauccuucucccaggauggugaagggggaccugguacccagugauccccaccccaggauccuaaaucaugacuuaccugcuaauaaaaacucauuggaaaagugagaagaucuaaaaaaaaaaaaaaaaaaaaaaaaaaaaaaaaaaaaaaaaaaaaaaaaaaaaaaaaaaaaaaaaugcaucccccccccccccccccccccccccccccccaaaggcucuuuucagagccaccagaauu

SEQ ID NO: 17104 - RNA, 1980 nt, Artificial Sequence
  mRNA product Design e-6 comprising derived and/or modified sequence from HRSV(Memphis-37)__AIY60640.1__F_DSCav1_mut5 (opt3)
gggagagcggcucggccauuuugucccagucaguccggaggcugcggcugcagaaguaccgccugcggaguaacugcaaagaagcuuaccauggagcugcccauccucaagaccaacgccauuacaacuauacuugcugcagugacgcugugcuucgccagcucccagaauaucaccgaagaguuuuaccaaucuacauguucagcggucaguaaaggcuauuugagcgcuuuaagaacugggugguacaccuccguuauuacaaucgaacugucuaacauuaaggagaauaaaugcaacggaaccgacgccaaggugaaacuaaucaagcaggaacucgauaaguauaaaaaugcaguaacugagcugcagcuucugaugcagucgaccccugccgcugguucaggcagcgcaauagccagugggaucgcuguguguaaggucuugcaccucgagggagaagugaacaaaauuaagaaugcccugcuguccacaaacaaagcgguugugucucucagcggcugcggugucuccguguuaacguucaagguacuggaccuuaagaauuacaucgauaaacaauugcugccaauucuaaacaagcagucauguaguaucagcaauauagagacuguuauugaauuucagcagaaaaacaauaggcuccuggagaucacccgggaguucucugugaacgcaggggucacaacuccgguguccaccuauaugcuuacaaauucagaacuguugagccucauuaacgacaugcccaucaccaacgaucaaaagaaacugaugaguaauaacgugcagaucguccgccagcagucuuacuccauuaugugcauaaucaaggaggaaguuuuagccuaugugguacaacugccucucuacggagugauugacacgccauguuggaaacuucauacuagcccccugugcacaaccaauacuaaggagggcucgaacaucuguuugacacgaaccgaucguggcugguacugcgacaaugcugggucugucuccuuuuucccucaggccgaaacguguaaggugcagucaaacagaguguuuugcgauaccaugaauaguagaacacugccaagcgaggugaaccucugcaauauagacauuuucaaccccaaauaugauuguaagaucaugacuuccaaaaccgacgucucuagcucagugaucacaagucugggagcaauuguauccugcuacgguaagacuaaauguaccgcuagcaauaagugcaggggcaucauuaagacauuuucuaacgggugugauuauguuucaaauaaaggaguggacaccgucagugugggcaacacucuuuacuaugucaauaagcaagaggguaaaagccuguacgugaagggggaaccuauaaucaacuucuaugacccauugguuuuuccguccgaugaguucgacgccucuauuucgcagguuaacgagaaaaucaaucagagccucgcguuuauccggaaguccgaugaacuguuacacaacguaaaugucggaaagucaacgacaaacauuaugauaaccacuaucauuaucgugauuaucguuauacugcuacuccugaucgccgugggccuuuucuuguacugcaaagcacgcaguacccccgucacacugucuaaggaccagcucagcggcauuaauaacaucgcuuucuccaauugaggacuaguacuggcugcaucucccuuuccucuguccuccauccuucucccaggauggugaagggggaccugguacccagugauccccaccccaggauccuaaaucaugacuuaccugcuaauaaaaacucauuggaaaagugagaagaucuaaaaaaaaaaaaaaaaaaaaaaaaaaaaaaaaaaaaaaaaaaaaaaaaaaaaaaaaaaaaaaaaugcaucccccccccccccccccccccccccccccccaaaggcucuuuucagagccaccagaauu

SEQ ID NO: 17105 - RNA, 1980 nt, Artificial Sequence
  mRNA product Design e-6 comprising derived and/or modified sequence from HRSV(Memphis-37)__AIY60640.1__F_DSCav1_mut5 (opt4)
gggagagcggcucggccauuuugucccagucaguccggaggcugcggcugcagaaguaccgccugcggaguaacugcaaagaagcuuaccauggagcugcccauccugaagaccaacgccaucaccaccauccuggccgccgugacccugugcuucgccagcagccagaacaucaccgaggaguucuaccagagcaccugcagcgccgugagcaagggcuaccugagcgcccugagaaccggcugguacaccagcgugaucaccaucgagcugagcaacaucaaggagaacaagugcaacggcaccgacgccaaggugaagcugaucaagcaggagcuggacaaguacaagaacgccgugaccgagcugcagcugcugaugcagagcacccccgccgccggcagcggcagcgccaucgccagcggcaucgccgugugcaaggugcugcaccuggagggcgaggugaacaagaucaagaacgcccugcugagcaccaacaaggccguggugagccugagcggcugcggcgugagcgugcugaccuucaaggugcuggaccugaagaacuacaucgacaagcagcugcugcccauccugaacaagcagagcugcagcaucagcaacaucgagaccgugaucgaguuccagcagaagaacaacagacugcuggagaucaccagagaguucagcgugaacgccggcgugaccacccccgugagcaccuacaugcugaccaacagcgagcugcugagccugaucaacgacaugcccaucaccaacgaccagaagaagcugaugagcaacaacgugcagaucgugagacagcagagcuacagcaucaugugcaucaucaaggaggaggugcuggccuacguggugcagcugccccuguacggcgugaucgacacccccugcuggaagcugcacaccagcccccugugcaccaccaacaccaaggagggcagcaacaucugccugaccagaaccgacagaggcugguacugcgacaacgccggcagcgugagcuucuucccccaggccgagaccugcaaggugcagagcaacagaguguucugcgacaccaugaacagcagaacccugcccagcgaggugaaccugugcaacaucgacaucuucaaccccaaguacgacugcaagaucaugaccagcaagaccgacgugagcagcagcgugaucaccagccugggcgccaucgugagcugcuacggcaagaccaagugcaccgccagcaacaagugcagaggcaucaucaagaccuucagcaacggcugcgacuacgugagcaacaagggcguggacaccgugagcgugggcaacacccuguacuacgugaacaagcaggagggcaagagccuguacgugaagggcgagcccaucaucaacuucuacgacccccugguguuccccagcgacgaguucgacgccagcaucagccaggugaacgagaagaucaaccagagccuggccuucaucagaaagagcgacgagcugcugcacaacgugaacgugggcaagagcaccaccaacaucaugaucaccaccaucaucaucgugaucaucgugauccugcugcugcugaucgccgugggccuguuccuguacugcaaggccagaagcacccccgugacccugagcaaggaccagcugagcggcaucaacaacaucgccuucagcaacugaggacuaguacuggcugcaucucccuuuccucuguccuccauccuucucccaggauggugaagggggaccugguacccagugauccccaccccaggauccuaaaucaugacuuaccugcuaauaaaaacucauuggaaaagugagaagaucuaaaaaaaaaaaaaaaaaaaaaaaaaaaaaaaaaaaaaaaaaaaaaaaaaaaaaaaaaaaaaaaaugcaucccccccccccccccccccccccccccccccaaaggcucuuuucagagccaccagaauu

SEQ ID NO: 17106 - RNA, 1980 nt, Artificial Sequence
  mRNA product Design e-6 comprising derived and/or modified sequence from HRSV(Memphis-37)__AIY60640.1__F_DSCav1_mut5 (opt5)
gggagagcggcucggccauuuugucccagucaguccggaggcugcggcugcagaaguaccgccugcggaguaacugcaaagaagcuuaccauggagcugcccauccucaagaccaacgccauuacaacgauccuggcugccgugacccuuugcuucgcgagcucccagaauauuacagaagaguuuuaccaaucuaccuguagcgcugucuccaaaggcuaucugucugcccucagaacagggugguacaccagcguuaucacaauugaacuguccaacaucaaggagaauaaaugcaacggaaccgacgccaaggugaaacuuaucaagcaggaacuggauaaguauaaaaaugcugugacggagcuccagcugcugaugcagucuaccccugccgcuggcagcggguccgccauugcgagcggaaucgccgucuguaaggugcuccaccuggagggcgaaguuaacaaaauuaagaaugcccuucugucuacaaacaaagcuguggucucccucagcgggugcggagugucuguucugaccuucaaggugcuugaccugaagaauuacaucgauaaacaacuccugccgauucugaacaagcaguccuguagcaucucuaauauugagacagucaucgaauuucagcagaaaaacaaucggcuccuggagaucacccgcgaguucuccgugaacgcuggcgugacgacacccgucagcaccuauaugcuuacaaauuccgaacugcucucucugauuaacgacaugccuaucaccaacgaucaaaagaaacuuaugagcaauaacguucagauugugagacagcaguccuacagcaucaugugcauuaucaaggaggaagugcuggccuaugucgugcaacucccccuguacggcguuaucgacaccccuuguuggaaacugcauacaucuccccucugcacgaccaauacaaaggagggguccaacauuugucugacccggacagaucgcggaugguacugcgacaaugcgggcagcgugagcuuuuucccucaggccgaaaccuguaagguccagucuaacagaguguuuugcgauacgaugaacuccagaacacugccgucugagguuaaucucugcaauaucgacauuuucaaccccaaauaugauuguaagaucaugaccagcaaaaccgacguguccagcucugucauuacaucccugggggcuaucgugagcugcuacggaaagaccaaauguacagccucuaauaagugccggggcaucauuaagacguuuuccaacgggugugauuaugucagcaauaaaggaguggacaccguuuccgugggcaacacacuuuacuaugucaauaagcaagagggcaaaucucuguacgugaagggggaaccuaucauuaacuucuaugacccccucguuuuuccuagcgaugaguucgacgcuuccaucucucaggugaacgagaaaauuaaucagagccuggccuuuauccgcaaguccgaugaacugcuccacaacgucaaugugggaaagagcaccacaaacauuaugaucaccacgaucauuaucgugauuaucguuauucugcuucugcucaucgccgucggccuguuccuguacugcaaagcuagaucuacccccgugacacuuuccaaggaccagcucagcgggaucaauaacauugcguucucuaauugaggacuaguacuggcugcaucucccuuuccucuguccuccauccuucucccaggauggugaagggggaccugguacccagugauccccaccccaggauccuaaaucaugacuuaccugcuaauaaaaacucauuggaaaagugagaagaucuaaaaaaaaaaaaaaaaaaaaaaaaaaaaaaaaaaaaaaaaaaaaaaaaaaaaaaaaaaaaaaaaugcaucccccccccccccccccccccccccccccccaaaggcucuuuucagagccaccagaauu

SEQ ID NO: 17107 - RNA, 1980 nt, Artificial Sequence
  mRNA product Design e-6 comprising derived and/or modified sequence from HRSV(Memphis-37)__AIY60640.1__F_DSCav1_mut5 (opt6)
gggagagcggcucggccauuuugucccagucaguccggaggcugcggcugcagaaguaccgccugcggaguaacugcaaagaagcuuaccauggaacucccaaucuuaaaaacaaacgcaauaacuacaauacucgcagcaguaacacuaugcuucgcaucaucacaaaacauaaccgaagaauuuuaccaaaguacaugcucagcaguaucaaaagguuaccucucagcccuaagaaccggaugguacacaucaguaaucacuauagaacuauccaauauaaaagaaaacaaaugcaacggcacugacgcaaaaguuaaauuaauuaaacaagaacucgauaaauauaaaaaugcaguaacagaacuacaacuacuaaugcaaagcaccccagcugcaggaagcggaucagcaaucgcaucaggaauagcaguauguaaaguacuacaccuagaaggagaagucaacaaaaucaaaaaugcacuacuaaguacaaacaaagcuguaguaagccuaucagguugcggaguaucaguauuaacauuuaaaguccucgaccuaaaaaauuacauagauaaacaacucuuaccaauacucaauaaacaaaguugcagcaucagcaacauagaaacagucaucgaauuucaacaaaaaaauaauagacuccuagaaauaacacgugaauuuucaguaaaugcuggaguaacaacaccaguaucuacauauaugcuaacaaauagcgaacuacucucacuuauuaacgauaugcccauaacaaacgaccaaaaaaaacuuaugucaaacaauguucaaauaguuagacaacaauccuacagcauaaugugcauaaucaaagaagaaguucuagcuuacguaguacaacuaccacucuaugguguuaucgacacccccuguuggaaacuucacacaucaccacuaugcacaacaaacacaaaagaaggaucaaauauuugcuuaacaagaacagauagaggaugguauugcgauaaugccggaucaguaucauuuuuuccacaagcagaaacauguaaaguacaauccaaccgaguauuuugcgacaccaugaacuccagaacacuaccaucugaagucaaccuauguaauauagauauauuuaacccaaaauaugacuguaaaaucaugacaucaaaaacugauguaaguucuaguguaauaaccagcuuaggcgccauaguaagcuguuacgguaaaacaaaaugcacagcaagcaacaaaugccgcgguauaauaaaaacauucucaaacggaugcgauuauguaaguaacaaaggaguagauacagucuccguaggcaacacauuauacuacguaaacaaacaagaaggaaaaucacuauauguaaaaggagaaccaaucauaaauuucuacgacccacuuguauuccccagcgacgaauuugaugcuuccauuucacaagucaacgaaaaaauaaaccaaucauuagccuucauaagaaaaucagacgaauuauuacauaauguuaaugucggcaaauccacaacuaauauaaugauaacaacaaucauaauaguaauaaucguuauacuacuauuacucauagcaguaggacucuucuuauauuguaaagccagauccaccccaguaacacucucaaaagaccaauuaucaggaauuaauaacaucgcauuuucaaacuaaggacuaguacuggcugcaucucccuuuccucuguccuccauccuucucccaggauggugaagggggaccugguacccagugauccccaccccaggauccuaaaucaugacuuaccugcuaauaaaaacucauuggaaaagugagaagaucuaaaaaaaaaaaaaaaaaaaaaaaaaaaaaaaaaaaaaaaaaaaaaaaaaaaaaaaaaaaaaaaaugcaucccccccccccccccccccccccccccccccaaaggcucuuuucagagccaccagaauu

SEQ ID NO: 17108 - RNA, 1980 nt, Artificial Sequence
  mRNA product Design e-6 comprising derived and/or modified sequence from HRSV(Memphis-37)__AIY60640.1__F_DSCav1_mut5 (opt11)
gggagagcggcucggccauuuugucccagucaguccggaggcugcggcugcagaaguaccgccugcggaguaacugcaaagaagcuuaccauggaacuccccauccuuaaaaccaacgcaaucaccacaauacucgccgccgucacccucugcuuugcguccucccagaacaucaccgaagaguucuaccaaucgaccugcagcgccgucagcaagggcuaccucucagcccuccgaacaggcugguacacauccgucaucaccaucgaacucucaaacauaaaagaaaacaaguguaacggcaccgacgcgaaaguuaaacucaucaaacaagaacucgauaaauacaaaaacgcaguaaccgaacuacaacuccuaaugcaauccacacccgcagccggcagcggcuccgcaaucgccuccggcauagcagucugcaaaguccuccaccucgaaggagaagucaauaaaaucaaaaacgcccuccuauccaccaacaaagcgguugucucccuguccggaugcggaguuagcguccuaaccuucaaggugcucgaccucaaaaacuacauagacaaacaacuacuccccauacucaacaaacaaucaugcuccaucagcaacaucgagaccgucaucgaguuccaacagaaaaacaaccgccuccucgaaaucacacgagaguucuccguaaacgccggcgucacaacccccguuuccacuuacaugcucacaaacagcgaacuccucucccucaucaacgacaugccaaucaccaacgaccaaaagaaacucauguccaacaacguccaaaucguccgccaacaaagcuacagcauaaugugcaucauaaaagaagaaguacucgcguacguaguccaacuaccccuauacggcgucaucgacacccccugcuggaaacugcacacuucuccccucuguacaaccaacacuaaagaaggcucgaacaucugccucaccagaacagaccgaggaugguacugcgacaacgccggcuccgucagcuucuucccccaggccgaaacaugcaaaguacaaucaaaccgagucuucugcgacacaaugaacagcagaacucuacccuccgaaguuaaccuaugcaacaucgacaucuucaaccccaaauacgacugcaaaauaaugaccucaaaaacagacguguccagcuccguuaucaccucucucggagccaucguauccuguuauggaaaaaccaaaugcaccgccucaaacaaaugccgaggcauaaucaaaacauucucaaauggaugcgacuacguauccaacaaaggagucgacaccgucagcgugggcaauacccucuacuacgucaacaaacaggaagggaaaucccucuauguaaagggcgagcccauuauuaacuucuaugacccccucguguucccaagcgacgaguucgacgccuccauaucacaagucaaugagaaaaucaaccaaucacuagcuuucauucgcaaauccgacgaacuccuucacaacgucaacgucggcaaauccaccaccaacaucaugaucaccaccauaauuaucgucauuaucgucauacuacuccuacucaucgccgucggccucuuccucuauugcaaagcacgcucgacacccgucacccuuucaaaagaccaacuuuccggcauaaacaacauagccuucagcaacuagggacuaguacuggcugcaucucccuuuccucuguccuccauccuucucccaggauggugaagggggaccugguacccagugauccccaccccaggauccuaaaucaugacuuaccugcuaauaaaaacucauuggaaaagugagaagaucuaaaaaaaaaaaaaaaaaaaaaaaaaaaaaaaaaaaaaaaaaaaaaaaaaaaaaaaaaaaaaaaaugcaucccccccccccccccccccccccccccccccaaaggcucuuuucagagccaccagaauu

SEQ ID NO: 17109 - RNA, 2196 nt, Artificial Sequence
  mRNA product Design f-1 comprising derived and/or modified sequence from HRSV(Memphis-37)__AIY60640.1__F_DSCav1_mut5 (opt1)
gggagagcggcucggccauuuugucccagucaguccggaggcugcggcugcagaaguaccgccugcggaguaacugcaaagaagcuuaccauggagcugcccauccucaagaccaacgccaucaccacgauccuggccgcggugacccugugcuucgccagcucccagaacaucaccgaggaguucuaccagagcacgugcuccgccgucagcaagggcuaccucuccgcccugcgcaccgggugguacaccagcgugaucaccaucgagcuguccaacaucaaggagaacaagugcaacggcaccgacgccaaggugaagcucaucaagcaggagcuggacaaguacaagaacgcggucacggagcugcagcuccugaugcagagcaccccggccgccggcuccgggagcgcgaucgccuccggcaucgccgucugcaaggugcugcaccucgagggcgaggugaacaagaucaagaacgcccugcuguccaccaacaaggccgucgugagccucuccggcugcggggugagcguccugaccuucaaggugcuggaccucaagaacuacaucgacaagcagcugcugcccauccugaacaagcagagcugcuccaucagcaacaucgagaccgucaucgaguuccagcagaagaacaaccgccuccuggagaucacgcgggaguucagcgugaacgcgggcgugaccacccccgucuccaccuacaugcugacgaacagcgagcuccugucccugaucaacgacaugccgaucaccaacgaccagaagaagcucaugagcaacaacgugcagaucgugcgccagcaguccuacagcaucaugugcaucaucaaggaggagguccuggccuacguggugcagcugccccucuacggggucaucgacacccccugcuggaagcugcacaccagcccccugugcacgaccaacaccaaggagggcuccaacaucugccucacccggacggaccgcgggugguacugcgacaacgccggcagcguguccuucuucccgcaggccgagaccugcaagguccagagcaaccggguguucugcgacaccaugaacucccggacccugcccagcgaggugaaccucugcaacaucgacaucuucaaccccaaguacgacugcaagaucaugacguccaagaccgacgucagcuccagcgugaucaccucccugggcgccaucgugagcugcuacgggaagaccaagugcacggcgagcaacaagugccgcggcaucaucaagaccuucuccaacgggugcgacuacgucagcaacaagggcguggacaccguguccgucggcaacacccuguacuacgugaacaagcaggagggcaagagccucuacgugaagggggagcccaucaucaacuucuacgacccgcuggucuuccccuccgacgaguucgacgccagcaucucccaggugaacgagaagaucaaccagagccuggccuucauccggaaguccgacgagcuccugcacaacgugaacgucggcaagagcaccacgaacaucaugaucaccaccaucaucaucgugaucaucgugauccugcugcuccugaucgccgucgggcuguuccucuacugcaaggcccgcuccacccccgugacgcugagcaaggaccagcuguccgggaucaacaacaucgcguucagcaacugaggacuagugaagggaacacccaaauuuaauucagccuuaagcacaauuaauuaagagugaaacguaauuguacaagcaguuggucacccaccauagggcaugaucaacaccgcaaccuuuccuuuuucccccagugauucugaaaaaccccucuucccuucagcuugcuuagauguuccaaauuuaguaagcuuaaggcggccuacagaagaaaaagaaaaaaaaggccacaaaaguucccucucacuuucaguaaauaaaauaaaagcagcaacagaaauaaagaaauaaaugaaauucaaaaugaaauaaauauuguguugugcagcauuaaaaaaucaauaaaaauuaaaaaugagcaagaucuaaaaaaaaaaaaaaaaaaaaaaaaaaaaaaaaaaaaaaaaaaaaaaaaaaaaaaaaaaaaaaaaugcaucccccccccccccccccccccccccccccccaaaggcucuuuucagagccaccagaauu

SEQ ID NO: 17110 - RNA, 2196 nt, Artificial Sequence
  mRNA product Design f-1 comprising derived and/or modified sequence from HRSV(Memphis-37)__AIY60640.1__F_DSCav1_mut5 (opt1)
gggagagcggcucggccauuuugucccagucaguccggaggcugcggcugcagaaguaccgccugcggaguaacugcaaagaagcuuaccauggagcugcccauccucaagaccaacgccaucaccacgauccuggccgcggugacccugugcuucgccagcucccagaacaucaccgaggaguucuaccagagcacgugcuccgccgucagcaagggcuaccucuccgcccugcgcaccgggugguacaccagcgugaucaccaucgagcuguccaacaucaaggagaacaagugcaacggcaccgacgccaaggugaagcucaucaagcaggagcuggacaaguacaagaacgcggucacggagcugcagcuccugaugcagagcaccccggccgccggguccggcagcgccaucgcguccgggaucgccgugugcaaggugcugcaccucgagggcgaggucaacaagaucaagaacgcccugcugagcaccaacaaggccguggugucccucagcggcugcggggucuccgugcugaccuucaaggugcuggaccucaagaacuacaucgacaagcagcugcugcccauccucaacaagcagagcugcuccaucagcaacaucgagacggucaucgaguuccagcagaagaacaaccggcugcuggagaucacccgcgaguucuccgugaacgccggcgugaccacccccgucagcacguacaugcucaccaacagcgagcugcugucccucaucaacgacaugcccaucaccaacgaccagaagaagcugaugagcaacaacgugcagaucgugcggcagcaguccuacagcaucaugugcaucaucaaggaggagguccuggcguacguggugcagcucccgcuguacggggucaucgacacccccugcuggaagcugcacacgagcccccucugcaccaccaacaccaaggagggcuccaacaucugccugacgcgcaccgaccgggggugguacugcgacaacgccggcuccgugagcuucuucccccaggccgagaccugcaaggugcaguccaaccgcgucuucugcgacaccaugaacagccggacgcucccguccgaggugaaccugugcaacaucgacaucuucaaccccaaguacgacugcaagaucaugaccagcaagaccgacgucuccagcuccgugaucaccagccugggcgccaucguguccugcuacgggaagacgaagugcaccgccagcaacaagugccggggcaucaucaagaccuucuccaacgggugcgacuacgucagcaacaagggcguggacaccgugagcgucggcaacacgcucuacuacgugaacaagcaggaggggaagucccuguacgugaagggcgagcccaucaucaacuucuacgacccccuggucuucccgagcgacgaguucgacgcguccaucagccaggugaacgagaagaucaaccagucccucgccuucauccgcaagagcgacgagcugcugcacaacgugaacgucgggaaguccaccaccaacaucaugaucaccaccaucaucaucgugaucaucgugauccuccugcugcucaucgccgucggccuguuccuguacugcaaggcccggagcacgcccgugacccuguccaaggaccagcucagcgggaucaacaacaucgccuucuccaacugaggacuagugaagggaacacccaaauuuaauucagccuuaagcacaauuaauuaagagugaaacguaauuguacaagcaguuggucacccaccauagggcaugaucaacaccgcaaccuuuccuuuuucccccagugauucugaaaaaccccucuucccuucagcuugcuuagauguuccaaauuuaguaagcuuaaggcggccuacagaagaaaaagaaaaaaaaggccacaaaaguucccucucacuuucaguaaauaaaauaaaagcagcaacagaaauaaagaaauaaaugaaauucaaaaugaaauaaauauuguguugugcagcauuaaaaaaucaauaaaaauuaaaaaugagcaagaucuaaaaaaaaaaaaaaaaaaaaaaaaaaaaaaaaaaaaaaaaaaaaaaaaaaaaaaaaaaaaaaaaugcaucccccccccccccccccccccccccccccccaaaggcucuuuucagagccaccagaauu

SEQ ID NO: 17111 - RNA, 2196 nt, Artificial Sequence
  mRNA product Design f-1 comprising derived and/or modified sequence from HRSV(Memphis-37)__AIY60640.1__F_DSCav1_mut5 (opt2)
gggagagcggcucggccauuuugucccagucaguccggaggcugcggcugcagaaguaccgccugcggaguaacugcaaagaagcuuaccauggagcuccccauccucaagaccaacgccaucaccaccauccucgccgccgucacccucugcuucgccuccucccagaacaucaccgaggaguucuaccaguccaccugcuccgccgucuccaagggcuaccucuccgcccuccgcaccggcugguacaccuccgucaucaccaucgagcucuccaacaucaaggagaacaagugcaacggcaccgacgccaaggucaagcucaucaagcaggagcucgacaaguacaagaacgccgucaccgagcuccagcuccucaugcaguccacccccgccgccggcuccggcuccgccaucgccuccggcaucgccgucugcaagguccuccaccucgagggcgaggucaacaagaucaagaacgcccuccucuccaccaacaaggccgucgucucccucuccggcugcggcgucuccguccucaccuucaagguccucgaccucaagaacuacaucgacaagcagcuccuccccauccucaacaagcaguccugcuccaucuccaacaucgagaccgucaucgaguuccagcagaagaacaaccgccuccucgagaucacccgcgaguucuccgucaacgccggcgucaccacccccgucuccaccuacaugcucaccaacuccgagcuccucucccucaucaacgacaugcccaucaccaacgaccagaagaagcucauguccaacaacguccagaucguccgccagcaguccuacuccaucaugugcaucaucaaggaggagguccucgccuacgucguccagcucccccucuacggcgucaucgacacccccugcuggaagcuccacaccuccccccucugcaccaccaacaccaaggagggcuccaacaucugccucacccgcaccgaccgcggcugguacugcgacaacgccggcuccgucuccuucuucccccaggccgagaccugcaagguccaguccaaccgcgucuucugcgacaccaugaacucccgcacccuccccuccgaggucaaccucugcaacaucgacaucuucaaccccaaguacgacugcaagaucaugaccuccaagaccgacgucuccuccuccgucaucaccucccucggcgccaucgucuccugcuacggcaagaccaagugcaccgccuccaacaagugccgcggcaucaucaagaccuucuccaacggcugcgacuacgucuccaacaagggcgucgacaccgucuccgucggcaacacccucuacuacgucaacaagcaggagggcaagucccucuacgucaagggcgagcccaucaucaacuucuacgacccccucgucuuccccuccgacgaguucgacgccuccaucucccaggucaacgagaagaucaaccagucccucgccuucauccgcaaguccgacgagcuccuccacaacgucaacgucggcaaguccaccaccaacaucaugaucaccaccaucaucaucgucaucaucgucauccuccuccuccucaucgccgucggccucuuccucuacugcaaggcccgcuccacccccgucacccucuccaaggaccagcucuccggcaucaacaacaucgccuucuccaacugaggacuagugaagggaacacccaaauuuaauucagccuuaagcacaauuaauuaagagugaaacguaauuguacaagcaguuggucacccaccauagggcaugaucaacaccgcaaccuuuccuuuuucccccagugauucugaaaaaccccucuucccuucagcuugcuuagauguuccaaauuuaguaagcuuaaggcggccuacagaagaaaaagaaaaaaaaggccacaaaaguucccucucacuuucaguaaauaaaauaaaagcagcaacagaaauaaagaaauaaaugaaauucaaaaugaaauaaauauuguguugugcagcauuaaaaaaucaauaaaaauuaaaaaugagcaagaucuaaaaaaaaaaaaaaaaaaaaaaaaaaaaaaaaaaaaaaaaaaaaaaaaaaaaaaaaaaaaaaaaugcaucccccccccccccccccccccccccccccccaaaggcucuuuucagagccaccagaauu

SEQ ID NO: 17112 - RNA, 2196 nt, Artificial Sequence
  mRNA product Design f-1 comprising derived and/or modified sequence from HRSV(Memphis-37)__AIY60640.1__F_DSCav1_mut5 (opt3)
gggagagcggcucggccauuuugucccagucaguccggaggcugcggcugcagaaguaccgccugcggaguaacugcaaagaagcuuaccauggagcugcccauccucaagaccaacgccauuacaacuauacuugcugcagugacgcugugcuucgccagcucccagaauaucaccgaagaguuuuaccaaucuacauguucagcggucaguaaaggcuauuugagcgcuuuaagaacugggugguacaccuccguuauuacaaucgaacugucuaacauuaaggagaauaaaugcaacggaaccgacgccaaggugaaacuaaucaagcaggaacucgauaaguauaaaaaugcaguaacugagcugcagcuucugaugcagucgaccccugccgcugguucaggcagcgcaauagccagugggaucgcuguguguaaggucuugcaccucgagggagaagugaacaaaauuaagaaugcccugcuguccacaaacaaagcgguugugucucucagcggcugcggugucuccguguuaacguucaagguacuggaccuuaagaauuacaucgauaaacaauugcugccaauucuaaacaagcagucauguaguaucagcaauauagagacuguuauugaauuucagcagaaaaacaauaggcuccuggagaucacccgggaguucucugugaacgcaggggucacaacuccgguguccaccuauaugcuuacaaauucagaacuguugagccucauuaacgacaugcccaucaccaacgaucaaaagaaacugaugaguaauaacgugcagaucguccgccagcagucuuacuccauuaugugcauaaucaaggaggaaguuuuagccuaugugguacaacugccucucuacggagugauugacacgccauguuggaaacuucauacuagcccccugugcacaaccaauacuaaggagggcucgaacaucuguuugacacgaaccgaucguggcugguacugcgacaaugcugggucugucuccuuuuucccucaggccgaaacguguaaggugcagucaaacagaguguuuugcgauaccaugaauaguagaacacugccaagcgaggugaaccucugcaauauagacauuuucaaccccaaauaugauuguaagaucaugacuuccaaaaccgacgucucuagcucagugaucacaagucugggagcaauuguauccugcuacgguaagacuaaauguaccgcuagcaauaagugcaggggcaucauuaagacauuuucuaacgggugugauuauguuucaaauaaaggaguggacaccgucagugugggcaacacucuuuacuaugucaauaagcaagaggguaaaagccuguacgugaagggggaaccuauaaucaacuucuaugacccauugguuuuuccguccgaugaguucgacgccucuauuucgcagguuaacgagaaaaucaaucagagccucgcguuuauccggaaguccgaugaacuguuacacaacguaaaugucggaaagucaacgacaaacauuaugauaaccacuaucauuaucgugauuaucguuauacugcuacuccugaucgccgugggccuuuucuuguacugcaaagcacgcaguacccccgucacacugucuaaggaccagcucagcggcauuaauaacaucgcuuucuccaauugaggacuagugaagggaacacccaaauuuaauucagccuuaagcacaauuaauuaagagugaaacguaauuguacaagcaguuggucacccaccauagggcaugaucaacaccgcaaccuuuccuuuuucccccagugauucugaaaaaccccucuucccuucagcuugcuuagauguuccaaauuuaguaagcuuaaggcggccuacagaagaaaaagaaaaaaaaggccacaaaaguucccucucacuuucaguaaauaaaauaaaagcagcaacagaaauaaagaaauaaaugaaauucaaaaugaaauaaauauuguguugugcagcauuaaaaaaucaauaaaaauuaaaaaugagcaagaucuaaaaaaaaaaaaaaaaaaaaaaaaaaaaaaaaaaaaaaaaaaaaaaaaaaaaaaaaaaaaaaaaugcaucccccccccccccccccccccccccccccccaaaggcucuuuucagagccaccagaauu

SEQ ID NO: 17113 - RNA, 2196 nt, Artificial Sequence
  mRNA product Design f-1 comprising derived and/or modified sequence from HRSV(Memphis-37)__AIY60640.1__F_DSCav1_mut5 (opt4)
gggagagcggcucggccauuuugucccagucaguccggaggcugcggcugcagaaguaccgccugcggaguaacugcaaagaagcuuaccauggagcugcccauccugaagaccaacgccaucaccaccauccuggccgccgugacccugugcuucgccagcagccagaacaucaccgaggaguucuaccagagcaccugcagcgccgugagcaagggcuaccugagcgcccugagaaccggcugguacaccagcgugaucaccaucgagcugagcaacaucaaggagaacaagugcaacggcaccgacgccaaggugaagcugaucaagcaggagcuggacaaguacaagaacgccgugaccgagcugcagcugcugaugcagagcacccccgccgccggcagcggcagcgccaucgccagcggcaucgccgugugcaaggugcugcaccuggagggcgaggugaacaagaucaagaacgcccugcugagcaccaacaaggccguggugagccugagcggcugcggcgugagcgugcugaccuucaaggugcuggaccugaagaacuacaucgacaagcagcugcugcccauccugaacaagcagagcugcagcaucagcaacaucgagaccgugaucgaguuccagcagaagaacaacagacugcuggagaucaccagagaguucagcgugaacgccggcgugaccacccccgugagcaccuacaugcugaccaacagcgagcugcugagccugaucaacgacaugcccaucaccaacgaccagaagaagcugaugagcaacaacgugcagaucgugagacagcagagcuacagcaucaugugcaucaucaaggaggaggugcuggccuacguggugcagcugccccuguacggcgugaucgacacccccugcuggaagcugcacaccagcccccugugcaccaccaacaccaaggagggcagcaacaucugccugaccagaaccgacagaggcugguacugcgacaacgccggcagcgugagcuucuucccccaggccgagaccugcaaggugcagagcaacagaguguucugcgacaccaugaacagcagaacccugcccagcgaggugaaccugugcaacaucgacaucuucaaccccaaguacgacugcaagaucaugaccagcaagaccgacgugagcagcagcgugaucaccagccugggcgccaucgugagcugcuacggcaagaccaagugcaccgccagcaacaagugcagaggcaucaucaagaccuucagcaacggcugcgacuacgugagcaacaagggcguggacaccgugagcgugggcaacacccuguacuacgugaacaagcaggagggcaagagccuguacgugaagggcgagcccaucaucaacuucuacgacccccugguguuccccagcgacgaguucgacgccagcaucagccaggugaacgagaagaucaaccagagccuggccuucaucagaaagagcgacgagcugcugcacaacgugaacgugggcaagagcaccaccaacaucaugaucaccaccaucaucaucgugaucaucgugauccugcugcugcugaucgccgugggccuguuccuguacugcaaggccagaagcacccccgugacccugagcaaggaccagcugagcggcaucaacaacaucgccuucagcaacugaggacuagugaagggaacacccaaauuuaauucagccuuaagcacaauuaauuaagagugaaacguaauuguacaagcaguuggucacccaccauagggcaugaucaacaccgcaaccuuuccuuuuucccccagugauucugaaaaaccccucuucccuucagcuugcuuagauguuccaaauuuaguaagcuuaaggcggccuacagaagaaaaagaaaaaaaaggccacaaaaguucccucucacuuucaguaaauaaaauaaaagcagcaacagaaauaaagaaauaaaugaaauucaaaaugaaauaaauauuguguugugcagcauuaaaaaaucaauaaaaauuaaaaaugagcaagaucuaaaaaaaaaaaaaaaaaaaaaaaaaaaaaaaaaaaaaaaaaaaaaaaaaaaaaaaaaaaaaaaaugcaucccccccccccccccccccccccccccccccaaaggcucuuuucagagccaccagaauu

SEQ ID NO: 17114 - RNA, 2196 nt, Artificial Sequence
  mRNA product Design f-1 comprising derived and/or modified sequence from HRSV(Memphis-37)__AIY60640.1__F_DSCav1_mut5 (opt5)
gggagagcggcucggccauuuugucccagucaguccggaggcugcggcugcagaaguaccgccugcggaguaacugcaaagaagcuuaccauggagcugcccauccucaagaccaacgccauuacaacgauccuggcugccgugacccuuugcuucgcgagcucccagaauauuacagaagaguuuuaccaaucuaccuguagcgcugucuccaaaggcuaucugucugcccucagaacagggugguacaccagcguuaucacaauugaacuguccaacaucaaggagaauaaaugcaacggaaccgacgccaaggugaaacuuaucaagcaggaacuggauaaguauaaaaaugcugugacggagcuccagcugcugaugcagucuaccccugccgcuggcagcggguccgccauugcgagcggaaucgccgucuguaaggugcuccaccuggagggcgaaguuaacaaaauuaagaaugcccuucugucuacaaacaaagcuguggucucccucagcgggugcggagugucuguucugaccuucaaggugcuugaccugaagaauuacaucgauaaacaacuccugccgauucugaacaagcaguccuguagcaucucuaauauugagacagucaucgaauuucagcagaaaaacaaucggcuccuggagaucacccgcgaguucuccgugaacgcuggcgugacgacacccgucagcaccuauaugcuuacaaauuccgaacugcucucucugauuaacgacaugccuaucaccaacgaucaaaagaaacuuaugagcaauaacguucagauugugagacagcaguccuacagcaucaugugcauuaucaaggaggaagugcuggccuaugucgugcaacucccccuguacggcguuaucgacaccccuuguuggaaacugcauacaucuccccucugcacgaccaauacaaaggagggguccaacauuugucugacccggacagaucgcggaugguacugcgacaaugcgggcagcgugagcuuuuucccucaggccgaaaccuguaagguccagucuaacagaguguuuugcgauacgaugaacuccagaacacugccgucugagguuaaucucugcaauaucgacauuuucaaccccaaauaugauuguaagaucaugaccagcaaaaccgacguguccagcucugucauuacaucccugggggcuaucgugagcugcuacggaaagaccaaauguacagccucuaauaagugccggggcaucauuaagacguuuuccaacgggugugauuaugucagcaauaaaggaguggacaccguuuccgugggcaacacacuuuacuaugucaauaagcaagagggcaaaucucuguacgugaagggggaaccuaucauuaacuucuaugacccccucguuuuuccuagcgaugaguucgacgcuuccaucucucaggugaacgagaaaauuaaucagagccuggccuuuauccgcaaguccgaugaacugcuccacaacgucaaugugggaaagagcaccacaaacauuaugaucaccacgaucauuaucgugauuaucguuauucugcuucugcucaucgccgucggccuguuccuguacugcaaagcuagaucuacccccgugacacuuuccaaggaccagcucagcgggaucaauaacauugcguucucuaauugaggacuagugaagggaacacccaaauuuaauucagccuuaagcacaauuaauuaagagugaaacguaauuguacaagcaguuggucacccaccauagggcaugaucaacaccgcaaccuuuccuuuuucccccagugauucugaaaaaccccucuucccuucagcuugcuuagauguuccaaauuuaguaagcuuaaggcggccuacagaagaaaaagaaaaaaaaggccacaaaaguucccucucacuuucaguaaauaaaauaaaagcagcaacagaaauaaagaaauaaaugaaauucaaaaugaaauaaauauuguguugugcagcauuaaaaaaucaauaaaaauuaaaaaugagcaagaucuaaaaaaaaaaaaaaaaaaaaaaaaaaaaaaaaaaaaaaaaaaaaaaaaaaaaaaaaaaaaaaaaugcaucccccccccccccccccccccccccccccccaaaggcucuuuucagagccaccagaauu

SEQ ID NO: 17115 - RNA, 2196 nt, Artificial Sequence
  mRNA product Design f-1 comprising derived and/or modified sequence from HRSV(Memphis-37)__AIY60640.1__F_DSCav1_mut5 (opt6)
gggagagcggcucggccauuuugucccagucaguccggaggcugcggcugcagaaguaccgccugcggaguaacugcaaagaagcuuaccauggaacucccaaucuuaaaaacaaacgcaauaacuacaauacucgcagcaguaacacuaugcuucgcaucaucacaaaacauaaccgaagaauuuuaccaaaguacaugcucagcaguaucaaaagguuaccucucagcccuaagaaccggaugguacacaucaguaaucacuauagaacuauccaauauaaaagaaaacaaaugcaacggcacugacgcaaaaguuaaauuaauuaaacaagaacucgauaaauauaaaaaugcaguaacagaacuacaacuacuaaugcaaagcaccccagcugcaggaagcggaucagcaaucgcaucaggaauagcaguauguaaaguacuacaccuagaaggagaagucaacaaaaucaaaaaugcacuacuaaguacaaacaaagcuguaguaagccuaucagguugcggaguaucaguauuaacauuuaaaguccucgaccuaaaaaauuacauagauaaacaacucuuaccaauacucaauaaacaaaguugcagcaucagcaacauagaaacagucaucgaauuucaacaaaaaaauaauagacuccuagaaauaacacgugaauuuucaguaaaugcuggaguaacaacaccaguaucuacauauaugcuaacaaauagcgaacuacucucacuuauuaacgauaugcccauaacaaacgaccaaaaaaaacuuaugucaaacaauguucaaauaguuagacaacaauccuacagcauaaugugcauaaucaaagaagaaguucuagcuuacguaguacaacuaccacucuaugguguuaucgacacccccuguuggaaacuucacacaucaccacuaugcacaacaaacacaaaagaaggaucaaauauuugcuuaacaagaacagauagaggaugguauugcgauaaugccggaucaguaucauuuuuuccacaagcagaaacauguaaaguacaauccaaccgaguauuuugcgacaccaugaacuccagaacacuaccaucugaagucaaccuauguaauauagauauauuuaacccaaaauaugacuguaaaaucaugacaucaaaaacugauguaaguucuaguguaauaaccagcuuaggcgccauaguaagcuguuacgguaaaacaaaaugcacagcaagcaacaaaugccgcgguauaauaaaaacauucucaaacggaugcgauuauguaaguaacaaaggaguagauacagucuccguaggcaacacauuauacuacguaaacaaacaagaaggaaaaucacuauauguaaaaggagaaccaaucauaaauuucuacgacccacuuguauuccccagcgacgaauuugaugcuuccauuucacaagucaacgaaaaaauaaaccaaucauuagccuucauaagaaaaucagacgaauuauuacauaauguuaaugucggcaaauccacaacuaauauaaugauaacaacaaucauaauaguaauaaucguuauacuacuauuacucauagcaguaggacucuucuuauauuguaaagccagauccaccccaguaacacucucaaaagaccaauuaucaggaauuaauaacaucgcauuuucaaacuaaggacuagugaagggaacacccaaauuuaauucagccuuaagcacaauuaauuaagagugaaacguaauuguacaagcaguuggucacccaccauagggcaugaucaacaccgcaaccuuuccuuuuucccccagugauucugaaaaaccccucuucccuucagcuugcuuagauguuccaaauuuaguaagcuuaaggcggccuacagaagaaaaagaaaaaaaaggccacaaaaguucccucucacuuucaguaaauaaaauaaaagcagcaacagaaauaaagaaauaaaugaaauucaaaaugaaauaaauauuguguugugcagcauuaaaaaaucaauaaaaauuaaaaaugagcaagaucuaaaaaaaaaaaaaaaaaaaaaaaaaaaaaaaaaaaaaaaaaaaaaaaaaaaaaaaaaaaaaaaaugcaucccccccccccccccccccccccccccccccaaaggcucuuuucagagccaccagaauu

SEQ ID NO: 17116 - RNA, 2196 nt, Artificial Sequence
  mRNA product Design f-1 comprising derived and/or modified sequence from HRSV(Memphis-37)__AIY60640.1__F_DSCav1_mut5 (opt11)
gggagagcggcucggccauuuugucccagucaguccggaggcugcggcugcagaaguaccgccugcggaguaacugcaaagaagcuuaccauggaacuccccauccuuaaaaccaacgcaaucaccacaauacucgccgccgucacccucugcuuugcguccucccagaacaucaccgaagaguucuaccaaucgaccugcagcgccgucagcaagggcuaccucucagcccuccgaacaggcugguacacauccgucaucaccaucgaacucucaaacauaaaagaaaacaaguguaacggcaccgacgcgaaaguuaaacucaucaaacaagaacucgauaaauacaaaaacgcaguaaccgaacuacaacuccuaaugcaauccacacccgcagccggcagcggcuccgcaaucgccuccggcauagcagucugcaaaguccuccaccucgaaggagaagucaauaaaaucaaaaacgcccuccuauccaccaacaaagcgguugucucccuguccggaugcggaguuagcguccuaaccuucaaggugcucgaccucaaaaacuacauagacaaacaacuacuccccauacucaacaaacaaucaugcuccaucagcaacaucgagaccgucaucgaguuccaacagaaaaacaaccgccuccucgaaaucacacgagaguucuccguaaacgccggcgucacaacccccguuuccacuuacaugcucacaaacagcgaacuccucucccucaucaacgacaugccaaucaccaacgaccaaaagaaacucauguccaacaacguccaaaucguccgccaacaaagcuacagcauaaugugcaucauaaaagaagaaguacucgcguacguaguccaacuaccccuauacggcgucaucgacacccccugcuggaaacugcacacuucuccccucuguacaaccaacacuaaagaaggcucgaacaucugccucaccagaacagaccgaggaugguacugcgacaacgccggcuccgucagcuucuucccccaggccgaaacaugcaaaguacaaucaaaccgagucuucugcgacacaaugaacagcagaacucuacccuccgaaguuaaccuaugcaacaucgacaucuucaaccccaaauacgacugcaaaauaaugaccucaaaaacagacguguccagcuccguuaucaccucucucggagccaucguauccuguuauggaaaaaccaaaugcaccgccucaaacaaaugccgaggcauaaucaaaacauucucaaauggaugcgacuacguauccaacaaaggagucgacaccgucagcgugggcaauacccucuacuacgucaacaaacaggaagggaaaucccucuauguaaagggcgagcccauuauuaacuucuaugacccccucguguucccaagcgacgaguucgacgccuccauaucacaagucaaugagaaaaucaaccaaucacuagcuuucauucgcaaauccgacgaacuccuucacaacgucaacgucggcaaauccaccaccaacaucaugaucaccaccauaauuaucgucauuaucgucauacuacuccuacucaucgccgucggccucuuccucuauugcaaagcacgcucgacacccgucacccuuucaaaagaccaacuuuccggcauaaacaacauagccuucagcaacuagggacuagugaagggaacacccaaauuuaauucagccuuaagcacaauuaauuaagagugaaacguaauuguacaagcaguuggucacccaccauagggcaugaucaacaccgcaaccuuuccuuuuucccccagugauucugaaaaaccccucuucccuucagcuugcuuagauguuccaaauuuaguaagcuuaaggcggccuacagaagaaaaagaaaaaaaaggccacaaaaguucccucucacuuucaguaaauaaaauaaaagcagcaacagaaauaaagaaauaaaugaaauucaaaaugaaauaaauauuguguugugcagcauuaaaaaaucaauaaaaauuaaaaaugagcaagaucuaaaaaaaaaaaaaaaaaaaaaaaaaaaaaaaaaaaaaaaaaaaaaaaaaaaaaaaaaaaaaaaaugcaucccccccccccccccccccccccccccccccaaaggcucuuuucagagccaccagaauu

SEQ ID NO: 17117 - RNA, 1976 nt, Artificial Sequence
  mRNA product Design f-2 comprising derived and/or modified sequence from HRSV(Memphis-37)__AIY60640.1__F_DSCav1_mut5 (opt1)
gggagagcggcucggccauuuugucccagucaguccggaggcugcggcugcagaaguaccgccugcggaguaacugcaaagaagcuuaccauggagcugcccauccucaagaccaacgccaucaccacgauccuggccgcggugacccugugcuucgccagcucccagaacaucaccgaggaguucuaccagagcacgugcuccgccgucagcaagggcuaccucuccgcccugcgcaccgggugguacaccagcgugaucaccaucgagcuguccaacaucaaggagaacaagugcaacggcaccgacgccaaggugaagcucaucaagcaggagcuggacaaguacaagaacgcggucacggagcugcagcuccugaugcagagcaccccggccgccggcuccgggagcgcgaucgccuccggcaucgccgucugcaaggugcugcaccucgagggcgaggugaacaagaucaagaacgcccugcuguccaccaacaaggccgucgugagccucuccggcugcggggugagcguccugaccuucaaggugcuggaccucaagaacuacaucgacaagcagcugcugcccauccugaacaagcagagcugcuccaucagcaacaucgagaccgucaucgaguuccagcagaagaacaaccgccuccuggagaucacgcgggaguucagcgugaacgcgggcgugaccacccccgucuccaccuacaugcugacgaacagcgagcuccugucccugaucaacgacaugccgaucaccaacgaccagaagaagcucaugagcaacaacgugcagaucgugcgccagcaguccuacagcaucaugugcaucaucaaggaggagguccuggccuacguggugcagcugccccucuacggggucaucgacacccccugcuggaagcugcacaccagcccccugugcacgaccaacaccaaggagggcuccaacaucugccucacccggacggaccgcgggugguacugcgacaacgccggcagcguguccuucuucccgcaggccgagaccugcaagguccagagcaaccggguguucugcgacaccaugaacucccggacccugcccagcgaggugaaccucugcaacaucgacaucuucaaccccaaguacgacugcaagaucaugacguccaagaccgacgucagcuccagcgugaucaccucccugggcgccaucgugagcugcuacgggaagaccaagugcacggcgagcaacaagugccgcggcaucaucaagaccuucuccaacgggugcgacuacgucagcaacaagggcguggacaccguguccgucggcaacacccuguacuacgugaacaagcaggagggcaagagccucuacgugaagggggagcccaucaucaacuucuacgacccgcuggucuuccccuccgacgaguucgacgccagcaucucccaggugaacgagaagaucaaccagagccuggccuucauccggaaguccgacgagcuccugcacaacgugaacgucggcaagagcaccacgaacaucaugaucaccaccaucaucaucgugaucaucgugauccugcugcuccugaucgccgucgggcuguuccucuacugcaaggcccgcuccacccccgugacgcugagcaaggaccagcuguccgggaucaacaacaucgcguucagcaacugaggacuaguggaagcauuuuccuggcugauuaaaagaaauuacucagcuauggucaucuguuccuguuagaaggcuaugcagcauauuauauacuaugcgcauguuaugaaaugcauaauaaaaaauuuuaaaaaaucuaaaagaucuaaaaaaaaaaaaaaaaaaaaaaaaaaaaaaaaaaaaaaaaaaaaaaaaaaaaaaaaaaaaaaaaugcaucccccccccccccccccccccccccccccccaaaggcucuuuucagagccaccagaauu

SEQ ID NO: 17118 - RNA, 1976 nt, Artificial Sequence
  mRNA product Design f-2 comprising derived and/or modified sequence from HRSV(Memphis-37)__AIY60640.1__F_DSCav1_mut5 (opt1)
gggagagcggcucggccauuuugucccagucaguccggaggcugcggcugcagaaguaccgccugcggaguaacugcaaagaagcuuaccauggagcugcccauccucaagaccaacgccaucaccacgauccuggccgcggugacccugugcuucgccagcucccagaacaucaccgaggaguucuaccagagcacgugcuccgccgucagcaagggcuaccucuccgcccugcgcaccgggugguacaccagcgugaucaccaucgagcuguccaacaucaaggagaacaagugcaacggcaccgacgccaaggugaagcucaucaagcaggagcuggacaaguacaagaacgcggucacggagcugcagcuccugaugcagagcaccccggccgccggguccggcagcgccaucgcguccgggaucgccgugugcaaggugcugcaccucgagggcgaggucaacaagaucaagaacgcccugcugagcaccaacaaggccguggugucccucagcggcugcggggucuccgugcugaccuucaaggugcuggaccucaagaacuacaucgacaagcagcugcugcccauccucaacaagcagagcugcuccaucagcaacaucgagacggucaucgaguuccagcagaagaacaaccggcugcuggagaucacccgcgaguucuccgugaacgccggcgugaccacccccgucagcacguacaugcucaccaacagcgagcugcugucccucaucaacgacaugcccaucaccaacgaccagaagaagcugaugagcaacaacgugcagaucgugcggcagcaguccuacagcaucaugugcaucaucaaggaggagguccuggcguacguggugcagcucccgcuguacggggucaucgacacccccugcuggaagcugcacacgagcccccucugcaccaccaacaccaaggagggcuccaacaucugccugacgcgcaccgaccgggggugguacugcgacaacgccggcuccgugagcuucuucccccaggccgagaccugcaaggugcaguccaaccgcgucuucugcgacaccaugaacagccggacgcucccguccgaggugaaccugugcaacaucgacaucuucaaccccaaguacgacugcaagaucaugaccagcaagaccgacgucuccagcuccgugaucaccagccugggcgccaucguguccugcuacgggaagacgaagugcaccgccagcaacaagugccggggcaucaucaagaccuucuccaacgggugcgacuacgucagcaacaagggcguggacaccgugagcgucggcaacacgcucuacuacgugaacaagcaggaggggaagucccuguacgugaagggcgagcccaucaucaacuucuacgacccccuggucuucccgagcgacgaguucgacgcguccaucagccaggugaacgagaagaucaaccagucccucgccuucauccgcaagagcgacgagcugcugcacaacgugaacgucgggaaguccaccaccaacaucaugaucaccaccaucaucaucgugaucaucgugauccuccugcugcucaucgccgucggccuguuccuguacugcaaggcccggagcacgcccgugacccuguccaaggaccagcucagcgggaucaacaacaucgccuucuccaacugaggacuaguggaagcauuuuccuggcugauuaaaagaaauuacucagcuauggucaucuguuccuguuagaaggcuaugcagcauauuauauacuaugcgcauguuaugaaaugcauaauaaaaaauuuuaaaaaaucuaaaagaucuaaaaaaaaaaaaaaaaaaaaaaaaaaaaaaaaaaaaaaaaaaaaaaaaaaaaaaaaaaaaaaaaugcaucccccccccccccccccccccccccccccccaaaggcucuuuucagagccaccagaauu

SEQ ID NO: 17119 - RNA, 1976 nt, Artificial Sequence
  mRNA product Design f-2 comprising derived and/or modified sequence from HRSV(Memphis-37)__AIY60640.1__F_DSCav1_mut5 (opt2)
gggagagcggcucggccauuuugucccagucaguccggaggcugcggcugcagaaguaccgccugcggaguaacugcaaagaagcuuaccauggagcuccccauccucaagaccaacgccaucaccaccauccucgccgccgucacccucugcuucgccuccucccagaacaucaccgaggaguucuaccaguccaccugcuccgccgucuccaagggcuaccucuccgcccuccgcaccggcugguacaccuccgucaucaccaucgagcucuccaacaucaaggagaacaagugcaacggcaccgacgccaaggucaagcucaucaagcaggagcucgacaaguacaagaacgccgucaccgagcuccagcuccucaugcaguccacccccgccgccggcuccggcuccgccaucgccuccggcaucgccgucugcaagguccuccaccucgagggcgaggucaacaagaucaagaacgcccuccucuccaccaacaaggccgucgucucccucuccggcugcggcgucuccguccucaccuucaagguccucgaccucaagaacuacaucgacaagcagcuccuccccauccucaacaagcaguccugcuccaucuccaacaucgagaccgucaucgaguuccagcagaagaacaaccgccuccucgagaucacccgcgaguucuccgucaacgccggcgucaccacccccgucuccaccuacaugcucaccaacuccgagcuccucucccucaucaacgacaugcccaucaccaacgaccagaagaagcucauguccaacaacguccagaucguccgccagcaguccuacuccaucaugugcaucaucaaggaggagguccucgccuacgucguccagcucccccucuacggcgucaucgacacccccugcuggaagcuccacaccuccccccucugcaccaccaacaccaaggagggcuccaacaucugccucacccgcaccgaccgcggcugguacugcgacaacgccggcuccgucuccuucuucccccaggccgagaccugcaagguccaguccaaccgcgucuucugcgacaccaugaacucccgcacccuccccuccgaggucaaccucugcaacaucgacaucuucaaccccaaguacgacugcaagaucaugaccuccaagaccgacgucuccuccuccgucaucaccucccucggcgccaucgucuccugcuacggcaagaccaagugcaccgccuccaacaagugccgcggcaucaucaagaccuucuccaacggcugcgacuacgucuccaacaagggcgucgacaccgucuccgucggcaacacccucuacuacgucaacaagcaggagggcaagucccucuacgucaagggcgagcccaucaucaacuucuacgacccccucgucuuccccuccgacgaguucgacgccuccaucucccaggucaacgagaagaucaaccagucccucgccuucauccgcaaguccgacgagcuccuccacaacgucaacgucggcaaguccaccaccaacaucaugaucaccaccaucaucaucgucaucaucgucauccuccuccuccucaucgccgucggccucuuccucuacugcaaggcccgcuccacccccgucacccucuccaaggaccagcucuccggcaucaacaacaucgccuucuccaacugaggacuaguggaagcauuuuccuggcugauuaaaagaaauuacucagcuauggucaucuguuccuguuagaaggcuaugcagcauauuauauacuaugcgcauguuaugaaaugcauaauaaaaaauuuuaaaaaaucuaaaagaucuaaaaaaaaaaaaaaaaaaaaaaaaaaaaaaaaaaaaaaaaaaaaaaaaaaaaaaaaaaaaaaaaugcaucccccccccccccccccccccccccccccccaaaggcucuuuucagagccaccagaauu

SEQ ID NO: 17120 - RNA, 1976 nt, Artificial Sequence
  mRNA product Design f-2 comprising derived and/or modified sequence from HRSV(Memphis-37)__AIY60640.1__F_DSCav1_mut5 (opt3)
gggagagcggcucggccauuuugucccagucaguccggaggcugcggcugcagaaguaccgccugcggaguaacugcaaagaagcuuaccauggagcugcccauccucaagaccaacgccauuacaacuauacuugcugcagugacgcugugcuucgccagcucccagaauaucaccgaagaguuuuaccaaucuacauguucagcggucaguaaaggcuauuugagcgcuuuaagaacugggugguacaccuccguuauuacaaucgaacugucuaacauuaaggagaauaaaugcaacggaaccgacgccaaggugaaacuaaucaagcaggaacucgauaaguauaaaaaugcaguaacugagcugcagcuucugaugcagucgaccccugccgcugguucaggcagcgcaauagccagugggaucgcuguguguaaggucuugcaccucgagggagaagugaacaaaauuaagaaugcccugcuguccacaaacaaagcgguugugucucucagcggcugcggugucuccguguuaacguucaagguacuggaccuuaagaauuacaucgauaaacaauugcugccaauucuaaacaagcagucauguaguaucagcaauauagagacuguuauugaauuucagcagaaaaacaauaggcuccuggagaucacccgggaguucucugugaacgcaggggucacaacuccgguguccaccuauaugcuuacaaauucagaacuguugagccucauuaacgacaugcccaucaccaacgaucaaaagaaacugaugaguaauaacgugcagaucguccgccagcagucuuacuccauuaugugcauaaucaaggaggaaguuuuagccuaugugguacaacugccucucuacggagugauugacacgccauguuggaaacuucauacuagcccccugugcacaaccaauacuaaggagggcucgaacaucuguuugacacgaaccgaucguggcugguacugcgacaaugcugggucugucuccuuuuucccucaggccgaaacguguaaggugcagucaaacagaguguuuugcgauaccaugaauaguagaacacugccaagcgaggugaaccucugcaauauagacauuuucaaccccaaauaugauuguaagaucaugacuuccaaaaccgacgucucuagcucagugaucacaagucugggagcaauuguauccugcuacgguaagacuaaauguaccgcuagcaauaagugcaggggcaucauuaagacauuuucuaacgggugugauuauguuucaaauaaaggaguggacaccgucagugugggcaacacucuuuacuaugucaauaagcaagaggguaaaagccuguacgugaagggggaaccuauaaucaacuucuaugacccauugguuuuuccguccgaugaguucgacgccucuauuucgcagguuaacgagaaaaucaaucagagccucgcguuuauccggaaguccgaugaacuguuacacaacguaaaugucggaaagucaacgacaaacauuaugauaaccacuaucauuaucgugauuaucguuauacugcuacuccugaucgccgugggccuuuucuuguacugcaaagcacgcaguacccccgucacacugucuaaggaccagcucagcggcauuaauaacaucgcuuucuccaauugaggacuaguggaagcauuuuccuggcugauuaaaagaaauuacucagcuauggucaucuguuccuguuagaaggcuaugcagcauauuauauacuaugcgcauguuaugaaaugcauaauaaaaaauuuuaaaaaaucuaaaagaucuaaaaaaaaaaaaaaaaaaaaaaaaaaaaaaaaaaaaaaaaaaaaaaaaaaaaaaaaaaaaaaaaugcaucccccccccccccccccccccccccccccccaaaggcucuuuucagagccaccagaauu

SEQ ID NO: 17121 - RNA, 1976 nt, Artificial Sequence
  mRNA product Design f-2 comprising derived and/or modified sequence from HRSV(Memphis-37)__AIY60640.1__F_DSCav1_mut5 (opt4)
gggagagcggcucggccauuuugucccagucaguccggaggcugcggcugcagaaguaccgccugcggaguaacugcaaagaagcuuaccauggagcugcccauccugaagaccaacgccaucaccaccauccuggccgccgugacccugugcuucgccagcagccagaacaucaccgaggaguucuaccagagcaccugcagcgccgugagcaagggcuaccugagcgcccugagaaccggcugguacaccagcgugaucaccaucgagcugagcaacaucaaggagaacaagugcaacggcaccgacgccaaggugaagcugaucaagcaggagcuggacaaguacaagaacgccgugaccgagcugcagcugcugaugcagagcacccccgccgccggcagcggcagcgccaucgccagcggcaucgccgugugcaaggugcugcaccuggagggcgaggugaacaagaucaagaacgcccugcugagcaccaacaaggccguggugagccugagcggcugcggcgugagcgugcugaccuucaaggugcuggaccugaagaacuacaucgacaagcagcugcugcccauccugaacaagcagagcugcagcaucagcaacaucgagaccgugaucgaguuccagcagaagaacaacagacugcuggagaucaccagagaguucagcgugaacgccggcgugaccacccccgugagcaccuacaugcugaccaacagcgagcugcugagccugaucaacgacaugcccaucaccaacgaccagaagaagcugaugagcaacaacgugcagaucgugagacagcagagcuacagcaucaugugcaucaucaaggaggaggugcuggccuacguggugcagcugccccuguacggcgugaucgacacccccugcuggaagcugcacaccagcccccugugcaccaccaacaccaaggagggcagcaacaucugccugaccagaaccgacagaggcugguacugcgacaacgccggcagcgugagcuucuucccccaggccgagaccugcaaggugcagagcaacagaguguucugcgacaccaugaacagcagaacccugcccagcgaggugaaccugugcaacaucgacaucuucaaccccaaguacgacugcaagaucaugaccagcaagaccgacgugagcagcagcgugaucaccagccugggcgccaucgugagcugcuacggcaagaccaagugcaccgccagcaacaagugcagaggcaucaucaagaccuucagcaacggcugcgacuacgugagcaacaagggcguggacaccgugagcgugggcaacacccuguacuacgugaacaagcaggagggcaagagccuguacgugaagggcgagcccaucaucaacuucuacgacccccugguguuccccagcgacgaguucgacgccagcaucagccaggugaacgagaagaucaaccagagccuggccuucaucagaaagagcgacgagcugcugcacaacgugaacgugggcaagagcaccaccaacaucaugaucaccaccaucaucaucgugaucaucgugauccugcugcugcugaucgccgugggccuguuccuguacugcaaggccagaagcacccccgugacccugagcaaggaccagcugagcggcaucaacaacaucgccuucagcaacugaggacuaguggaagcauuuuccuggcugauuaaaagaaauuacucagcuauggucaucuguuccuguuagaaggcuaugcagcauauuauauacuaugcgcauguuaugaaaugcauaauaaaaaauuuuaaaaaaucuaaaagaucuaaaaaaaaaaaaaaaaaaaaaaaaaaaaaaaaaaaaaaaaaaaaaaaaaaaaaaaaaaaaaaaaugcaucccccccccccccccccccccccccccccccaaaggcucuuuucagagccaccagaauu

SEQ ID NO: 17122 - RNA, 1976 nt, Artificial Sequence
  mRNA product Design f-2 comprising derived and/or modified sequence from HRSV(Memphis-37)__AIY60640.1__F_DSCav1_mut5 (opt5)
gggagagcggcucggccauuuugucccagucaguccggaggcugcggcugcagaaguaccgccugcggaguaacugcaaagaagcuuaccauggagcugcccauccucaagaccaacgccauuacaacgauccuggcugccgugacccuuugcuucgcgagcucccagaauauuacagaagaguuuuaccaaucuaccuguagcgcugucuccaaaggcuaucugucugcccucagaacagggugguacaccagcguuaucacaauugaacuguccaacaucaaggagaauaaaugcaacggaaccgacgccaaggugaaacuuaucaagcaggaacuggauaaguauaaaaaugcugugacggagcuccagcugcugaugcagucuaccccugccgcuggcagcggguccgccauugcgagcggaaucgccgucuguaaggugcuccaccuggagggcgaaguuaacaaaauuaagaaugcccuucugucuacaaacaaagcuguggucucccucagcgggugcggagugucuguucugaccuucaaggugcuugaccugaagaauuacaucgauaaacaacuccugccgauucugaacaagcaguccuguagcaucucuaauauugagacagucaucgaauuucagcagaaaaacaaucggcuccuggagaucacccgcgaguucuccgugaacgcuggcgugacgacacccgucagcaccuauaugcuuacaaauuccgaacugcucucucugauuaacgacaugccuaucaccaacgaucaaaagaaacuuaugagcaauaacguucagauugugagacagcaguccuacagcaucaugugcauuaucaaggaggaagugcuggccuaugucgugcaacucccccuguacggcguuaucgacaccccuuguuggaaacugcauacaucuccccucugcacgaccaauacaaaggagggguccaacauuugucugacccggacagaucgcggaugguacugcgacaaugcgggcagcgugagcuuuuucccucaggccgaaaccuguaagguccagucuaacagaguguuuugcgauacgaugaacuccagaacacugccgucugagguuaaucucugcaauaucgacauuuucaaccccaaauaugauuguaagaucaugaccagcaaaaccgacguguccagcucugucauuacaucccugggggcuaucgugagcugcuacggaaagaccaaauguacagccucuaauaagugccggggcaucauuaagacguuuuccaacgggugugauuaugucagcaauaaaggaguggacaccguuuccgugggcaacacacuuuacuaugucaauaagcaagagggcaaaucucuguacgugaagggggaaccuaucauuaacuucuaugacccccucguuuuuccuagcgaugaguucgacgcuuccaucucucaggugaacgagaaaauuaaucagagccuggccuuuauccgcaaguccgaugaacugcuccacaacgucaaugugggaaagagcaccacaaacauuaugaucaccacgaucauuaucgugauuaucguuauucugcuucugcucaucgccgucggccuguuccuguacugcaaagcuagaucuacccccgugacacuuuccaaggaccagcucagcgggaucaauaacauugcguucucuaauugaggacuaguggaagcauuuuccuggcugauuaaaagaaauuacucagcuauggucaucuguuccuguuagaaggcuaugcagcauauuauauacuaugcgcauguuaugaaaugcauaauaaaaaauuuuaaaaaaucuaaaagaucuaaaaaaaaaaaaaaaaaaaaaaaaaaaaaaaaaaaaaaaaaaaaaaaaaaaaaaaaaaaaaaaaugcaucccccccccccccccccccccccccccccccaaaggcucuuuucagagccaccagaauu

SEQ ID NO: 17123 - RNA, 1976 nt, Artificial Sequence
  mRNA product Design f-2 comprising derived and/or modified sequence from HRSV(Memphis-37)__AIY60640.1__F_DSCav1_mut5 (opt6)
gggagagcggcucggccauuuugucccagucaguccggaggcugcggcugcagaaguaccgccugcggaguaacugcaaagaagcuuaccauggaacucccaaucuuaaaaacaaacgcaauaacuacaauacucgcagcaguaacacuaugcuucgcaucaucacaaaacauaaccgaagaauuuuaccaaaguacaugcucagcaguaucaaaagguuaccucucagcccuaagaaccggaugguacacaucaguaaucacuauagaacuauccaauauaaaagaaaacaaaugcaacggcacugacgcaaaaguuaaauuaauuaaacaagaacucgauaaauauaaaaaugcaguaacagaacuacaacuacuaaugcaaagcaccccagcugcaggaagcggaucagcaaucgcaucaggaauagcaguauguaaaguacuacaccuagaaggagaagucaacaaaaucaaaaaugcacuacuaaguacaaacaaagcuguaguaagccuaucagguugcggaguaucaguauuaacauuuaaaguccucgaccuaaaaaauuacauagauaaacaacucuuaccaauacucaauaaacaaaguugcagcaucagcaacauagaaacagucaucgaauuucaacaaaaaaauaauagacuccuagaaauaacacgugaauuuucaguaaaugcuggaguaacaacaccaguaucuacauauaugcuaacaaauagcgaacuacucucacuuauuaacgauaugcccauaacaaacgaccaaaaaaaacuuaugucaaacaauguucaaauaguuagacaacaauccuacagcauaaugugcauaaucaaagaagaaguucuagcuuacguaguacaacuaccacucuaugguguuaucgacacccccuguuggaaacuucacacaucaccacuaugcacaacaaacacaaaagaaggaucaaauauuugcuuaacaagaacagauagaggaugguauugcgauaaugccggaucaguaucauuuuuuccacaagcagaaacauguaaaguacaauccaaccgaguauuuugcgacaccaugaacuccagaacacuaccaucugaagucaaccuauguaauauagauauauuuaacccaaaauaugacuguaaaaucaugacaucaaaaacugauguaaguucuaguguaauaaccagcuuaggcgccauaguaagcuguuacgguaaaacaaaaugcacagcaagcaacaaaugccgcgguauaauaaaaacauucucaaacggaugcgauuauguaaguaacaaaggaguagauacagucuccguaggcaacacauuauacuacguaaacaaacaagaaggaaaaucacuauauguaaaaggagaaccaaucauaaauuucuacgacccacuuguauuccccagcgacgaauuugaugcuuccauuucacaagucaacgaaaaaauaaaccaaucauuagccuucauaagaaaaucagacgaauuauuacauaauguuaaugucggcaaauccacaacuaauauaaugauaacaacaaucauaauaguaauaaucguuauacuacuauuacucauagcaguaggacucuucuuauauuguaaagccagauccaccccaguaacacucucaaaagaccaauuaucaggaauuaauaacaucgcauuuucaaacuaaggacuaguggaagcauuuuccuggcugauuaaaagaaauuacucagcuauggucaucuguuccuguuagaaggcuaugcagcauauuauauacuaugcgcauguuaugaaaugcauaauaaaaaauuuuaaaaaaucuaaaagaucuaaaaaaaaaaaaaaaaaaaaaaaaaaaaaaaaaaaaaaaaaaaaaaaaaaaaaaaaaaaaaaaaugcaucccccccccccccccccccccccccccccccaaaggcucuuuucagagccaccagaauu

SEQ ID NO: 17124 - RNA, 1976 nt, Artificial Sequence
  mRNA product Design f-2 comprising derived and/or modified sequence from HRSV(Memphis-37)__AIY60640.1__F_DSCav1_mut5 (opt11)
gggagagcggcucggccauuuugucccagucaguccggaggcugcggcugcagaaguaccgccugcggaguaacugcaaagaagcuuaccauggaacuccccauccuuaaaaccaacgcaaucaccacaauacucgccgccgucacccucugcuuugcguccucccagaacaucaccgaagaguucuaccaaucgaccugcagcgccgucagcaagggcuaccucucagcccuccgaacaggcugguacacauccgucaucaccaucgaacucucaaacauaaaagaaaacaaguguaacggcaccgacgcgaaaguuaaacucaucaaacaagaacucgauaaauacaaaaacgcaguaaccgaacuacaacuccuaaugcaauccacacccgcagccggcagcggcuccgcaaucgccuccggcauagcagucugcaaaguccuccaccucgaaggagaagucaauaaaaucaaaaacgcccuccuauccaccaacaaagcgguugucucccuguccggaugcggaguuagcguccuaaccuucaaggugcucgaccucaaaaacuacauagacaaacaacuacuccccauacucaacaaacaaucaugcuccaucagcaacaucgagaccgucaucgaguuccaacagaaaaacaaccgccuccucgaaaucacacgagaguucuccguaaacgccggcgucacaacccccguuuccacuuacaugcucacaaacagcgaacuccucucccucaucaacgacaugccaaucaccaacgaccaaaagaaacucauguccaacaacguccaaaucguccgccaacaaagcuacagcauaaugugcaucauaaaagaagaaguacucgcguacguaguccaacuaccccuauacggcgucaucgacacccccugcuggaaacugcacacuucuccccucuguacaaccaacacuaaagaaggcucgaacaucugccucaccagaacagaccgaggaugguacugcgacaacgccggcuccgucagcuucuucccccaggccgaaacaugcaaaguacaaucaaaccgagucuucugcgacacaaugaacagcagaacucuacccuccgaaguuaaccuaugcaacaucgacaucuucaaccccaaauacgacugcaaaauaaugaccucaaaaacagacguguccagcuccguuaucaccucucucggagccaucguauccuguuauggaaaaaccaaaugcaccgccucaaacaaaugccgaggcauaaucaaaacauucucaaauggaugcgacuacguauccaacaaaggagucgacaccgucagcgugggcaauacccucuacuacgucaacaaacaggaagggaaaucccucuauguaaagggcgagcccauuauuaacuucuaugacccccucguguucccaagcgacgaguucgacgccuccauaucacaagucaaugagaaaaucaaccaaucacuagcuuucauucgcaaauccgacgaacuccuucacaacgucaacgucggcaaauccaccaccaacaucaugaucaccaccauaauuaucgucauuaucgucauacuacuccuacucaucgccgucggccucuuccucuauugcaaagcacgcucgacacccgucacccuuucaaaagaccaacuuuccggcauaaacaacauagccuucagcaacuagggacuaguggaagcauuuuccuggcugauuaaaagaaauuacucagcuauggucaucuguuccuguuagaaggcuaugcagcauauuauauacuaugcgcauguuaugaaaugcauaauaaaaaauuuuaaaaaaucuaaaagaucuaaaaaaaaaaaaaaaaaaaaaaaaaaaaaaaaaaaaaaaaaaaaaaaaaaaaaaaaaaaaaaaaugcaucccccccccccccccccccccccccccccccaaaggcucuuuucagagccaccagaauu

SEQ ID NO: 17125 - RNA, 1967 nt, Artificial Sequence
  mRNA product Design f-3 comprising derived and/or modified sequence from HRSV(Memphis-37)__AIY60640.1__F_DSCav1_mut5 (opt1)
gggagagucccgcagucggcguccagcggcucugcuuguucgugugugugucguugcaggccuuauucaagcuuaccauggagcugcccauccucaagaccaacgccaucaccacgauccuggccgcggugacccugugcuucgccagcucccagaacaucaccgaggaguucuaccagagcacgugcuccgccgucagcaagggcuaccucuccgcccugcgcaccgggugguacaccagcgugaucaccaucgagcuguccaacaucaaggagaacaagugcaacggcaccgacgccaaggugaagcucaucaagcaggagcuggacaaguacaagaacgcggucacggagcugcagcuccugaugcagagcaccccggccgccggcuccgggagcgcgaucgccuccggcaucgccgucugcaaggugcugcaccucgagggcgaggugaacaagaucaagaacgcccugcuguccaccaacaaggccgucgugagccucuccggcugcggggugagcguccugaccuucaaggugcuggaccucaagaacuacaucgacaagcagcugcugcccauccugaacaagcagagcugcuccaucagcaacaucgagaccgucaucgaguuccagcagaagaacaaccgccuccuggagaucacgcgggaguucagcgugaacgcgggcgugaccacccccgucuccaccuacaugcugacgaacagcgagcuccugucccugaucaacgacaugccgaucaccaacgaccagaagaagcucaugagcaacaacgugcagaucgugcgccagcaguccuacagcaucaugugcaucaucaaggaggagguccuggccuacguggugcagcugccccucuacggggucaucgacacccccugcuggaagcugcacaccagcccccugugcacgaccaacaccaaggagggcuccaacaucugccucacccggacggaccgcgggugguacugcgacaacgccggcagcguguccuucuucccgcaggccgagaccugcaagguccagagcaaccggguguucugcgacaccaugaacucccggacccugcccagcgaggugaaccucugcaacaucgacaucuucaaccccaaguacgacugcaagaucaugacguccaagaccgacgucagcuccagcgugaucaccucccugggcgccaucgugagcugcuacgggaagaccaagugcacggcgagcaacaagugccgcggcaucaucaagaccuucuccaacgggugcgacuacgucagcaacaagggcguggacaccguguccgucggcaacacccuguacuacgugaacaagcaggagggcaagagccucuacgugaagggggagcccaucaucaacuucuacgacccgcuggucuuccccuccgacgaguucgacgccagcaucucccaggugaacgagaagaucaaccagagccuggccuucauccggaaguccgacgagcuccugcacaacgugaacgucggcaagagcaccacgaacaucaugaucaccaccaucaucaucgugaucaucgugauccugcugcuccugaucgccgucgggcuguuccucuacugcaaggcccgcuccacccccgugacgcugagcaaggaccagcuguccgggaucaacaacaucgcguucagcaacugaggacuaguacuggcugcaucucccuuuccucuguccuccauccuucucccaggauggugaagggggaccugguacccagugauccccaccccaggauccuaaaucaugacuuaccugcuaauaaaaacucauuggaaaagugagaagaucuaaaaaaaaaaaaaaaaaaaaaaaaaaaaaaaaaaaaaaaaaaaaaaaaaaaaaaaaaaaaaaaaugcaucccccccccccccccccccccccccccccccaaaggcucuuuucagagccaccagaauu

SEQ ID NO: 17126 - RNA, 1967 nt, Artificial Sequence
  mRNA product Design f-3 comprising derived and/or modified sequence from HRSV(Memphis-37)__AIY60640.1__F_DSCav1_mut5 (opt1)
gggagagucccgcagucggcguccagcggcucugcuuguucgugugugugucguugcaggccuuauucaagcuuaccauggagcugcccauccucaagaccaacgccaucaccacgauccuggccgcggugacccugugcuucgccagcucccagaacaucaccgaggaguucuaccagagcacgugcuccgccgucagcaagggcuaccucuccgcccugcgcaccgggugguacaccagcgugaucaccaucgagcuguccaacaucaaggagaacaagugcaacggcaccgacgccaaggugaagcucaucaagcaggagcuggacaaguacaagaacgcggucacggagcugcagcuccugaugcagagcaccccggccgccggguccggcagcgccaucgcguccgggaucgccgugugcaaggugcugcaccucgagggcgaggucaacaagaucaagaacgcccugcugagcaccaacaaggccguggugucccucagcggcugcggggucuccgugcugaccuucaaggugcuggaccucaagaacuacaucgacaagcagcugcugcccauccucaacaagcagagcugcuccaucagcaacaucgagacggucaucgaguuccagcagaagaacaaccggcugcuggagaucacccgcgaguucuccgugaacgccggcgugaccacccccgucagcacguacaugcucaccaacagcgagcugcugucccucaucaacgacaugcccaucaccaacgaccagaagaagcugaugagcaacaacgugcagaucgugcggcagcaguccuacagcaucaugugcaucaucaaggaggagguccuggcguacguggugcagcucccgcuguacggggucaucgacacccccugcuggaagcugcacacgagcccccucugcaccaccaacaccaaggagggcuccaacaucugccugacgcgcaccgaccgggggugguacugcgacaacgccggcuccgugagcuucuucccccaggccgagaccugcaaggugcaguccaaccgcgucuucugcgacaccaugaacagccggacgcucccguccgaggugaaccugugcaacaucgacaucuucaaccccaaguacgacugcaagaucaugaccagcaagaccgacgucuccagcuccgugaucaccagccugggcgccaucguguccugcuacgggaagacgaagugcaccgccagcaacaagugccggggcaucaucaagaccuucuccaacgggugcgacuacgucagcaacaagggcguggacaccgugagcgucggcaacacgcucuacuacgugaacaagcaggaggggaagucccuguacgugaagggcgagcccaucaucaacuucuacgacccccuggucuucccgagcgacgaguucgacgcguccaucagccaggugaacgagaagaucaaccagucccucgccuucauccgcaagagcgacgagcugcugcacaacgugaacgucgggaaguccaccaccaacaucaugaucaccaccaucaucaucgugaucaucgugauccuccugcugcucaucgccgucggccuguuccuguacugcaaggcccggagcacgcccgugacccuguccaaggaccagcucagcgggaucaacaacaucgccuucuccaacugaggacuaguacuggcugcaucucccuuuccucuguccuccauccuucucccaggauggugaagggggaccugguacccagugauccccaccccaggauccuaaaucaugacuuaccugcuaauaaaaacucauuggaaaagugagaagaucuaaaaaaaaaaaaaaaaaaaaaaaaaaaaaaaaaaaaaaaaaaaaaaaaaaaaaaaaaaaaaaaaugcaucccccccccccccccccccccccccccccccaaaggcucuuuucagagccaccagaauu

SEQ ID NO: 17127 - RNA, 1967 nt, Artificial Sequence
  mRNA product Design f-3 comprising derived and/or modified sequence from HRSV(Memphis-37)__AIY60640.1__F_DSCav1_mut5 (opt2)
gggagagucccgcagucggcguccagcggcucugcuuguucgugugugugucguugcaggccuuauucaagcuuaccauggagcuccccauccucaagaccaacgccaucaccaccauccucgccgccgucacccucugcuucgccuccucccagaacaucaccgaggaguucuaccaguccaccugcuccgccgucuccaagggcuaccucuccgcccuccgcaccggcugguacaccuccgucaucaccaucgagcucuccaacaucaaggagaacaagugcaacggcaccgacgccaaggucaagcucaucaagcaggagcucgacaaguacaagaacgccgucaccgagcuccagcuccucaugcaguccacccccgccgccggcuccggcuccgccaucgccuccggcaucgccgucugcaagguccuccaccucgagggcgaggucaacaagaucaagaacgcccuccucuccaccaacaaggccgucgucucccucuccggcugcggcgucuccguccucaccuucaagguccucgaccucaagaacuacaucgacaagcagcuccuccccauccucaacaagcaguccugcuccaucuccaacaucgagaccgucaucgaguuccagcagaagaacaaccgccuccucgagaucacccgcgaguucuccgucaacgccggcgucaccacccccgucuccaccuacaugcucaccaacuccgagcuccucucccucaucaacgacaugcccaucaccaacgaccagaagaagcucauguccaacaacguccagaucguccgccagcaguccuacuccaucaugugcaucaucaaggaggagguccucgccuacgucguccagcucccccucuacggcgucaucgacacccccugcuggaagcuccacaccuccccccucugcaccaccaacaccaaggagggcuccaacaucugccucacccgcaccgaccgcggcugguacugcgacaacgccggcuccgucuccuucuucccccaggccgagaccugcaagguccaguccaaccgcgucuucugcgacaccaugaacucccgcacccuccccuccgaggucaaccucugcaacaucgacaucuucaaccccaaguacgacugcaagaucaugaccuccaagaccgacgucuccuccuccgucaucaccucccucggcgccaucgucuccugcuacggcaagaccaagugcaccgccuccaacaagugccgcggcaucaucaagaccuucuccaacggcugcgacuacgucuccaacaagggcgucgacaccgucuccgucggcaacacccucuacuacgucaacaagcaggagggcaagucccucuacgucaagggcgagcccaucaucaacuucuacgacccccucgucuuccccuccgacgaguucgacgccuccaucucccaggucaacgagaagaucaaccagucccucgccuucauccgcaaguccgacgagcuccuccacaacgucaacgucggcaaguccaccaccaacaucaugaucaccaccaucaucaucgucaucaucgucauccuccuccuccucaucgccgucggccucuuccucuacugcaaggcccgcuccacccccgucacccucuccaaggaccagcucuccggcaucaacaacaucgccuucuccaacugaggacuaguacuggcugcaucucccuuuccucuguccuccauccuucucccaggauggugaagggggaccugguacccagugauccccaccccaggauccuaaaucaugacuuaccugcuaauaaaaacucauuggaaaagugagaagaucuaaaaaaaaaaaaaaaaaaaaaaaaaaaaaaaaaaaaaaaaaaaaaaaaaaaaaaaaaaaaaaaaugcaucccccccccccccccccccccccccccccccaaaggcucuuuucagagccaccagaauu

SEQ ID NO: 17128 - RNA, 1967 nt, Artificial Sequence
  mRNA product Design f-3 comprising derived and/or modified sequence from HRSV(Memphis-37)__AIY60640.1__F_DSCav1_mut5 (opt3)
gggagagucccgcagucggcguccagcggcucugcuuguucgugugugugucguugcaggccuuauucaagcuuaccauggagcugcccauccucaagaccaacgccauuacaacuauacuugcugcagugacgcugugcuucgccagcucccagaauaucaccgaagaguuuuaccaaucuacauguucagcggucaguaaaggcuauuugagcgcuuuaagaacugggugguacaccuccguuauuacaaucgaacugucuaacauuaaggagaauaaaugcaacggaaccgacgccaaggugaaacuaaucaagcaggaacucgauaaguauaaaaaugcaguaacugagcugcagcuucugaugcagucgaccccugccgcugguucaggcagcgcaauagccagugggaucgcuguguguaaggucuugcaccucgagggagaagugaacaaaauuaagaaugcccugcuguccacaaacaaagcgguugugucucucagcggcugcggugucuccguguuaacguucaagguacuggaccuuaagaauuacaucgauaaacaauugcugccaauucuaaacaagcagucauguaguaucagcaauauagagacuguuauugaauuucagcagaaaaacaauaggcuccuggagaucacccgggaguucucugugaacgcaggggucacaacuccgguguccaccuauaugcuuacaaauucagaacuguugagccucauuaacgacaugcccaucaccaacgaucaaaagaaacugaugaguaauaacgugcagaucguccgccagcagucuuacuccauuaugugcauaaucaaggaggaaguuuuagccuaugugguacaacugccucucuacggagugauugacacgccauguuggaaacuucauacuagcccccugugcacaaccaauacuaaggagggcucgaacaucuguuugacacgaaccgaucguggcugguacugcgacaaugcugggucugucuccuuuuucccucaggccgaaacguguaaggugcagucaaacagaguguuuugcgauaccaugaauaguagaacacugccaagcgaggugaaccucugcaauauagacauuuucaaccccaaauaugauuguaagaucaugacuuccaaaaccgacgucucuagcucagugaucacaagucugggagcaauuguauccugcuacgguaagacuaaauguaccgcuagcaauaagugcaggggcaucauuaagacauuuucuaacgggugugauuauguuucaaauaaaggaguggacaccgucagugugggcaacacucuuuacuaugucaauaagcaagaggguaaaagccuguacgugaagggggaaccuauaaucaacuucuaugacccauugguuuuuccguccgaugaguucgacgccucuauuucgcagguuaacgagaaaaucaaucagagccucgcguuuauccggaaguccgaugaacuguuacacaacguaaaugucggaaagucaacgacaaacauuaugauaaccacuaucauuaucgugauuaucguuauacugcuacuccugaucgccgugggccuuuucuuguacugcaaagcacgcaguacccccgucacacugucuaaggaccagcucagcggcauuaauaacaucgcuuucuccaauugaggacuaguacuggcugcaucucccuuuccucuguccuccauccuucucccaggauggugaagggggaccugguacccagugauccccaccccaggauccuaaaucaugacuuaccugcuaauaaaaacucauuggaaaagugagaagaucuaaaaaaaaaaaaaaaaaaaaaaaaaaaaaaaaaaaaaaaaaaaaaaaaaaaaaaaaaaaaaaaaugcaucccccccccccccccccccccccccccccccaaaggcucuuuucagagccaccagaauu

SEQ ID NO: 17129 - RNA, 1967 nt, Artificial Sequence
  mRNA product Design f-3 comprising derived and/or modified sequence from HRSV(Memphis-37)__AIY60640.1__F_DSCav1_mut5 (opt4)
gggagagucccgcagucggcguccagcggcucugcuuguucgugugugugucguugcaggccuuauucaagcuuaccauggagcugcccauccugaagaccaacgccaucaccaccauccuggccgccgugacccugugcuucgccagcagccagaacaucaccgaggaguucuaccagagcaccugcagcgccgugagcaagggcuaccugagcgcccugagaaccggcugguacaccagcgugaucaccaucgagcugagcaacaucaaggagaacaagugcaacggcaccgacgccaaggugaagcugaucaagcaggagcuggacaaguacaagaacgccgugaccgagcugcagcugcugaugcagagcacccccgccgccggcagcggcagcgccaucgccagcggcaucgccgugugcaaggugcugcaccuggagggcgaggugaacaagaucaagaacgcccugcugagcaccaacaaggccguggugagccugagcggcugcggcgugagcgugcugaccuucaaggugcuggaccugaagaacuacaucgacaagcagcugcugcccauccugaacaagcagagcugcagcaucagcaacaucgagaccgugaucgaguuccagcagaagaacaacagacugcuggagaucaccagagaguucagcgugaacgccggcgugaccacccccgugagcaccuacaugcugaccaacagcgagcugcugagccugaucaacgacaugcccaucaccaacgaccagaagaagcugaugagcaacaacgugcagaucgugagacagcagagcuacagcaucaugugcaucaucaaggaggaggugcuggccuacguggugcagcugccccuguacggcgugaucgacacccccugcuggaagcugcacaccagcccccugugcaccaccaacaccaaggagggcagcaacaucugccugaccagaaccgacagaggcugguacugcgacaacgccggcagcgugagcuucuucccccaggccgagaccugcaaggugcagagcaacagaguguucugcgacaccaugaacagcagaacccugcccagcgaggugaaccugugcaacaucgacaucuucaaccccaaguacgacugcaagaucaugaccagcaagaccgacgugagcagcagcgugaucaccagccugggcgccaucgugagcugcuacggcaagaccaagugcaccgccagcaacaagugcagaggcaucaucaagaccuucagcaacggcugcgacuacgugagcaacaagggcguggacaccgugagcgugggcaacacccuguacuacgugaacaagcaggagggcaagagccuguacgugaagggcgagcccaucaucaacuucuacgacccccugguguuccccagcgacgaguucgacgccagcaucagccaggugaacgagaagaucaaccagagccuggccuucaucagaaagagcgacgagcugcugcacaacgugaacgugggcaagagcaccaccaacaucaugaucaccaccaucaucaucgugaucaucgugauccugcugcugcugaucgccgugggccuguuccuguacugcaaggccagaagcacccccgugacccugagcaaggaccagcugagcggcaucaacaacaucgccuucagcaacugaggacuaguacuggcugcaucucccuuuccucuguccuccauccuucucccaggauggugaagggggaccugguacccagugauccccaccccaggauccuaaaucaugacuuaccugcuaauaaaaacucauuggaaaagugagaagaucuaaaaaaaaaaaaaaaaaaaaaaaaaaaaaaaaaaaaaaaaaaaaaaaaaaaaaaaaaaaaaaaaugcaucccccccccccccccccccccccccccccccaaaggcucuuuucagagccaccagaauu

SEQ ID NO: 17130 - RNA, 1967 nt, Artificial Sequence
  mRNA product Design f-3 comprising derived and/or modified sequence from HRSV(Memphis-37)__AIY60640.1__F_DSCav1_mut5 (opt5)
gggagagucccgcagucggcguccagcggcucugcuuguucgugugugugucguugcaggccuuauucaagcuuaccauggagcugcccauccucaagaccaacgccauuacaacgauccuggcugccgugacccuuugcuucgcgagcucccagaauauuacagaagaguuuuaccaaucuaccuguagcgcugucuccaaaggcuaucugucugcccucagaacagggugguacaccagcguuaucacaauugaacuguccaacaucaaggagaauaaaugcaacggaaccgacgccaaggugaaacuuaucaagcaggaacuggauaaguauaaaaaugcugugacggagcuccagcugcugaugcagucuaccccugccgcuggcagcggguccgccauugcgagcggaaucgccgucuguaaggugcuccaccuggagggcgaaguuaacaaaauuaagaaugcccuucugucuacaaacaaagcuguggucucccucagcgggugcggagugucuguucugaccuucaaggugcuugaccugaagaauuacaucgauaaacaacuccugccgauucugaacaagcaguccuguagcaucucuaauauugagacagucaucgaauuucagcagaaaaacaaucggcuccuggagaucacccgcgaguucuccgugaacgcuggcgugacgacacccgucagcaccuauaugcuuacaaauuccgaacugcucucucugauuaacgacaugccuaucaccaacgaucaaaagaaacuuaugagcaauaacguucagauugugagacagcaguccuacagcaucaugugcauuaucaaggaggaagugcuggccuaugucgugcaacucccccuguacggcguuaucgacaccccuuguuggaaacugcauacaucuccccucugcacgaccaauacaaaggagggguccaacauuugucugacccggacagaucgcggaugguacugcgacaaugcgggcagcgugagcuuuuucccucaggccgaaaccuguaagguccagucuaacagaguguuuugcgauacgaugaacuccagaacacugccgucugagguuaaucucugcaauaucgacauuuucaaccccaaauaugauuguaagaucaugaccagcaaaaccgacguguccagcucugucauuacaucccugggggcuaucgugagcugcuacggaaagaccaaauguacagccucuaauaagugccggggcaucauuaagacguuuuccaacgggugugauuaugucagcaauaaaggaguggacaccguuuccgugggcaacacacuuuacuaugucaauaagcaagagggcaaaucucuguacgugaagggggaaccuaucauuaacuucuaugacccccucguuuuuccuagcgaugaguucgacgcuuccaucucucaggugaacgagaaaauuaaucagagccuggccuuuauccgcaaguccgaugaacugcuccacaacgucaaugugggaaagagcaccacaaacauuaugaucaccacgaucauuaucgugauuaucguuauucugcuucugcucaucgccgucggccuguuccuguacugcaaagcuagaucuacccccgugacacuuuccaaggaccagcucagcgggaucaauaacauugcguucucuaauugaggacuaguacuggcugcaucucccuuuccucuguccuccauccuucucccaggauggugaagggggaccugguacccagugauccccaccccaggauccuaaaucaugacuuaccugcuaauaaaaacucauuggaaaagugagaagaucuaaaaaaaaaaaaaaaaaaaaaaaaaaaaaaaaaaaaaaaaaaaaaaaaaaaaaaaaaaaaaaaaugcaucccccccccccccccccccccccccccccccaaaggcucuuuucagagccaccagaauu

SEQ ID NO: 17131 - RNA, 1967 nt, Artificial Sequence
  mRNA product Design f-3 comprising derived and/or modified sequence from HRSV(Memphis-37)__AIY60640.1__F_DSCav1_mut5 (opt6)
gggagagucccgcagucggcguccagcggcucugcuuguucgugugugugucguugcaggccuuauucaagcuuaccauggaacucccaaucuuaaaaacaaacgcaauaacuacaauacucgcagcaguaacacuaugcuucgcaucaucacaaaacauaaccgaagaauuuuaccaaaguacaugcucagcaguaucaaaagguuaccucucagcccuaagaaccggaugguacacaucaguaaucacuauagaacuauccaauauaaaagaaaacaaaugcaacggcacugacgcaaaaguuaaauuaauuaaacaagaacucgauaaauauaaaaaugcaguaacagaacuacaacuacuaaugcaaagcaccccagcugcaggaagcggaucagcaaucgcaucaggaauagcaguauguaaaguacuacaccuagaaggagaagucaacaaaaucaaaaaugcacuacuaaguacaaacaaagcuguaguaagccuaucagguugcggaguaucaguauuaacauuuaaaguccucgaccuaaaaaauuacauagauaaacaacucuuaccaauacucaauaaacaaaguugcagcaucagcaacauagaaacagucaucgaauuucaacaaaaaaauaauagacuccuagaaauaacacgugaauuuucaguaaaugcuggaguaacaacaccaguaucuacauauaugcuaacaaauagcgaacuacucucacuuauuaacgauaugcccauaacaaacgaccaaaaaaaacuuaugucaaacaauguucaaauaguuagacaacaauccuacagcauaaugugcauaaucaaagaagaaguucuagcuuacguaguacaacuaccacucuaugguguuaucgacacccccuguuggaaacuucacacaucaccacuaugcacaacaaacacaaaagaaggaucaaauauuugcuuaacaagaacagauagaggaugguauugcgauaaugccggaucaguaucauuuuuuccacaagcagaaacauguaaaguacaauccaaccgaguauuuugcgacaccaugaacuccagaacacuaccaucugaagucaaccuauguaauauagauauauuuaacccaaaauaugacuguaaaaucaugacaucaaaaacugauguaaguucuaguguaauaaccagcuuaggcgccauaguaagcuguuacgguaaaacaaaaugcacagcaagcaacaaaugccgcgguauaauaaaaacauucucaaacggaugcgauuauguaaguaacaaaggaguagauacagucuccguaggcaacacauuauacuacguaaacaaacaagaaggaaaaucacuauauguaaaaggagaaccaaucauaaauuucuacgacccacuuguauuccccagcgacgaauuugaugcuuccauuucacaagucaacgaaaaaauaaaccaaucauuagccuucauaagaaaaucagacgaauuauuacauaauguuaaugucggcaaauccacaacuaauauaaugauaacaacaaucauaauaguaauaaucguuauacuacuauuacucauagcaguaggacucuucuuauauuguaaagccagauccaccccaguaacacucucaaaagaccaauuaucaggaauuaauaacaucgcauuuucaaacuaaggacuaguacuggcugcaucucccuuuccucuguccuccauccuucucccaggauggugaagggggaccugguacccagugauccccaccccaggauccuaaaucaugacuuaccugcuaauaaaaacucauuggaaaagugagaagaucuaaaaaaaaaaaaaaaaaaaaaaaaaaaaaaaaaaaaaaaaaaaaaaaaaaaaaaaaaaaaaaaaugcaucccccccccccccccccccccccccccccccaaaggcucuuuucagagccaccagaauu

SEQ ID NO: 17132 - RNA, 1967 nt, Artificial Sequence
  mRNA product Design f-3 comprising derived and/or modified sequence from HRSV(Memphis-37)__AIY60640.1__F_DSCav1_mut5 (opt11)
gggagagucccgcagucggcguccagcggcucugcuuguucgugugugugucguugcaggccuuauucaagcuuaccauggaacuccccauccuuaaaaccaacgcaaucaccacaauacucgccgccgucacccucugcuuugcguccucccagaacaucaccgaagaguucuaccaaucgaccugcagcgccgucagcaagggcuaccucucagcccuccgaacaggcugguacacauccgucaucaccaucgaacucucaaacauaaaagaaaacaaguguaacggcaccgacgcgaaaguuaaacucaucaaacaagaacucgauaaauacaaaaacgcaguaaccgaacuacaacuccuaaugcaauccacacccgcagccggcagcggcuccgcaaucgccuccggcauagcagucugcaaaguccuccaccucgaaggagaagucaauaaaaucaaaaacgcccuccuauccaccaacaaagcgguugucucccuguccggaugcggaguuagcguccuaaccuucaaggugcucgaccucaaaaacuacauagacaaacaacuacuccccauacucaacaaacaaucaugcuccaucagcaacaucgagaccgucaucgaguuccaacagaaaaacaaccgccuccucgaaaucacacgagaguucuccguaaacgccggcgucacaacccccguuuccacuuacaugcucacaaacagcgaacuccucucccucaucaacgacaugccaaucaccaacgaccaaaagaaacucauguccaacaacguccaaaucguccgccaacaaagcuacagcauaaugugcaucauaaaagaagaaguacucgcguacguaguccaacuaccccuauacggcgucaucgacacccccugcuggaaacugcacacuucuccccucuguacaaccaacacuaaagaaggcucgaacaucugccucaccagaacagaccgaggaugguacugcgacaacgccggcuccgucagcuucuucccccaggccgaaacaugcaaaguacaaucaaaccgagucuucugcgacacaaugaacagcagaacucuacccuccgaaguuaaccuaugcaacaucgacaucuucaaccccaaauacgacugcaaaauaaugaccucaaaaacagacguguccagcuccguuaucaccucucucggagccaucguauccuguuauggaaaaaccaaaugcaccgccucaaacaaaugccgaggcauaaucaaaacauucucaaauggaugcgacuacguauccaacaaaggagucgacaccgucagcgugggcaauacccucuacuacgucaacaaacaggaagggaaaucccucuauguaaagggcgagcccauuauuaacuucuaugacccccucguguucccaagcgacgaguucgacgccuccauaucacaagucaaugagaaaaucaaccaaucacuagcuuucauucgcaaauccgacgaacuccuucacaacgucaacgucggcaaauccaccaccaacaucaugaucaccaccauaauuaucgucauuaucgucauacuacuccuacucaucgccgucggccucuuccucuauugcaaagcacgcucgacacccgucacccuuucaaaagaccaacuuuccggcauaaacaacauagccuucagcaacuagggacuaguacuggcugcaucucccuuuccucuguccuccauccuucucccaggauggugaagggggaccugguacccagugauccccaccccaggauccuaaaucaugacuuaccugcuaauaaaaacucauuggaaaagugagaagaucuaaaaaaaaaaaaaaaaaaaaaaaaaaaaaaaaaaaaaaaaaaaaaaaaaaaaaaaaaaaaaaaaugcaucccccccccccccccccccccccccccccccaaaggcucuuuucagagccaccagaauu

SEQ ID NO: 17133 - RNA, 2183 nt, Artificial Sequence
  mRNA product Design f-4 comprising derived and/or modified sequence from HRSV(Memphis-37)__AIY60640.1__F_DSCav1_mut5 (opt1)
gggagagucccgcagucggcguccagcggcucugcuuguucgugugugugucguugcaggccuuauucaagcuuaccauggagcugcccauccucaagaccaacgccaucaccacgauccuggccgcggugacccugugcuucgccagcucccagaacaucaccgaggaguucuaccagagcacgugcuccgccgucagcaagggcuaccucuccgcccugcgcaccgggugguacaccagcgugaucaccaucgagcuguccaacaucaaggagaacaagugcaacggcaccgacgccaaggugaagcucaucaagcaggagcuggacaaguacaagaacgcggucacggagcugcagcuccugaugcagagcaccccggccgccggcuccgggagcgcgaucgccuccggcaucgccgucugcaaggugcugcaccucgagggcgaggugaacaagaucaagaacgcccugcuguccaccaacaaggccgucgugagccucuccggcugcggggugagcguccugaccuucaaggugcuggaccucaagaacuacaucgacaagcagcugcugcccauccugaacaagcagagcugcuccaucagcaacaucgagaccgucaucgaguuccagcagaagaacaaccgccuccuggagaucacgcgggaguucagcgugaacgcgggcgugaccacccccgucuccaccuacaugcugacgaacagcgagcuccugucccugaucaacgacaugccgaucaccaacgaccagaagaagcucaugagcaacaacgugcagaucgugcgccagcaguccuacagcaucaugugcaucaucaaggaggagguccuggccuacguggugcagcugccccucuacggggucaucgacacccccugcuggaagcugcacaccagcccccugugcacgaccaacaccaaggagggcuccaacaucugccucacccggacggaccgcgggugguacugcgacaacgccggcagcguguccuucuucccgcaggccgagaccugcaagguccagagcaaccggguguucugcgacaccaugaacucccggacccugcccagcgaggugaaccucugcaacaucgacaucuucaaccccaaguacgacugcaagaucaugacguccaagaccgacgucagcuccagcgugaucaccucccugggcgccaucgugagcugcuacgggaagaccaagugcacggcgagcaacaagugccgcggcaucaucaagaccuucuccaacgggugcgacuacgucagcaacaagggcguggacaccguguccgucggcaacacccuguacuacgugaacaagcaggagggcaagagccucuacgugaagggggagcccaucaucaacuucuacgacccgcuggucuuccccuccgacgaguucgacgccagcaucucccaggugaacgagaagaucaaccagagccuggccuucauccggaaguccgacgagcuccugcacaacgugaacgucggcaagagcaccacgaacaucaugaucaccaccaucaucaucgugaucaucgugauccugcugcuccugaucgccgucgggcuguuccucuacugcaaggcccgcuccacccccgugacgcugagcaaggaccagcuguccgggaucaacaacaucgcguucagcaacugaggacuagugaagggaacacccaaauuuaauucagccuuaagcacaauuaauuaagagugaaacguaauuguacaagcaguuggucacccaccauagggcaugaucaacaccgcaaccuuuccuuuuucccccagugauucugaaaaaccccucuucccuucagcuugcuuagauguuccaaauuuaguaagcuuaaggcggccuacagaagaaaaagaaaaaaaaggccacaaaaguucccucucacuuucaguaaauaaaauaaaagcagcaacagaaauaaagaaauaaaugaaauucaaaaugaaauaaauauuguguugugcagcauuaaaaaaucaauaaaaauuaaaaaugagcaagaucuaaaaaaaaaaaaaaaaaaaaaaaaaaaaaaaaaaaaaaaaaaaaaaaaaaaaaaaaaaaaaaaaugcaucccccccccccccccccccccccccccccccaaaggcucuuuucagagccaccagaauu

SEQ ID NO: 17134 - RNA, 2183 nt, Artificial Sequence
  mRNA product Design f-4 comprising derived and/or modified sequence from HRSV(Memphis-37)__AIY60640.1__F_DSCav1_mut5 (opt1)
gggagagucccgcagucggcguccagcggcucugcuuguucgugugugugucguugcaggccuuauucaagcuuaccauggagcugcccauccucaagaccaacgccaucaccacgauccuggccgcggugacccugugcuucgccagcucccagaacaucaccgaggaguucuaccagagcacgugcuccgccgucagcaagggcuaccucuccgcccugcgcaccgggugguacaccagcgugaucaccaucgagcuguccaacaucaaggagaacaagugcaacggcaccgacgccaaggugaagcucaucaagcaggagcuggacaaguacaagaacgcggucacggagcugcagcuccugaugcagagcaccccggccgccggguccggcagcgccaucgcguccgggaucgccgugugcaaggugcugcaccucgagggcgaggucaacaagaucaagaacgcccugcugagcaccaacaaggccguggugucccucagcggcugcggggucuccgugcugaccuucaaggugcuggaccucaagaacuacaucgacaagcagcugcugcccauccucaacaagcagagcugcuccaucagcaacaucgagacggucaucgaguuccagcagaagaacaaccggcugcuggagaucacccgcgaguucuccgugaacgccggcgugaccacccccgucagcacguacaugcucaccaacagcgagcugcugucccucaucaacgacaugcccaucaccaacgaccagaagaagcugaugagcaacaacgugcagaucgugcggcagcaguccuacagcaucaugugcaucaucaaggaggagguccuggcguacguggugcagcucccgcuguacggggucaucgacacccccugcuggaagcugcacacgagcccccucugcaccaccaacaccaaggagggcuccaacaucugccugacgcgcaccgaccgggggugguacugcgacaacgccggcuccgugagcuucuucccccaggccgagaccugcaaggugcaguccaaccgcgucuucugcgacaccaugaacagccggacgcucccguccgaggugaaccugugcaacaucgacaucuucaaccccaaguacgacugcaagaucaugaccagcaagaccgacgucuccagcuccgugaucaccagccugggcgccaucguguccugcuacgggaagacgaagugcaccgccagcaacaagugccggggcaucaucaagaccuucuccaacgggugcgacuacgucagcaacaagggcguggacaccgugagcgucggcaacacgcucuacuacgugaacaagcaggaggggaagucccuguacgugaagggcgagcccaucaucaacuucuacgacccccuggucuucccgagcgacgaguucgacgcguccaucagccaggugaacgagaagaucaaccagucccucgccuucauccgcaagagcgacgagcugcugcacaacgugaacgucgggaaguccaccaccaacaucaugaucaccaccaucaucaucgugaucaucgugauccuccugcugcucaucgccgucggccuguuccuguacugcaaggcccggagcacgcccgugacccuguccaaggaccagcucagcgggaucaacaacaucgccuucuccaacugaggacuagugaagggaacacccaaauuuaauucagccuuaagcacaauuaauuaagagugaaacguaauuguacaagcaguuggucacccaccauagggcaugaucaacaccgcaaccuuuccuuuuucccccagugauucugaaaaaccccucuucccuucagcuugcuuagauguuccaaauuuaguaagcuuaaggcggccuacagaagaaaaagaaaaaaaaggccacaaaaguucccucucacuuucaguaaauaaaauaaaagcagcaacagaaauaaagaaauaaaugaaauucaaaaugaaauaaauauuguguugugcagcauuaaaaaaucaauaaaaauuaaaaaugagcaagaucuaaaaaaaaaaaaaaaaaaaaaaaaaaaaaaaaaaaaaaaaaaaaaaaaaaaaaaaaaaaaaaaaugcaucccccccccccccccccccccccccccccccaaaggcucuuuucagagccaccagaauu

SEQ ID NO: 17135 - RNA, 2183 nt, Artificial Sequence
  mRNA product Design f-4 comprising derived and/or modified sequence from HRSV(Memphis-37)__AIY60640.1__F_DSCav1_mut5 (opt2)
gggagagucccgcagucggcguccagcggcucugcuuguucgugugugugucguugcaggccuuauucaagcuuaccauggagcuccccauccucaagaccaacgccaucaccaccauccucgccgccgucacccucugcuucgccuccucccagaacaucaccgaggaguucuaccaguccaccugcuccgccgucuccaagggcuaccucuccgcccuccgcaccggcugguacaccuccgucaucaccaucgagcucuccaacaucaaggagaacaagugcaacggcaccgacgccaaggucaagcucaucaagcaggagcucgacaaguacaagaacgccgucaccgagcuccagcuccucaugcaguccacccccgccgccggcuccggcuccgccaucgccuccggcaucgccgucugcaagguccuccaccucgagggcgaggucaacaagaucaagaacgcccuccucuccaccaacaaggccgucgucucccucuccggcugcggcgucuccguccucaccuucaagguccucgaccucaagaacuacaucgacaagcagcuccuccccauccucaacaagcaguccugcuccaucuccaacaucgagaccgucaucgaguuccagcagaagaacaaccgccuccucgagaucacccgcgaguucuccgucaacgccggcgucaccacccccgucuccaccuacaugcucaccaacuccgagcuccucucccucaucaacgacaugcccaucaccaacgaccagaagaagcucauguccaacaacguccagaucguccgccagcaguccuacuccaucaugugcaucaucaaggaggagguccucgccuacgucguccagcucccccucuacggcgucaucgacacccccugcuggaagcuccacaccuccccccucugcaccaccaacaccaaggagggcuccaacaucugccucacccgcaccgaccgcggcugguacugcgacaacgccggcuccgucuccuucuucccccaggccgagaccugcaagguccaguccaaccgcgucuucugcgacaccaugaacucccgcacccuccccuccgaggucaaccucugcaacaucgacaucuucaaccccaaguacgacugcaagaucaugaccuccaagaccgacgucuccuccuccgucaucaccucccucggcgccaucgucuccugcuacggcaagaccaagugcaccgccuccaacaagugccgcggcaucaucaagaccuucuccaacggcugcgacuacgucuccaacaagggcgucgacaccgucuccgucggcaacacccucuacuacgucaacaagcaggagggcaagucccucuacgucaagggcgagcccaucaucaacuucuacgacccccucgucuuccccuccgacgaguucgacgccuccaucucccaggucaacgagaagaucaaccagucccucgccuucauccgcaaguccgacgagcuccuccacaacgucaacgucggcaaguccaccaccaacaucaugaucaccaccaucaucaucgucaucaucgucauccuccuccuccucaucgccgucggccucuuccucuacugcaaggcccgcuccacccccgucacccucuccaaggaccagcucuccggcaucaacaacaucgccuucuccaacugaggacuagugaagggaacacccaaauuuaauucagccuuaagcacaauuaauuaagagugaaacguaauuguacaagcaguuggucacccaccauagggcaugaucaacaccgcaaccuuuccuuuuucccccagugauucugaaaaaccccucuucccuucagcuugcuuagauguuccaaauuuaguaagcuuaaggcggccuacagaagaaaaagaaaaaaaaggccacaaaaguucccucucacuuucaguaaauaaaauaaaagcagcaacagaaauaaagaaauaaaugaaauucaaaaugaaauaaauauuguguugugcagcauuaaaaaaucaauaaaaauuaaaaaugagcaagaucuaaaaaaaaaaaaaaaaaaaaaaaaaaaaaaaaaaaaaaaaaaaaaaaaaaaaaaaaaaaaaaaaugcaucccccccccccccccccccccccccccccccaaaggcucuuuucagagccaccagaauu

SEQ ID NO: 17136 - RNA, 2183 nt, Artificial Sequence
  mRNA product Design f-4 comprising derived and/or modified sequence from HRSV(Memphis-37)__AIY60640.1__F_DSCav1_mut5 (opt3)
gggagagucccgcagucggcguccagcggcucugcuuguucgugugugugucguugcaggccuuauucaagcuuaccauggagcugcccauccucaagaccaacgccauuacaacuauacuugcugcagugacgcugugcuucgccagcucccagaauaucaccgaagaguuuuaccaaucuacauguucagcggucaguaaaggcuauuugagcgcuuuaagaacugggugguacaccuccguuauuacaaucgaacugucuaacauuaaggagaauaaaugcaacggaaccgacgccaaggugaaacuaaucaagcaggaacucgauaaguauaaaaaugcaguaacugagcugcagcuucugaugcagucgaccccugccgcugguucaggcagcgcaauagccagugggaucgcuguguguaaggucuugcaccucgagggagaagugaacaaaauuaagaaugcccugcuguccacaaacaaagcgguugugucucucagcggcugcggugucuccguguuaacguucaagguacuggaccuuaagaauuacaucgauaaacaauugcugccaauucuaaacaagcagucauguaguaucagcaauauagagacuguuauugaauuucagcagaaaaacaauaggcuccuggagaucacccgggaguucucugugaacgcaggggucacaacuccgguguccaccuauaugcuuacaaauucagaacuguugagccucauuaacgacaugcccaucaccaacgaucaaaagaaacugaugaguaauaacgugcagaucguccgccagcagucuuacuccauuaugugcauaaucaaggaggaaguuuuagccuaugugguacaacugccucucuacggagugauugacacgccauguuggaaacuucauacuagcccccugugcacaaccaauacuaaggagggcucgaacaucuguuugacacgaaccgaucguggcugguacugcgacaaugcugggucugucuccuuuuucccucaggccgaaacguguaaggugcagucaaacagaguguuuugcgauaccaugaauaguagaacacugccaagcgaggugaaccucugcaauauagacauuuucaaccccaaauaugauuguaagaucaugacuuccaaaaccgacgucucuagcucagugaucacaagucugggagcaauuguauccugcuacgguaagacuaaauguaccgcuagcaauaagugcaggggcaucauuaagacauuuucuaacgggugugauuauguuucaaauaaaggaguggacaccgucagugugggcaacacucuuuacuaugucaauaagcaagaggguaaaagccuguacgugaagggggaaccuauaaucaacuucuaugacccauugguuuuuccguccgaugaguucgacgccucuauuucgcagguuaacgagaaaaucaaucagagccucgcguuuauccggaaguccgaugaacuguuacacaacguaaaugucggaaagucaacgacaaacauuaugauaaccacuaucauuaucgugauuaucguuauacugcuacuccugaucgccgugggccuuuucuuguacugcaaagcacgcaguacccccgucacacugucuaaggaccagcucagcggcauuaauaacaucgcuuucuccaauugaggacuagugaagggaacacccaaauuuaauucagccuuaagcacaauuaauuaagagugaaacguaauuguacaagcaguuggucacccaccauagggcaugaucaacaccgcaaccuuuccuuuuucccccagugauucugaaaaaccccucuucccuucagcuugcuuagauguuccaaauuuaguaagcuuaaggcggccuacagaagaaaaagaaaaaaaaggccacaaaaguucccucucacuuucaguaaauaaaauaaaagcagcaacagaaauaaagaaauaaaugaaauucaaaaugaaauaaauauuguguugugcagcauuaaaaaaucaauaaaaauuaaaaaugagcaagaucuaaaaaaaaaaaaaaaaaaaaaaaaaaaaaaaaaaaaaaaaaaaaaaaaaaaaaaaaaaaaaaaaugcaucccccccccccccccccccccccccccccccaaaggcucuuuucagagccaccagaauu

SEQ ID NO: 17137 - RNA, 2183 nt, Artificial Sequence
  mRNA product Design f-4 comprising derived and/or modified sequence from HRSV(Memphis-37)__AIY60640.1__F_DSCav1_mut5 (opt4)
gggagagucccgcagucggcguccagcggcucugcuuguucgugugugugucguugcaggccuuauucaagcuuaccauggagcugcccauccugaagaccaacgccaucaccaccauccuggccgccgugacccugugcuucgccagcagccagaacaucaccgaggaguucuaccagagcaccugcagcgccgugagcaagggcuaccugagcgcccugagaaccggcugguacaccagcgugaucaccaucgagcugagcaacaucaaggagaacaagugcaacggcaccgacgccaaggugaagcugaucaagcaggagcuggacaaguacaagaacgccgugaccgagcugcagcugcugaugcagagcacccccgccgccggcagcggcagcgccaucgccagcggcaucgccgugugcaaggugcugcaccuggagggcgaggugaacaagaucaagaacgcccugcugagcaccaacaaggccguggugagccugagcggcugcggcgugagcgugcugaccuucaaggugcuggaccugaagaacuacaucgacaagcagcugcugcccauccugaacaagcagagcugcagcaucagcaacaucgagaccgugaucgaguuccagcagaagaacaacagacugcuggagaucaccagagaguucagcgugaacgccggcgugaccacccccgugagcaccuacaugcugaccaacagcgagcugcugagccugaucaacgacaugcccaucaccaacgaccagaagaagcugaugagcaacaacgugcagaucgugagacagcagagcuacagcaucaugugcaucaucaaggaggaggugcuggccuacguggugcagcugccccuguacggcgugaucgacacccccugcuggaagcugcacaccagcccccugugcaccaccaacaccaaggagggcagcaacaucugccugaccagaaccgacagaggcugguacugcgacaacgccggcagcgugagcuucuucccccaggccgagaccugcaaggugcagagcaacagaguguucugcgacaccaugaacagcagaacccugcccagcgaggugaaccugugcaacaucgacaucuucaaccccaaguacgacugcaagaucaugaccagcaagaccgacgugagcagcagcgugaucaccagccugggcgccaucgugagcugcuacggcaagaccaagugcaccgccagcaacaagugcagaggcaucaucaagaccuucagcaacggcugcgacuacgugagcaacaagggcguggacaccgugagcgugggcaacacccuguacuacgugaacaagcaggagggcaagagccuguacgugaagggcgagcccaucaucaacuucuacgacccccugguguuccccagcgacgaguucgacgccagcaucagccaggugaacgagaagaucaaccagagccuggccuucaucagaaagagcgacgagcugcugcacaacgugaacgugggcaagagcaccaccaacaucaugaucaccaccaucaucaucgugaucaucgugauccugcugcugcugaucgccgugggccuguuccuguacugcaaggccagaagcacccccgugacccugagcaaggaccagcugagcggcaucaacaacaucgccuucagcaacugaggacuagugaagggaacacccaaauuuaauucagccuuaagcacaauuaauuaagagugaaacguaauuguacaagcaguuggucacccaccauagggcaugaucaacaccgcaaccuuuccuuuuucccccagugauucugaaaaaccccucuucccuucagcuugcuuagauguuccaaauuuaguaagcuuaaggcggccuacagaagaaaaagaaaaaaaaggccacaaaaguucccucucacuuucaguaaauaaaauaaaagcagcaacagaaauaaagaaauaaaugaaauucaaaaugaaauaaauauuguguugugcagcauuaaaaaaucaauaaaaauuaaaaaugagcaagaucuaaaaaaaaaaaaaaaaaaaaaaaaaaaaaaaaaaaaaaaaaaaaaaaaaaaaaaaaaaaaaaaaugcaucccccccccccccccccccccccccccccccaaaggcucuuuucagagccaccagaauu

SEQ ID NO: 17138 - RNA, 2183 nt, Artificial Sequence
  mRNA product Design f-4 comprising derived and/or modified sequence from HRSV(Memphis-37)__AIY60640.1__F_DSCav1_mut5 (opt5)
gggagagucccgcagucggcguccagcggcucugcuuguucgugugugugucguugcaggccuuauucaagcuuaccauggagcugcccauccucaagaccaacgccauuacaacgauccuggcugccgugacccuuugcuucgcgagcucccagaauauuacagaagaguuuuaccaaucuaccuguagcgcugucuccaaaggcuaucugucugcccucagaacagggugguacaccagcguuaucacaauugaacuguccaacaucaaggagaauaaaugcaacggaaccgacgccaaggugaaacuuaucaagcaggaacuggauaaguauaaaaaugcugugacggagcuccagcugcugaugcagucuaccccugccgcuggcagcggguccgccauugcgagcggaaucgccgucuguaaggugcuccaccuggagggcgaaguuaacaaaauuaagaaugcccuucugucuacaaacaaagcuguggucucccucagcgggugcggagugucuguucugaccuucaaggugcuugaccugaagaauuacaucgauaaacaacuccugccgauucugaacaagcaguccuguagcaucucuaauauugagacagucaucgaauuucagcagaaaaacaaucggcuccuggagaucacccgcgaguucuccgugaacgcuggcgugacgacacccgucagcaccuauaugcuuacaaauuccgaacugcucucucugauuaacgacaugccuaucaccaacgaucaaaagaaacuuaugagcaauaacguucagauugugagacagcaguccuacagcaucaugugcauuaucaaggaggaagugcuggccuaugucgugcaacucccccuguacggcguuaucgacaccccuuguuggaaacugcauacaucuccccucugcacgaccaauacaaaggagggguccaacauuugucugacccggacagaucgcggaugguacugcgacaaugcgggcagcgugagcuuuuucccucaggccgaaaccuguaagguccagucuaacagaguguuuugcgauacgaugaacuccagaacacugccgucugagguuaaucucugcaauaucgacauuuucaaccccaaauaugauuguaagaucaugaccagcaaaaccgacguguccagcucugucauuacaucccugggggcuaucgugagcugcuacggaaagaccaaauguacagccucuaauaagugccggggcaucauuaagacguuuuccaacgggugugauuaugucagcaauaaaggaguggacaccguuuccgugggcaacacacuuuacuaugucaauaagcaagagggcaaaucucuguacgugaagggggaaccuaucauuaacuucuaugacccccucguuuuuccuagcgaugaguucgacgcuuccaucucucaggugaacgagaaaauuaaucagagccuggccuuuauccgcaaguccgaugaacugcuccacaacgucaaugugggaaagagcaccacaaacauuaugaucaccacgaucauuaucgugauuaucguuauucugcuucugcucaucgccgucggccuguuccuguacugcaaagcuagaucuacccccgugacacuuuccaaggaccagcucagcgggaucaauaacauugcguucucuaauugaggacuagugaagggaacacccaaauuuaauucagccuuaagcacaauuaauuaagagugaaacguaauuguacaagcaguuggucacccaccauagggcaugaucaacaccgcaaccuuuccuuuuucccccagugauucugaaaaaccccucuucccuucagcuugcuuagauguuccaaauuuaguaagcuuaaggcggccuacagaagaaaaagaaaaaaaaggccacaaaaguucccucucacuuucaguaaauaaaauaaaagcagcaacagaaauaaagaaauaaaugaaauucaaaaugaaauaaauauuguguugugcagcauuaaaaaaucaauaaaaauuaaaaaugagcaagaucuaaaaaaaaaaaaaaaaaaaaaaaaaaaaaaaaaaaaaaaaaaaaaaaaaaaaaaaaaaaaaaaaugcaucccccccccccccccccccccccccccccccaaaggcucuuuucagagccaccagaauu

SEQ ID NO: 17139 - RNA, 2183 nt, Artificial Sequence
  mRNA product Design f-4 comprising derived and/or modified sequence from HRSV(Memphis-37)__AIY60640.1__F_DSCav1_mut5 (opt6)
gggagagucccgcagucggcguccagcggcucugcuuguucgugugugugucguugcaggccuuauucaagcuuaccauggaacucccaaucuuaaaaacaaacgcaauaacuacaauacucgcagcaguaacacuaugcuucgcaucaucacaaaacauaaccgaagaauuuuaccaaaguacaugcucagcaguaucaaaagguuaccucucagcccuaagaaccggaugguacacaucaguaaucacuauagaacuauccaauauaaaagaaaacaaaugcaacggcacugacgcaaaaguuaaauuaauuaaacaagaacucgauaaauauaaaaaugcaguaacagaacuacaacuacuaaugcaaagcaccccagcugcaggaagcggaucagcaaucgcaucaggaauagcaguauguaaaguacuacaccuagaaggagaagucaacaaaaucaaaaaugcacuacuaaguacaaacaaagcuguaguaagccuaucagguugcggaguaucaguauuaacauuuaaaguccucgaccuaaaaaauuacauagauaaacaacucuuaccaauacucaauaaacaaaguugcagcaucagcaacauagaaacagucaucgaauuucaacaaaaaaauaauagacuccuagaaauaacacgugaauuuucaguaaaugcuggaguaacaacaccaguaucuacauauaugcuaacaaauagcgaacuacucucacuuauuaacgauaugcccauaacaaacgaccaaaaaaaacuuaugucaaacaauguucaaauaguuagacaacaauccuacagcauaaugugcauaaucaaagaagaaguucuagcuuacguaguacaacuaccacucuaugguguuaucgacacccccuguuggaaacuucacacaucaccacuaugcacaacaaacacaaaagaaggaucaaauauuugcuuaacaagaacagauagaggaugguauugcgauaaugccggaucaguaucauuuuuuccacaagcagaaacauguaaaguacaauccaaccgaguauuuugcgacaccaugaacuccagaacacuaccaucugaagucaaccuauguaauauagauauauuuaacccaaaauaugacuguaaaaucaugacaucaaaaacugauguaaguucuaguguaauaaccagcuuaggcgccauaguaagcuguuacgguaaaacaaaaugcacagcaagcaacaaaugccgcgguauaauaaaaacauucucaaacggaugcgauuauguaaguaacaaaggaguagauacagucuccguaggcaacacauuauacuacguaaacaaacaagaaggaaaaucacuauauguaaaaggagaaccaaucauaaauuucuacgacccacuuguauuccccagcgacgaauuugaugcuuccauuucacaagucaacgaaaaaauaaaccaaucauuagccuucauaagaaaaucagacgaauuauuacauaauguuaaugucggcaaauccacaacuaauauaaugauaacaacaaucauaauaguaauaaucguuauacuacuauuacucauagcaguaggacucuucuuauauuguaaagccagauccaccccaguaacacucucaaaagaccaauuaucaggaauuaauaacaucgcauuuucaaacuaaggacuagugaagggaacacccaaauuuaauucagccuuaagcacaauuaauuaagagugaaacguaauuguacaagcaguuggucacccaccauagggcaugaucaacaccgcaaccuuuccuuuuucccccagugauucugaaaaaccccucuucccuucagcuugcuuagauguuccaaauuuaguaagcuuaaggcggccuacagaagaaaaagaaaaaaaaggccacaaaaguucccucucacuuucaguaaauaaaauaaaagcagcaacagaaauaaagaaauaaaugaaauucaaaaugaaauaaauauuguguugugcagcauuaaaaaaucaauaaaaauuaaaaaugagcaagaucuaaaaaaaaaaaaaaaaaaaaaaaaaaaaaaaaaaaaaaaaaaaaaaaaaaaaaaaaaaaaaaaaugcaucccccccccccccccccccccccccccccccaaaggcucuuuucagagccaccagaauu

SEQ ID NO: 17140 - RNA, 2183 nt, Artificial Sequence
  mRNA product Design f-4 comprising derived and/or modified sequence from HRSV(Memphis-37)__AIY60640.1__F_DSCav1_mut5 (opt11)
gggagagucccgcagucggcguccagcggcucugcuuguucgugugugugucguugcaggccuuauucaagcuuaccauggaacuccccauccuuaaaaccaacgcaaucaccacaauacucgccgccgucacccucugcuuugcguccucccagaacaucaccgaagaguucuaccaaucgaccugcagcgccgucagcaagggcuaccucucagcccuccgaacaggcugguacacauccgucaucaccaucgaacucucaaacauaaaagaaaacaaguguaacggcaccgacgcgaaaguuaaacucaucaaacaagaacucgauaaauacaaaaacgcaguaaccgaacuacaacuccuaaugcaauccacacccgcagccggcagcggcuccgcaaucgccuccggcauagcagucugcaaaguccuccaccucgaaggagaagucaauaaaaucaaaaacgcccuccuauccaccaacaaagcgguugucucccuguccggaugcggaguuagcguccuaaccuucaaggugcucgaccucaaaaacuacauagacaaacaacuacuccccauacucaacaaacaaucaugcuccaucagcaacaucgagaccgucaucgaguuccaacagaaaaacaaccgccuccucgaaaucacacgagaguucuccguaaacgccggcgucacaacccccguuuccacuuacaugcucacaaacagcgaacuccucucccucaucaacgacaugccaaucaccaacgaccaaaagaaacucauguccaacaacguccaaaucguccgccaacaaagcuacagcauaaugugcaucauaaaagaagaaguacucgcguacguaguccaacuaccccuauacggcgucaucgacacccccugcuggaaacugcacacuucuccccucuguacaaccaacacuaaagaaggcucgaacaucugccucaccagaacagaccgaggaugguacugcgacaacgccggcuccgucagcuucuucccccaggccgaaacaugcaaaguacaaucaaaccgagucuucugcgacacaaugaacagcagaacucuacccuccgaaguuaaccuaugcaacaucgacaucuucaaccccaaauacgacugcaaaauaaugaccucaaaaacagacguguccagcuccguuaucaccucucucggagccaucguauccuguuauggaaaaaccaaaugcaccgccucaaacaaaugccgaggcauaaucaaaacauucucaaauggaugcgacuacguauccaacaaaggagucgacaccgucagcgugggcaauacccucuacuacgucaacaaacaggaagggaaaucccucuauguaaagggcgagcccauuauuaacuucuaugacccccucguguucccaagcgacgaguucgacgccuccauaucacaagucaaugagaaaaucaaccaaucacuagcuuucauucgcaaauccgacgaacuccuucacaacgucaacgucggcaaauccaccaccaacaucaugaucaccaccauaauuaucgucauuaucgucauacuacuccuacucaucgccgucggccucuuccucuauugcaaagcacgcucgacacccgucacccuuucaaaagaccaacuuuccggcauaaacaacauagccuucagcaacuagggacuagugaagggaacacccaaauuuaauucagccuuaagcacaauuaauuaagagugaaacguaauuguacaagcaguuggucacccaccauagggcaugaucaacaccgcaaccuuuccuuuuucccccagugauucugaaaaaccccucuucccuucagcuugcuuagauguuccaaauuuaguaagcuuaaggcggccuacagaagaaaaagaaaaaaaaggccacaaaaguucccucucacuuucaguaaauaaaauaaaagcagcaacagaaauaaagaaauaaaugaaauucaaaaugaaauaaauauuguguugugcagcauuaaaaaaucaauaaaaauuaaaaaugagcaagaucuaaaaaaaaaaaaaaaaaaaaaaaaaaaaaaaaaaaaaaaaaaaaaaaaaaaaaaaaaaaaaaaaugcaucccccccccccccccccccccccccccccccaaaggcucuuuucagagccaccagaauu

SEQ ID NO: 17141 - RNA, 1959 nt, Artificial Sequence
  mRNA product Design f-5 comprising derived and/or modified sequence from HRSV(Memphis-37)__AIY60640.1__F_DSCav1_mut5 (opt1)
gggagacuuucccauucuguagcagaauuugguguugccuguggucuuggucccgcggagaagcuuaccauggagcugcccauccucaagaccaacgccaucaccacgauccuggccgcggugacccugugcuucgccagcucccagaacaucaccgaggaguucuaccagagcacgugcuccgccgucagcaagggcuaccucuccgcccugcgcaccgggugguacaccagcgugaucaccaucgagcuguccaacaucaaggagaacaagugcaacggcaccgacgccaaggugaagcucaucaagcaggagcuggacaaguacaagaacgcggucacggagcugcagcuccugaugcagagcaccccggccgccggcuccgggagcgcgaucgccuccggcaucgccgucugcaaggugcugcaccucgagggcgaggugaacaagaucaagaacgcccugcuguccaccaacaaggccgucgugagccucuccggcugcggggugagcguccugaccuucaaggugcuggaccucaagaacuacaucgacaagcagcugcugcccauccugaacaagcagagcugcuccaucagcaacaucgagaccgucaucgaguuccagcagaagaacaaccgccuccuggagaucacgcgggaguucagcgugaacgcgggcgugaccacccccgucuccaccuacaugcugacgaacagcgagcuccugucccugaucaacgacaugccgaucaccaacgaccagaagaagcucaugagcaacaacgugcagaucgugcgccagcaguccuacagcaucaugugcaucaucaaggaggagguccuggccuacguggugcagcugccccucuacggggucaucgacacccccugcuggaagcugcacaccagcccccugugcacgaccaacaccaaggagggcuccaacaucugccucacccggacggaccgcgggugguacugcgacaacgccggcagcguguccuucuucccgcaggccgagaccugcaagguccagagcaaccggguguucugcgacaccaugaacucccggacccugcccagcgaggugaaccucugcaacaucgacaucuucaaccccaaguacgacugcaagaucaugacguccaagaccgacgucagcuccagcgugaucaccucccugggcgccaucgugagcugcuacgggaagaccaagugcacggcgagcaacaagugccgcggcaucaucaagaccuucuccaacgggugcgacuacgucagcaacaagggcguggacaccguguccgucggcaacacccuguacuacgugaacaagcaggagggcaagagccucuacgugaagggggagcccaucaucaacuucuacgacccgcuggucuuccccuccgacgaguucgacgccagcaucucccaggugaacgagaagaucaaccagagccuggccuucauccggaaguccgacgagcuccugcacaacgugaacgucggcaagagcaccacgaacaucaugaucaccaccaucaucaucgugaucaucgugauccugcugcuccugaucgccgucgggcuguuccucuacugcaaggcccgcuccacccccgugacgcugagcaaggaccagcuguccgggaucaacaacaucgcguucagcaacugaggacuaguacuggcugcaucucccuuuccucuguccuccauccuucucccaggauggugaagggggaccugguacccagugauccccaccccaggauccuaaaucaugacuuaccugcuaauaaaaacucauuggaaaagugagaagaucuaaaaaaaaaaaaaaaaaaaaaaaaaaaaaaaaaaaaaaaaaaaaaaaaaaaaaaaaaaaaaaaaugcaucccccccccccccccccccccccccccccccaaaggcucuuuucagagccaccagaauu

SEQ ID NO: 17142 - RNA, 1959 nt, Artificial Sequence
  mRNA product Design f-5 comprising derived and/or modified sequence from HRSV(Memphis-37)__AIY60640.1__F_DSCav1_mut5 (opt1)
gggagacuuucccauucuguagcagaauuugguguugccuguggucuuggucccgcggagaagcuuaccauggagcugcccauccucaagaccaacgccaucaccacgauccuggccgcggugacccugugcuucgccagcucccagaacaucaccgaggaguucuaccagagcacgugcuccgccgucagcaagggcuaccucuccgcccugcgcaccgggugguacaccagcgugaucaccaucgagcuguccaacaucaaggagaacaagugcaacggcaccgacgccaaggugaagcucaucaagcaggagcuggacaaguacaagaacgcggucacggagcugcagcuccugaugcagagcaccccggccgccggguccggcagcgccaucgcguccgggaucgccgugugcaaggugcugcaccucgagggcgaggucaacaagaucaagaacgcccugcugagcaccaacaaggccguggugucccucagcggcugcggggucuccgugcugaccuucaaggugcuggaccucaagaacuacaucgacaagcagcugcugcccauccucaacaagcagagcugcuccaucagcaacaucgagacggucaucgaguuccagcagaagaacaaccggcugcuggagaucacccgcgaguucuccgugaacgccggcgugaccacccccgucagcacguacaugcucaccaacagcgagcugcugucccucaucaacgacaugcccaucaccaacgaccagaagaagcugaugagcaacaacgugcagaucgugcggcagcaguccuacagcaucaugugcaucaucaaggaggagguccuggcguacguggugcagcucccgcuguacggggucaucgacacccccugcuggaagcugcacacgagcccccucugcaccaccaacaccaaggagggcuccaacaucugccugacgcgcaccgaccgggggugguacugcgacaacgccggcuccgugagcuucuucccccaggccgagaccugcaaggugcaguccaaccgcgucuucugcgacaccaugaacagccggacgcucccguccgaggugaaccugugcaacaucgacaucuucaaccccaaguacgacugcaagaucaugaccagcaagaccgacgucuccagcuccgugaucaccagccugggcgccaucguguccugcuacgggaagacgaagugcaccgccagcaacaagugccggggcaucaucaagaccuucuccaacgggugcgacuacgucagcaacaagggcguggacaccgugagcgucggcaacacgcucuacuacgugaacaagcaggaggggaagucccuguacgugaagggcgagcccaucaucaacuucuacgacccccuggucuucccgagcgacgaguucgacgcguccaucagccaggugaacgagaagaucaaccagucccucgccuucauccgcaagagcgacgagcugcugcacaacgugaacgucgggaaguccaccaccaacaucaugaucaccaccaucaucaucgugaucaucgugauccuccugcugcucaucgccgucggccuguuccuguacugcaaggcccggagcacgcccgugacccuguccaaggaccagcucagcgggaucaacaacaucgccuucuccaacugaggacuaguacuggcugcaucucccuuuccucuguccuccauccuucucccaggauggugaagggggaccugguacccagugauccccaccccaggauccuaaaucaugacuuaccugcuaauaaaaacucauuggaaaagugagaagaucuaaaaaaaaaaaaaaaaaaaaaaaaaaaaaaaaaaaaaaaaaaaaaaaaaaaaaaaaaaaaaaaaugcaucccccccccccccccccccccccccccccccaaaggcucuuuucagagccaccagaauu

SEQ ID NO: 17143 - RNA, 1959 nt, Artificial Sequence
  mRNA product Design f-5 comprising derived and/or modified sequence from HRSV(Memphis-37)__AIY60640.1__F_DSCav1_mut5 (opt2)
gggagacuuucccauucuguagcagaauuugguguugccuguggucuuggucccgcggagaagcuuaccauggagcuccccauccucaagaccaacgccaucaccaccauccucgccgccgucacccucugcuucgccuccucccagaacaucaccgaggaguucuaccaguccaccugcuccgccgucuccaagggcuaccucuccgcccuccgcaccggcugguacaccuccgucaucaccaucgagcucuccaacaucaaggagaacaagugcaacggcaccgacgccaaggucaagcucaucaagcaggagcucgacaaguacaagaacgccgucaccgagcuccagcuccucaugcaguccacccccgccgccggcuccggcuccgccaucgccuccggcaucgccgucugcaagguccuccaccucgagggcgaggucaacaagaucaagaacgcccuccucuccaccaacaaggccgucgucucccucuccggcugcggcgucuccguccucaccuucaagguccucgaccucaagaacuacaucgacaagcagcuccuccccauccucaacaagcaguccugcuccaucuccaacaucgagaccgucaucgaguuccagcagaagaacaaccgccuccucgagaucacccgcgaguucuccgucaacgccggcgucaccacccccgucuccaccuacaugcucaccaacuccgagcuccucucccucaucaacgacaugcccaucaccaacgaccagaagaagcucauguccaacaacguccagaucguccgccagcaguccuacuccaucaugugcaucaucaaggaggagguccucgccuacgucguccagcucccccucuacggcgucaucgacacccccugcuggaagcuccacaccuccccccucugcaccaccaacaccaaggagggcuccaacaucugccucacccgcaccgaccgcggcugguacugcgacaacgccggcuccgucuccuucuucccccaggccgagaccugcaagguccaguccaaccgcgucuucugcgacaccaugaacucccgcacccuccccuccgaggucaaccucugcaacaucgacaucuucaaccccaaguacgacugcaagaucaugaccuccaagaccgacgucuccuccuccgucaucaccucccucggcgccaucgucuccugcuacggcaagaccaagugcaccgccuccaacaagugccgcggcaucaucaagaccuucuccaacggcugcgacuacgucuccaacaagggcgucgacaccgucuccgucggcaacacccucuacuacgucaacaagcaggagggcaagucccucuacgucaagggcgagcccaucaucaacuucuacgacccccucgucuuccccuccgacgaguucgacgccuccaucucccaggucaacgagaagaucaaccagucccucgccuucauccgcaaguccgacgagcuccuccacaacgucaacgucggcaaguccaccaccaacaucaugaucaccaccaucaucaucgucaucaucgucauccuccuccuccucaucgccgucggccucuuccucuacugcaaggcccgcuccacccccgucacccucuccaaggaccagcucuccggcaucaacaacaucgccuucuccaacugaggacuaguacuggcugcaucucccuuuccucuguccuccauccuucucccaggauggugaagggggaccugguacccagugauccccaccccaggauccuaaaucaugacuuaccugcuaauaaaaacucauuggaaaagugagaagaucuaaaaaaaaaaaaaaaaaaaaaaaaaaaaaaaaaaaaaaaaaaaaaaaaaaaaaaaaaaaaaaaaugcaucccccccccccccccccccccccccccccccaaaggcucuuuucagagccaccagaauu

SEQ ID NO: 17144 - RNA, 1959 nt, Artificial Sequence
  mRNA product Design f-5 comprising derived and/or modified sequence from HRSV(Memphis-37)__AIY60640.1__F_DSCav1_mut5 (opt3)
gggagacuuucccauucuguagcagaauuugguguugccuguggucuuggucccgcggagaagcuuaccauggagcugcccauccucaagaccaacgccauuacaacuauacuugcugcagugacgcugugcuucgccagcucccagaauaucaccgaagaguuuuaccaaucuacauguucagcggucaguaaaggcuauuugagcgcuuuaagaacugggugguacaccuccguuauuacaaucgaacugucuaacauuaaggagaauaaaugcaacggaaccgacgccaaggugaaacuaaucaagcaggaacucgauaaguauaaaaaugcaguaacugagcugcagcuucugaugcagucgaccccugccgcugguucaggcagcgcaauagccagugggaucgcuguguguaaggucuugcaccucgagggagaagugaacaaaauuaagaaugcccugcuguccacaaacaaagcgguugugucucucagcggcugcggugucuccguguuaacguucaagguacuggaccuuaagaauuacaucgauaaacaauugcugccaauucuaaacaagcagucauguaguaucagcaauauagagacuguuauugaauuucagcagaaaaacaauaggcuccuggagaucacccgggaguucucugugaacgcaggggucacaacuccgguguccaccuauaugcuuacaaauucagaacuguugagccucauuaacgacaugcccaucaccaacgaucaaaagaaacugaugaguaauaacgugcagaucguccgccagcagucuuacuccauuaugugcauaaucaaggaggaaguuuuagccuaugugguacaacugccucucuacggagugauugacacgccauguuggaaacuucauacuagcccccugugcacaaccaauacuaaggagggcucgaacaucuguuugacacgaaccgaucguggcugguacugcgacaaugcugggucugucuccuuuuucccucaggccgaaacguguaaggugcagucaaacagaguguuuugcgauaccaugaauaguagaacacugccaagcgaggugaaccucugcaauauagacauuuucaaccccaaauaugauuguaagaucaugacuuccaaaaccgacgucucuagcucagugaucacaagucugggagcaauuguauccugcuacgguaagacuaaauguaccgcuagcaauaagugcaggggcaucauuaagacauuuucuaacgggugugauuauguuucaaauaaaggaguggacaccgucagugugggcaacacucuuuacuaugucaauaagcaagaggguaaaagccuguacgugaagggggaaccuauaaucaacuucuaugacccauugguuuuuccguccgaugaguucgacgccucuauuucgcagguuaacgagaaaaucaaucagagccucgcguuuauccggaaguccgaugaacuguuacacaacguaaaugucggaaagucaacgacaaacauuaugauaaccacuaucauuaucgugauuaucguuauacugcuacuccugaucgccgugggccuuuucuuguacugcaaagcacgcaguacccccgucacacugucuaaggaccagcucagcggcauuaauaacaucgcuuucuccaauugaggacuaguacuggcugcaucucccuuuccucuguccuccauccuucucccaggauggugaagggggaccugguacccagugauccccaccccaggauccuaaaucaugacuuaccugcuaauaaaaacucauuggaaaagugagaagaucuaaaaaaaaaaaaaaaaaaaaaaaaaaaaaaaaaaaaaaaaaaaaaaaaaaaaaaaaaaaaaaaaugcaucccccccccccccccccccccccccccccccaaaggcucuuuucagagccaccagaauu

SEQ ID NO: 17145 - RNA, 1959 nt, Artificial Sequence
  mRNA product Design f-5 comprising derived and/or modified sequence from HRSV(Memphis-37)__AIY60640.1__F_DSCav1_mut5 (opt4)
gggagacuuucccauucuguagcagaauuugguguugccuguggucuuggucccgcggagaagcuuaccauggagcugcccauccugaagaccaacgccaucaccaccauccuggccgccgugacccugugcuucgccagcagccagaacaucaccgaggaguucuaccagagcaccugcagcgccgugagcaagggcuaccugagcgcccugagaaccggcugguacaccagcgugaucaccaucgagcugagcaacaucaaggagaacaagugcaacggcaccgacgccaaggugaagcugaucaagcaggagcuggacaaguacaagaacgccgugaccgagcugcagcugcugaugcagagcacccccgccgccggcagcggcagcgccaucgccagcggcaucgccgugugcaaggugcugcaccuggagggcgaggugaacaagaucaagaacgcccugcugagcaccaacaaggccguggugagccugagcggcugcggcgugagcgugcugaccuucaaggugcuggaccugaagaacuacaucgacaagcagcugcugcccauccugaacaagcagagcugcagcaucagcaacaucgagaccgugaucgaguuccagcagaagaacaacagacugcuggagaucaccagagaguucagcgugaacgccggcgugaccacccccgugagcaccuacaugcugaccaacagcgagcugcugagccugaucaacgacaugcccaucaccaacgaccagaagaagcugaugagcaacaacgugcagaucgugagacagcagagcuacagcaucaugugcaucaucaaggaggaggugcuggccuacguggugcagcugccccuguacggcgugaucgacacccccugcuggaagcugcacaccagcccccugugcaccaccaacaccaaggagggcagcaacaucugccugaccagaaccgacagaggcugguacugcgacaacgccggcagcgugagcuucuucccccaggccgagaccugcaaggugcagagcaacagaguguucugcgacaccaugaacagcagaacccugcccagcgaggugaaccugugcaacaucgacaucuucaaccccaaguacgacugcaagaucaugaccagcaagaccgacgugagcagcagcgugaucaccagccugggcgccaucgugagcugcuacggcaagaccaagugcaccgccagcaacaagugcagaggcaucaucaagaccuucagcaacggcugcgacuacgugagcaacaagggcguggacaccgugagcgugggcaacacccuguacuacgugaacaagcaggagggcaagagccuguacgugaagggcgagcccaucaucaacuucuacgacccccugguguuccccagcgacgaguucgacgccagcaucagccaggugaacgagaagaucaaccagagccuggccuucaucagaaagagcgacgagcugcugcacaacgugaacgugggcaagagcaccaccaacaucaugaucaccaccaucaucaucgugaucaucgugauccugcugcugcugaucgccgugggccuguuccuguacugcaaggccagaagcacccccgugacccugagcaaggaccagcugagcggcaucaacaacaucgccuucagcaacugaggacuaguacuggcugcaucucccuuuccucuguccuccauccuucucccaggauggugaagggggaccugguacccagugauccccaccccaggauccuaaaucaugacuuaccugcuaauaaaaacucauuggaaaagugagaagaucuaaaaaaaaaaaaaaaaaaaaaaaaaaaaaaaaaaaaaaaaaaaaaaaaaaaaaaaaaaaaaaaaugcaucccccccccccccccccccccccccccccccaaaggcucuuuucagagccaccagaauu

SEQ ID NO: 17146 - RNA, 1959 nt, Artificial Sequence
  mRNA product Design f-5 comprising derived and/or modified sequence from HRSV(Memphis-37)__AIY60640.1__F_DSCav1_mut5 (opt5)
gggagacuuucccauucuguagcagaauuugguguugccuguggucuuggucccgcggagaagcuuaccauggagcugcccauccucaagaccaacgccauuacaacgauccuggcugccgugacccuuugcuucgcgagcucccagaauauuacagaagaguuuuaccaaucuaccuguagcgcugucuccaaaggcuaucugucugcccucagaacagggugguacaccagcguuaucacaauugaacuguccaacaucaaggagaauaaaugcaacggaaccgacgccaaggugaaacuuaucaagcaggaacuggauaaguauaaaaaugcugugacggagcuccagcugcugaugcagucuaccccugccgcuggcagcggguccgccauugcgagcggaaucgccgucuguaaggugcuccaccuggagggcgaaguuaacaaaauuaagaaugcccuucugucuacaaacaaagcuguggucucccucagcgggugcggagugucuguucugaccuucaaggugcuugaccugaagaauuacaucgauaaacaacuccugccgauucugaacaagcaguccuguagcaucucuaauauugagacagucaucgaauuucagcagaaaaacaaucggcuccuggagaucacccgcgaguucuccgugaacgcuggcgugacgacacccgucagcaccuauaugcuuacaaauuccgaacugcucucucugauuaacgacaugccuaucaccaacgaucaaaagaaacuuaugagcaauaacguucagauugugagacagcaguccuacagcaucaugugcauuaucaaggaggaagugcuggccuaugucgugcaacucccccuguacggcguuaucgacaccccuuguuggaaacugcauacaucuccccucugcacgaccaauacaaaggagggguccaacauuugucugacccggacagaucgcggaugguacugcgacaaugcgggcagcgugagcuuuuucccucaggccgaaaccuguaagguccagucuaacagaguguuuugcgauacgaugaacuccagaacacugccgucugagguuaaucucugcaauaucgacauuuucaaccccaaauaugauuguaagaucaugaccagcaaaaccgacguguccagcucugucauuacaucccugggggcuaucgugagcugcuacggaaagaccaaauguacagccucuaauaagugccggggcaucauuaagacguuuuccaacgggugugauuaugucagcaauaaaggaguggacaccguuuccgugggcaacacacuuuacuaugucaauaagcaagagggcaaaucucuguacgugaagggggaaccuaucauuaacuucuaugacccccucguuuuuccuagcgaugaguucgacgcuuccaucucucaggugaacgagaaaauuaaucagagccuggccuuuauccgcaaguccgaugaacugcuccacaacgucaaugugggaaagagcaccacaaacauuaugaucaccacgaucauuaucgugauuaucguuauucugcuucugcucaucgccgucggccuguuccuguacugcaaagcuagaucuacccccgugacacuuuccaaggaccagcucagcgggaucaauaacauugcguucucuaauugaggacuaguacuggcugcaucucccuuuccucuguccuccauccuucucccaggauggugaagggggaccugguacccagugauccccaccccaggauccuaaaucaugacuuaccugcuaauaaaaacucauuggaaaagugagaagaucuaaaaaaaaaaaaaaaaaaaaaaaaaaaaaaaaaaaaaaaaaaaaaaaaaaaaaaaaaaaaaaaaugcaucccccccccccccccccccccccccccccccaaaggcucuuuucagagccaccagaauu

SEQ ID NO: 17147 - RNA, 1959 nt, Artificial Sequence
  mRNA product Design f-5 comprising derived and/or modified sequence from HRSV(Memphis-37)__AIY60640.1__F_DSCav1_mut5 (opt6)
gggagacuuucccauucuguagcagaauuugguguugccuguggucuuggucccgcggagaagcuuaccauggaacucccaaucuuaaaaacaaacgcaauaacuacaauacucgcagcaguaacacuaugcuucgcaucaucacaaaacauaaccgaagaauuuuaccaaaguacaugcucagcaguaucaaaagguuaccucucagcccuaagaaccggaugguacacaucaguaaucacuauagaacuauccaauauaaaagaaaacaaaugcaacggcacugacgcaaaaguuaaauuaauuaaacaagaacucgauaaauauaaaaaugcaguaacagaacuacaacuacuaaugcaaagcaccccagcugcaggaagcggaucagcaaucgcaucaggaauagcaguauguaaaguacuacaccuagaaggagaagucaacaaaaucaaaaaugcacuacuaaguacaaacaaagcuguaguaagccuaucagguugcggaguaucaguauuaacauuuaaaguccucgaccuaaaaaauuacauagauaaacaacucuuaccaauacucaauaaacaaaguugcagcaucagcaacauagaaacagucaucgaauuucaacaaaaaaauaauagacuccuagaaauaacacgugaauuuucaguaaaugcuggaguaacaacaccaguaucuacauauaugcuaacaaauagcgaacuacucucacuuauuaacgauaugcccauaacaaacgaccaaaaaaaacuuaugucaaacaauguucaaauaguuagacaacaauccuacagcauaaugugcauaaucaaagaagaaguucuagcuuacguaguacaacuaccacucuaugguguuaucgacacccccuguuggaaacuucacacaucaccacuaugcacaacaaacacaaaagaaggaucaaauauuugcuuaacaagaacagauagaggaugguauugcgauaaugccggaucaguaucauuuuuuccacaagcagaaacauguaaaguacaauccaaccgaguauuuugcgacaccaugaacuccagaacacuaccaucugaagucaaccuauguaauauagauauauuuaacccaaaauaugacuguaaaaucaugacaucaaaaacugauguaaguucuaguguaauaaccagcuuaggcgccauaguaagcuguuacgguaaaacaaaaugcacagcaagcaacaaaugccgcgguauaauaaaaacauucucaaacggaugcgauuauguaaguaacaaaggaguagauacagucuccguaggcaacacauuauacuacguaaacaaacaagaaggaaaaucacuauauguaaaaggagaaccaaucauaaauuucuacgacccacuuguauuccccagcgacgaauuugaugcuuccauuucacaagucaacgaaaaaauaaaccaaucauuagccuucauaagaaaaucagacgaauuauuacauaauguuaaugucggcaaauccacaacuaauauaaugauaacaacaaucauaauaguaauaaucguuauacuacuauuacucauagcaguaggacucuucuuauauuguaaagccagauccaccccaguaacacucucaaaagaccaauuaucaggaauuaauaacaucgcauuuucaaacuaaggacuaguacuggcugcaucucccuuuccucuguccuccauccuucucccaggauggugaagggggaccugguacccagugauccccaccccaggauccuaaaucaugacuuaccugcuaauaaaaacucauuggaaaagugagaagaucuaaaaaaaaaaaaaaaaaaaaaaaaaaaaaaaaaaaaaaaaaaaaaaaaaaaaaaaaaaaaaaaaugcaucccccccccccccccccccccccccccccccaaaggcucuuuucagagccaccagaauu

SEQ ID NO: 17148 - RNA, 1959 nt, Artificial Sequence
  mRNA product Design f-5 comprising derived and/or modified sequence from HRSV(Memphis-37)__AIY60640.1__F_DSCav1_mut5 (opt11)
gggagacuuucccauucuguagcagaauuugguguugccuguggucuuggucccgcggagaagcuuaccauggaacuccccauccuuaaaaccaacgcaaucaccacaauacucgccgccgucacccucugcuuugcguccucccagaacaucaccgaagaguucuaccaaucgaccugcagcgccgucagcaagggcuaccucucagcccuccgaacaggcugguacacauccgucaucaccaucgaacucucaaacauaaaagaaaacaaguguaacggcaccgacgcgaaaguuaaacucaucaaacaagaacucgauaaauacaaaaacgcaguaaccgaacuacaacuccuaaugcaauccacacccgcagccggcagcggcuccgcaaucgccuccggcauagcagucugcaaaguccuccaccucgaaggagaagucaauaaaaucaaaaacgcccuccuauccaccaacaaagcgguugucucccuguccggaugcggaguuagcguccuaaccuucaaggugcucgaccucaaaaacuacauagacaaacaacuacuccccauacucaacaaacaaucaugcuccaucagcaacaucgagaccgucaucgaguuccaacagaaaaacaaccgccuccucgaaaucacacgagaguucuccguaaacgccggcgucacaacccccguuuccacuuacaugcucacaaacagcgaacuccucucccucaucaacgacaugccaaucaccaacgaccaaaagaaacucauguccaacaacguccaaaucguccgccaacaaagcuacagcauaaugugcaucauaaaagaagaaguacucgcguacguaguccaacuaccccuauacggcgucaucgacacccccugcuggaaacugcacacuucuccccucuguacaaccaacacuaaagaaggcucgaacaucugccucaccagaacagaccgaggaugguacugcgacaacgccggcuccgucagcuucuucccccaggccgaaacaugcaaaguacaaucaaaccgagucuucugcgacacaaugaacagcagaacucuacccuccgaaguuaaccuaugcaacaucgacaucuucaaccccaaauacgacugcaaaauaaugaccucaaaaacagacguguccagcuccguuaucaccucucucggagccaucguauccuguuauggaaaaaccaaaugcaccgccucaaacaaaugccgaggcauaaucaaaacauucucaaauggaugcgacuacguauccaacaaaggagucgacaccgucagcgugggcaauacccucuacuacgucaacaaacaggaagggaaaucccucuauguaaagggcgagcccauuauuaacuucuaugacccccucguguucccaagcgacgaguucgacgccuccauaucacaagucaaugagaaaaucaaccaaucacuagcuuucauucgcaaauccgacgaacuccuucacaacgucaacgucggcaaauccaccaccaacaucaugaucaccaccauaauuaucgucauuaucgucauacuacuccuacucaucgccgucggccucuuccucuauugcaaagcacgcucgacacccgucacccuuucaaaagaccaacuuuccggcauaaacaacauagccuucagcaacuagggacuaguacuggcugcaucucccuuuccucuguccuccauccuucucccaggauggugaagggggaccugguacccagugauccccaccccaggauccuaaaucaugacuuaccugcuaauaaaaacucauuggaaaagugagaagaucuaaaaaaaaaaaaaaaaaaaaaaaaaaaaaaaaaaaaaaaaaaaaaaaaaaaaaaaaaaaaaaaaugcaucccccccccccccccccccccccccccccccaaaggcucuuuucagagccaccagaauu

SEQ ID NO: 17149 - RNA, 1955 nt, Artificial Sequence
  mRNA product Design g-1 comprising derived and/or modified sequence from HRSV(Memphis-37)__AIY60640.1__F_DSCav1_mut5 (opt1)
gggagacuuucccauucuguagcagaauuugguguugccuguggucuuggucccgcggagaagcuuaccauggagcugcccauccucaagaccaacgccaucaccacgauccuggccgcggugacccugugcuucgccagcucccagaacaucaccgaggaguucuaccagagcacgugcuccgccgucagcaagggcuaccucuccgcccugcgcaccgggugguacaccagcgugaucaccaucgagcuguccaacaucaaggagaacaagugcaacggcaccgacgccaaggugaagcucaucaagcaggagcuggacaaguacaagaacgcggucacggagcugcagcuccugaugcagagcaccccggccgccggcuccgggagcgcgaucgccuccggcaucgccgucugcaaggugcugcaccucgagggcgaggugaacaagaucaagaacgcccugcuguccaccaacaaggccgucgugagccucuccggcugcggggugagcguccugaccuucaaggugcuggaccucaagaacuacaucgacaagcagcugcugcccauccugaacaagcagagcugcuccaucagcaacaucgagaccgucaucgaguuccagcagaagaacaaccgccuccuggagaucacgcgggaguucagcgugaacgcgggcgugaccacccccgucuccaccuacaugcugacgaacagcgagcuccugucccugaucaacgacaugccgaucaccaacgaccagaagaagcucaugagcaacaacgugcagaucgugcgccagcaguccuacagcaucaugugcaucaucaaggaggagguccuggccuacguggugcagcugccccucuacggggucaucgacacccccugcuggaagcugcacaccagcccccugugcacgaccaacaccaaggagggcuccaacaucugccucacccggacggaccgcgggugguacugcgacaacgccggcagcguguccuucuucccgcaggccgagaccugcaagguccagagcaaccggguguucugcgacaccaugaacucccggacccugcccagcgaggugaaccucugcaacaucgacaucuucaaccccaaguacgacugcaagaucaugacguccaagaccgacgucagcuccagcgugaucaccucccugggcgccaucgugagcugcuacgggaagaccaagugcacggcgagcaacaagugccgcggcaucaucaagaccuucuccaacgggugcgacuacgucagcaacaagggcguggacaccguguccgucggcaacacccuguacuacgugaacaagcaggagggcaagagccucuacgugaagggggagcccaucaucaacuucuacgacccgcuggucuuccccuccgacgaguucgacgccagcaucucccaggugaacgagaagaucaaccagagccuggccuucauccggaaguccgacgagcuccugcacaacgugaacgucggcaagagcaccacgaacaucaugaucaccaccaucaucaucgugaucaucgugauccugcugcuccugaucgccgucgggcuguuccucuacugcaaggcccgcuccacccccgugacgcugagcaaggaccagcuguccgggaucaacaacaucgcguucagcaacugaggacuaguggaagcauuuuccuggcugauuaaaagaaauuacucagcuauggucaucuguuccuguuagaaggcuaugcagcauauuauauacuaugcgcauguuaugaaaugcauaauaaaaaauuuuaaaaaaucuaaaagaucuaaaaaaaaaaaaaaaaaaaaaaaaaaaaaaaaaaaaaaaaaaaaaaaaaaaaaaaaaaaaaaaaugcaucccccccccccccccccccccccccccccccaaaggcucuuuucagagccaccagaauu

SEQ ID NO: 17150 - RNA, 1955 nt, Artificial Sequence
  mRNA product Design g-1 comprising derived and/or modified sequence from HRSV(Memphis-37)__AIY60640.1__F_DSCav1_mut5 (opt1)
gggagacuuucccauucuguagcagaauuugguguugccuguggucuuggucccgcggagaagcuuaccauggagcugcccauccucaagaccaacgccaucaccacgauccuggccgcggugacccugugcuucgccagcucccagaacaucaccgaggaguucuaccagagcacgugcuccgccgucagcaagggcuaccucuccgcccugcgcaccgggugguacaccagcgugaucaccaucgagcuguccaacaucaaggagaacaagugcaacggcaccgacgccaaggugaagcucaucaagcaggagcuggacaaguacaagaacgcggucacggagcugcagcuccugaugcagagcaccccggccgccggguccggcagcgccaucgcguccgggaucgccgugugcaaggugcugcaccucgagggcgaggucaacaagaucaagaacgcccugcugagcaccaacaaggccguggugucccucagcggcugcggggucuccgugcugaccuucaaggugcuggaccucaagaacuacaucgacaagcagcugcugcccauccucaacaagcagagcugcuccaucagcaacaucgagacggucaucgaguuccagcagaagaacaaccggcugcuggagaucacccgcgaguucuccgugaacgccggcgugaccacccccgucagcacguacaugcucaccaacagcgagcugcugucccucaucaacgacaugcccaucaccaacgaccagaagaagcugaugagcaacaacgugcagaucgugcggcagcaguccuacagcaucaugugcaucaucaaggaggagguccuggcguacguggugcagcucccgcuguacggggucaucgacacccccugcuggaagcugcacacgagcccccucugcaccaccaacaccaaggagggcuccaacaucugccugacgcgcaccgaccgggggugguacugcgacaacgccggcuccgugagcuucuucccccaggccgagaccugcaaggugcaguccaaccgcgucuucugcgacaccaugaacagccggacgcucccguccgaggugaaccugugcaacaucgacaucuucaaccccaaguacgacugcaagaucaugaccagcaagaccgacgucuccagcuccgugaucaccagccugggcgccaucguguccugcuacgggaagacgaagugcaccgccagcaacaagugccggggcaucaucaagaccuucuccaacgggugcgacuacgucagcaacaagggcguggacaccgugagcgucggcaacacgcucuacuacgugaacaagcaggaggggaagucccuguacgugaagggcgagcccaucaucaacuucuacgacccccuggucuucccgagcgacgaguucgacgcguccaucagccaggugaacgagaagaucaaccagucccucgccuucauccgcaagagcgacgagcugcugcacaacgugaacgucgggaaguccaccaccaacaucaugaucaccaccaucaucaucgugaucaucgugauccuccugcugcucaucgccgucggccuguuccuguacugcaaggcccggagcacgcccgugacccuguccaaggaccagcucagcgggaucaacaacaucgccuucuccaacugaggacuaguggaagcauuuuccuggcugauuaaaagaaauuacucagcuauggucaucuguuccuguuagaaggcuaugcagcauauuauauacuaugcgcauguuaugaaaugcauaauaaaaaauuuuaaaaaaucuaaaagaucuaaaaaaaaaaaaaaaaaaaaaaaaaaaaaaaaaaaaaaaaaaaaaaaaaaaaaaaaaaaaaaaaugcaucccccccccccccccccccccccccccccccaaaggcucuuuucagagccaccagaauu

SEQ ID NO: 17151 - RNA, 1955 nt, Artificial Sequence
  mRNA product Design g-1 comprising derived and/or modified sequence from HRSV(Memphis-37)__AIY60640.1__F_DSCav1_mut5 (opt2)
gggagacuuucccauucuguagcagaauuugguguugccuguggucuuggucccgcggagaagcuuaccauggagcuccccauccucaagaccaacgccaucaccaccauccucgccgccgucacccucugcuucgccuccucccagaacaucaccgaggaguucuaccaguccaccugcuccgccgucuccaagggcuaccucuccgcccuccgcaccggcugguacaccuccgucaucaccaucgagcucuccaacaucaaggagaacaagugcaacggcaccgacgccaaggucaagcucaucaagcaggagcucgacaaguacaagaacgccgucaccgagcuccagcuccucaugcaguccacccccgccgccggcuccggcuccgccaucgccuccggcaucgccgucugcaagguccuccaccucgagggcgaggucaacaagaucaagaacgcccuccucuccaccaacaaggccgucgucucccucuccggcugcggcgucuccguccucaccuucaagguccucgaccucaagaacuacaucgacaagcagcuccuccccauccucaacaagcaguccugcuccaucuccaacaucgagaccgucaucgaguuccagcagaagaacaaccgccuccucgagaucacccgcgaguucuccgucaacgccggcgucaccacccccgucuccaccuacaugcucaccaacuccgagcuccucucccucaucaacgacaugcccaucaccaacgaccagaagaagcucauguccaacaacguccagaucguccgccagcaguccuacuccaucaugugcaucaucaaggaggagguccucgccuacgucguccagcucccccucuacggcgucaucgacacccccugcuggaagcuccacaccuccccccucugcaccaccaacaccaaggagggcuccaacaucugccucacccgcaccgaccgcggcugguacugcgacaacgccggcuccgucuccuucuucccccaggccgagaccugcaagguccaguccaaccgcgucuucugcgacaccaugaacucccgcacccuccccuccgaggucaaccucugcaacaucgacaucuucaaccccaaguacgacugcaagaucaugaccuccaagaccgacgucuccuccuccgucaucaccucccucggcgccaucgucuccugcuacggcaagaccaagugcaccgccuccaacaagugccgcggcaucaucaagaccuucuccaacggcugcgacuacgucuccaacaagggcgucgacaccgucuccgucggcaacacccucuacuacgucaacaagcaggagggcaagucccucuacgucaagggcgagcccaucaucaacuucuacgacccccucgucuuccccuccgacgaguucgacgccuccaucucccaggucaacgagaagaucaaccagucccucgccuucauccgcaaguccgacgagcuccuccacaacgucaacgucggcaaguccaccaccaacaucaugaucaccaccaucaucaucgucaucaucgucauccuccuccuccucaucgccgucggccucuuccucuacugcaaggcccgcuccacccccgucacccucuccaaggaccagcucuccggcaucaacaacaucgccuucuccaacugaggacuaguggaagcauuuuccuggcugauuaaaagaaauuacucagcuauggucaucuguuccuguuagaaggcuaugcagcauauuauauacuaugcgcauguuaugaaaugcauaauaaaaaauuuuaaaaaaucuaaaagaucuaaaaaaaaaaaaaaaaaaaaaaaaaaaaaaaaaaaaaaaaaaaaaaaaaaaaaaaaaaaaaaaaugcaucccccccccccccccccccccccccccccccaaaggcucuuuucagagccaccagaauu

SEQ ID NO: 17152 - RNA, 1955 nt, Artificial Sequence
  mRNA product Design g-1 comprising derived and/or modified sequence from HRSV(Memphis-37)__AIY60640.1__F_DSCav1_mut5 (opt3)
gggagacuuucccauucuguagcagaauuugguguugccuguggucuuggucccgcggagaagcuuaccauggagcugcccauccucaagaccaacgccauuacaacuauacuugcugcagugacgcugugcuucgccagcucccagaauaucaccgaagaguuuuaccaaucuacauguucagcggucaguaaaggcuauuugagcgcuuuaagaacugggugguacaccuccguuauuacaaucgaacugucuaacauuaaggagaauaaaugcaacggaaccgacgccaaggugaaacuaaucaagcaggaacucgauaaguauaaaaaugcaguaacugagcugcagcuucugaugcagucgaccccugccgcugguucaggcagcgcaauagccagugggaucgcuguguguaaggucuugcaccucgagggagaagugaacaaaauuaagaaugcccugcuguccacaaacaaagcgguugugucucucagcggcugcggugucuccguguuaacguucaagguacuggaccuuaagaauuacaucgauaaacaauugcugccaauucuaaacaagcagucauguaguaucagcaauauagagacuguuauugaauuucagcagaaaaacaauaggcuccuggagaucacccgggaguucucugugaacgcaggggucacaacuccgguguccaccuauaugcuuacaaauucagaacuguugagccucauuaacgacaugcccaucaccaacgaucaaaagaaacugaugaguaauaacgugcagaucguccgccagcagucuuacuccauuaugugcauaaucaaggaggaaguuuuagccuaugugguacaacugccucucuacggagugauugacacgccauguuggaaacuucauacuagcccccugugcacaaccaauacuaaggagggcucgaacaucuguuugacacgaaccgaucguggcugguacugcgacaaugcugggucugucuccuuuuucccucaggccgaaacguguaaggugcagucaaacagaguguuuugcgauaccaugaauaguagaacacugccaagcgaggugaaccucugcaauauagacauuuucaaccccaaauaugauuguaagaucaugacuuccaaaaccgacgucucuagcucagugaucacaagucugggagcaauuguauccugcuacgguaagacuaaauguaccgcuagcaauaagugcaggggcaucauuaagacauuuucuaacgggugugauuauguuucaaauaaaggaguggacaccgucagugugggcaacacucuuuacuaugucaauaagcaagaggguaaaagccuguacgugaagggggaaccuauaaucaacuucuaugacccauugguuuuuccguccgaugaguucgacgccucuauuucgcagguuaacgagaaaaucaaucagagccucgcguuuauccggaaguccgaugaacuguuacacaacguaaaugucggaaagucaacgacaaacauuaugauaaccacuaucauuaucgugauuaucguuauacugcuacuccugaucgccgugggccuuuucuuguacugcaaagcacgcaguacccccgucacacugucuaaggaccagcucagcggcauuaauaacaucgcuuucuccaauugaggacuaguggaagcauuuuccuggcugauuaaaagaaauuacucagcuauggucaucuguuccuguuagaaggcuaugcagcauauuauauacuaugcgcauguuaugaaaugcauaauaaaaaauuuuaaaaaaucuaaaagaucuaaaaaaaaaaaaaaaaaaaaaaaaaaaaaaaaaaaaaaaaaaaaaaaaaaaaaaaaaaaaaaaaugcaucccccccccccccccccccccccccccccccaaaggcucuuuucagagccaccagaauu

SEQ ID NO: 17153 - RNA, 1955 nt, Artificial Sequence
  mRNA product Design g-1 comprising derived and/or modified sequence from HRSV(Memphis-37)__AIY60640.1__F_DSCav1_mut5 (opt4)
gggagacuuucccauucuguagcagaauuugguguugccuguggucuuggucccgcggagaagcuuaccauggagcugcccauccugaagaccaacgccaucaccaccauccuggccgccgugacccugugcuucgccagcagccagaacaucaccgaggaguucuaccagagcaccugcagcgccgugagcaagggcuaccugagcgcccugagaaccggcugguacaccagcgugaucaccaucgagcugagcaacaucaaggagaacaagugcaacggcaccgacgccaaggugaagcugaucaagcaggagcuggacaaguacaagaacgccgugaccgagcugcagcugcugaugcagagcacccccgccgccggcagcggcagcgccaucgccagcggcaucgccgugugcaaggugcugcaccuggagggcgaggugaacaagaucaagaacgcccugcugagcaccaacaaggccguggugagccugagcggcugcggcgugagcgugcugaccuucaaggugcuggaccugaagaacuacaucgacaagcagcugcugcccauccugaacaagcagagcugcagcaucagcaacaucgagaccgugaucgaguuccagcagaagaacaacagacugcuggagaucaccagagaguucagcgugaacgccggcgugaccacccccgugagcaccuacaugcugaccaacagcgagcugcugagccugaucaacgacaugcccaucaccaacgaccagaagaagcugaugagcaacaacgugcagaucgugagacagcagagcuacagcaucaugugcaucaucaaggaggaggugcuggccuacguggugcagcugccccuguacggcgugaucgacacccccugcuggaagcugcacaccagcccccugugcaccaccaacaccaaggagggcagcaacaucugccugaccagaaccgacagaggcugguacugcgacaacgccggcagcgugagcuucuucccccaggccgagaccugcaaggugcagagcaacagaguguucugcgacaccaugaacagcagaacccugcccagcgaggugaaccugugcaacaucgacaucuucaaccccaaguacgacugcaagaucaugaccagcaagaccgacgugagcagcagcgugaucaccagccugggcgccaucgugagcugcuacggcaagaccaagugcaccgccagcaacaagugcagaggcaucaucaagaccuucagcaacggcugcgacuacgugagcaacaagggcguggacaccgugagcgugggcaacacccuguacuacgugaacaagcaggagggcaagagccuguacgugaagggcgagcccaucaucaacuucuacgacccccugguguuccccagcgacgaguucgacgccagcaucagccaggugaacgagaagaucaaccagagccuggccuucaucagaaagagcgacgagcugcugcacaacgugaacgugggcaagagcaccaccaacaucaugaucaccaccaucaucaucgugaucaucgugauccugcugcugcugaucgccgugggccuguuccuguacugcaaggccagaagcacccccgugacccugagcaaggaccagcugagcggcaucaacaacaucgccuucagcaacugaggacuaguggaagcauuuuccuggcugauuaaaagaaauuacucagcuauggucaucuguuccuguuagaaggcuaugcagcauauuauauacuaugcgcauguuaugaaaugcauaauaaaaaauuuuaaaaaaucuaaaagaucuaaaaaaaaaaaaaaaaaaaaaaaaaaaaaaaaaaaaaaaaaaaaaaaaaaaaaaaaaaaaaaaaugcaucccccccccccccccccccccccccccccccaaaggcucuuuucagagccaccagaauu

SEQ ID NO: 17154 - RNA, 1955 nt, Artificial Sequence
  mRNA product Design g-1 comprising derived and/or modified sequence from HRSV(Memphis-37)__AIY60640.1__F_DSCav1_mut5 (opt5)
gggagacuuucccauucuguagcagaauuugguguugccuguggucuuggucccgcggagaagcuuaccauggagcugcccauccucaagaccaacgccauuacaacgauccuggcugccgugacccuuugcuucgcgagcucccagaauauuacagaagaguuuuaccaaucuaccuguagcgcugucuccaaaggcuaucugucugcccucagaacagggugguacaccagcguuaucacaauugaacuguccaacaucaaggagaauaaaugcaacggaaccgacgccaaggugaaacuuaucaagcaggaacuggauaaguauaaaaaugcugugacggagcuccagcugcugaugcagucuaccccugccgcuggcagcggguccgccauugcgagcggaaucgccgucuguaaggugcuccaccuggagggcgaaguuaacaaaauuaagaaugcccuucugucuacaaacaaagcuguggucucccucagcgggugcggagugucuguucugaccuucaaggugcuugaccugaagaauuacaucgauaaacaacuccugccgauucugaacaagcaguccuguagcaucucuaauauugagacagucaucgaauuucagcagaaaaacaaucggcuccuggagaucacccgcgaguucuccgugaacgcuggcgugacgacacccgucagcaccuauaugcuuacaaauuccgaacugcucucucugauuaacgacaugccuaucaccaacgaucaaaagaaacuuaugagcaauaacguucagauugugagacagcaguccuacagcaucaugugcauuaucaaggaggaagugcuggccuaugucgugcaacucccccuguacggcguuaucgacaccccuuguuggaaacugcauacaucuccccucugcacgaccaauacaaaggagggguccaacauuugucugacccggacagaucgcggaugguacugcgacaaugcgggcagcgugagcuuuuucccucaggccgaaaccuguaagguccagucuaacagaguguuuugcgauacgaugaacuccagaacacugccgucugagguuaaucucugcaauaucgacauuuucaaccccaaauaugauuguaagaucaugaccagcaaaaccgacguguccagcucugucauuacaucccugggggcuaucgugagcugcuacggaaagaccaaauguacagccucuaauaagugccggggcaucauuaagacguuuuccaacgggugugauuaugucagcaauaaaggaguggacaccguuuccgugggcaacacacuuuacuaugucaauaagcaagagggcaaaucucuguacgugaagggggaaccuaucauuaacuucuaugacccccucguuuuuccuagcgaugaguucgacgcuuccaucucucaggugaacgagaaaauuaaucagagccuggccuuuauccgcaaguccgaugaacugcuccacaacgucaaugugggaaagagcaccacaaacauuaugaucaccacgaucauuaucgugauuaucguuauucugcuucugcucaucgccgucggccuguuccuguacugcaaagcuagaucuacccccgugacacuuuccaaggaccagcucagcgggaucaauaacauugcguucucuaauugaggacuaguggaagcauuuuccuggcugauuaaaagaaauuacucagcuauggucaucuguuccuguuagaaggcuaugcagcauauuauauacuaugcgcauguuaugaaaugcauaauaaaaaauuuuaaaaaaucuaaaagaucuaaaaaaaaaaaaaaaaaaaaaaaaaaaaaaaaaaaaaaaaaaaaaaaaaaaaaaaaaaaaaaaaugcaucccccccccccccccccccccccccccccccaaaggcucuuuucagagccaccagaauu

SEQ ID NO: 17155 - RNA, 1955 nt, Artificial Sequence
  mRNA product Design g-1 comprising derived and/or modified sequence from HRSV(Memphis-37)__AIY60640.1__F_DSCav1_mut5 (opt6)
gggagacuuucccauucuguagcagaauuugguguugccuguggucuuggucccgcggagaagcuuaccauggaacucccaaucuuaaaaacaaacgcaauaacuacaauacucgcagcaguaacacuaugcuucgcaucaucacaaaacauaaccgaagaauuuuaccaaaguacaugcucagcaguaucaaaagguuaccucucagcccuaagaaccggaugguacacaucaguaaucacuauagaacuauccaauauaaaagaaaacaaaugcaacggcacugacgcaaaaguuaaauuaauuaaacaagaacucgauaaauauaaaaaugcaguaacagaacuacaacuacuaaugcaaagcaccccagcugcaggaagcggaucagcaaucgcaucaggaauagcaguauguaaaguacuacaccuagaaggagaagucaacaaaaucaaaaaugcacuacuaaguacaaacaaagcuguaguaagccuaucagguugcggaguaucaguauuaacauuuaaaguccucgaccuaaaaaauuacauagauaaacaacucuuaccaauacucaauaaacaaaguugcagcaucagcaacauagaaacagucaucgaauuucaacaaaaaaauaauagacuccuagaaauaacacgugaauuuucaguaaaugcuggaguaacaacaccaguaucuacauauaugcuaacaaauagcgaacuacucucacuuauuaacgauaugcccauaacaaacgaccaaaaaaaacuuaugucaaacaauguucaaauaguuagacaacaauccuacagcauaaugugcauaaucaaagaagaaguucuagcuuacguaguacaacuaccacucuaugguguuaucgacacccccuguuggaaacuucacacaucaccacuaugcacaacaaacacaaaagaaggaucaaauauuugcuuaacaagaacagauagaggaugguauugcgauaaugccggaucaguaucauuuuuuccacaagcagaaacauguaaaguacaauccaaccgaguauuuugcgacaccaugaacuccagaacacuaccaucugaagucaaccuauguaauauagauauauuuaacccaaaauaugacuguaaaaucaugacaucaaaaacugauguaaguucuaguguaauaaccagcuuaggcgccauaguaagcuguuacgguaaaacaaaaugcacagcaagcaacaaaugccgcgguauaauaaaaacauucucaaacggaugcgauuauguaaguaacaaaggaguagauacagucuccguaggcaacacauuauacuacguaaacaaacaagaaggaaaaucacuauauguaaaaggagaaccaaucauaaauuucuacgacccacuuguauuccccagcgacgaauuugaugcuuccauuucacaagucaacgaaaaaauaaaccaaucauuagccuucauaagaaaaucagacgaauuauuacauaauguuaaugucggcaaauccacaacuaauauaaugauaacaacaaucauaauaguaauaaucguuauacuacuauuacucauagcaguaggacucuucuuauauuguaaagccagauccaccccaguaacacucucaaaagaccaauuaucaggaauuaauaacaucgcauuuucaaacuaaggacuaguggaagcauuuuccuggcugauuaaaagaaauuacucagcuauggucaucuguuccuguuagaaggcuaugcagcauauuauauacuaugcgcauguuaugaaaugcauaauaaaaaauuuuaaaaaaucuaaaagaucuaaaaaaaaaaaaaaaaaaaaaaaaaaaaaaaaaaaaaaaaaaaaaaaaaaaaaaaaaaaaaaaaugcaucccccccccccccccccccccccccccccccaaaggcucuuuucagagccaccagaauu

SEQ ID NO: 17156 - RNA, 1955 nt, Artificial Sequence
  mRNA product Design g-1 comprising derived and/or modified sequence from HRSV(Memphis-37)__AIY60640.1__F_DSCav1_mut5 (opt11)
gggagacuuucccauucuguagcagaauuugguguugccuguggucuuggucccgcggagaagcuuaccauggaacuccccauccuuaaaaccaacgcaaucaccacaauacucgccgccgucacccucugcuuugcguccucccagaacaucaccgaagaguucuaccaaucgaccugcagcgccgucagcaagggcuaccucucagcccuccgaacaggcugguacacauccgucaucaccaucgaacucucaaacauaaaagaaaacaaguguaacggcaccgacgcgaaaguuaaacucaucaaacaagaacucgauaaauacaaaaacgcaguaaccgaacuacaacuccuaaugcaauccacacccgcagccggcagcggcuccgcaaucgccuccggcauagcagucugcaaaguccuccaccucgaaggagaagucaauaaaaucaaaaacgcccuccuauccaccaacaaagcgguugucucccuguccggaugcggaguuagcguccuaaccuucaaggugcucgaccucaaaaacuacauagacaaacaacuacuccccauacucaacaaacaaucaugcuccaucagcaacaucgagaccgucaucgaguuccaacagaaaaacaaccgccuccucgaaaucacacgagaguucuccguaaacgccggcgucacaacccccguuuccacuuacaugcucacaaacagcgaacuccucucccucaucaacgacaugccaaucaccaacgaccaaaagaaacucauguccaacaacguccaaaucguccgccaacaaagcuacagcauaaugugcaucauaaaagaagaaguacucgcguacguaguccaacuaccccuauacggcgucaucgacacccccugcuggaaacugcacacuucuccccucuguacaaccaacacuaaagaaggcucgaacaucugccucaccagaacagaccgaggaugguacugcgacaacgccggcuccgucagcuucuucccccaggccgaaacaugcaaaguacaaucaaaccgagucuucugcgacacaaugaacagcagaacucuacccuccgaaguuaaccuaugcaacaucgacaucuucaaccccaaauacgacugcaaaauaaugaccucaaaaacagacguguccagcuccguuaucaccucucucggagccaucguauccuguuauggaaaaaccaaaugcaccgccucaaacaaaugccgaggcauaaucaaaacauucucaaauggaugcgacuacguauccaacaaaggagucgacaccgucagcgugggcaauacccucuacuacgucaacaaacaggaagggaaaucccucuauguaaagggcgagcccauuauuaacuucuaugacccccucguguucccaagcgacgaguucgacgccuccauaucacaagucaaugagaaaaucaaccaaucacuagcuuucauucgcaaauccgacgaacuccuucacaacgucaacgucggcaaauccaccaccaacaucaugaucaccaccauaauuaucgucauuaucgucauacuacuccuacucaucgccgucggccucuuccucuauugcaaagcacgcucgacacccgucacccuuucaaaagaccaacuuuccggcauaaacaacauagccuucagcaacuagggacuaguggaagcauuuuccuggcugauuaaaagaaauuacucagcuauggucaucuguuccuguuagaaggcuaugcagcauauuauauacuaugcgcauguuaugaaaugcauaauaaaaaauuuuaaaaaaucuaaaagaucuaaaaaaaaaaaaaaaaaaaaaaaaaaaaaaaaaaaaaaaaaaaaaaaaaaaaaaaaaaaaaaaaugcaucccccccccccccccccccccccccccccccaaaggcucuuuucagagccaccagaauu

SEQ ID NO: 17157 - RNA, 1970 nt, Artificial Sequence
  mRNA product Design g-2 comprising derived and/or modified sequence from HRSV(Memphis-37)__AIY60640.1__F_DSCav1_mut5 (opt1)
gggagaguccgcucagccagguugcagaagcggcuuagcguguguccuaaucuucucucugcguguagguaggccugugccgcaaacaagcuuaccauggagcugcccauccucaagaccaacgccaucaccacgauccuggccgcggugacccugugcuucgccagcucccagaacaucaccgaggaguucuaccagagcacgugcuccgccgucagcaagggcuaccucuccgcccugcgcaccgggugguacaccagcgugaucaccaucgagcuguccaacaucaaggagaacaagugcaacggcaccgacgccaaggugaagcucaucaagcaggagcuggacaaguacaagaacgcggucacggagcugcagcuccugaugcagagcaccccggccgccggcuccgggagcgcgaucgccuccggcaucgccgucugcaaggugcugcaccucgagggcgaggugaacaagaucaagaacgcccugcuguccaccaacaaggccgucgugagccucuccggcugcggggugagcguccugaccuucaaggugcuggaccucaagaacuacaucgacaagcagcugcugcccauccugaacaagcagagcugcuccaucagcaacaucgagaccgucaucgaguuccagcagaagaacaaccgccuccuggagaucacgcgggaguucagcgugaacgcgggcgugaccacccccgucuccaccuacaugcugacgaacagcgagcuccugucccugaucaacgacaugccgaucaccaacgaccagaagaagcucaugagcaacaacgugcagaucgugcgccagcaguccuacagcaucaugugcaucaucaaggaggagguccuggccuacguggugcagcugccccucuacggggucaucgacacccccugcuggaagcugcacaccagcccccugugcacgaccaacaccaaggagggcuccaacaucugccucacccggacggaccgcgggugguacugcgacaacgccggcagcguguccuucuucccgcaggccgagaccugcaagguccagagcaaccggguguucugcgacaccaugaacucccggacccugcccagcgaggugaaccucugcaacaucgacaucuucaaccccaaguacgacugcaagaucaugacguccaagaccgacgucagcuccagcgugaucaccucccugggcgccaucgugagcugcuacgggaagaccaagugcacggcgagcaacaagugccgcggcaucaucaagaccuucuccaacgggugcgacuacgucagcaacaagggcguggacaccguguccgucggcaacacccuguacuacgugaacaagcaggagggcaagagccucuacgugaagggggagcccaucaucaacuucuacgacccgcuggucuuccccuccgacgaguucgacgccagcaucucccaggugaacgagaagaucaaccagagccuggccuucauccggaaguccgacgagcuccugcacaacgugaacgucggcaagagcaccacgaacaucaugaucaccaccaucaucaucgugaucaucgugauccugcugcuccugaucgccgucgggcuguuccucuacugcaaggcccgcuccacccccgugacgcugagcaaggaccagcuguccgggaucaacaacaucgcguucagcaacugaggacuaguaauaaggaaacuguaugaaugucugugggcaggaagugaagagauccuucuguaaagguuuuuggaauuaugucugcugaauaauaaacuuuuuugaaauaauaaaucugguagaaaaaugagaucuaaaaaaaaaaaaaaaaaaaaaaaaaaaaaaaaaaaaaaaaaaaaaaaaaaaaaaaaaaaaaaaaugcaucccccccccccccccccccccccccccccccaaaggcucuuuucagagccaccagaauu

SEQ ID NO: 17158 - RNA, 1970 nt, Artificial Sequence
  mRNA product Design g-2 comprising derived and/or modified sequence from HRSV(Memphis-37)__AIY60640.1__F_DSCav1_mut5 (opt1)
gggagaguccgcucagccagguugcagaagcggcuuagcguguguccuaaucuucucucugcguguagguaggccugugccgcaaacaagcuuaccauggagcugcccauccucaagaccaacgccaucaccacgauccuggccgcggugacccugugcuucgccagcucccagaacaucaccgaggaguucuaccagagcacgugcuccgccgucagcaagggcuaccucuccgcccugcgcaccgggugguacaccagcgugaucaccaucgagcuguccaacaucaaggagaacaagugcaacggcaccgacgccaaggugaagcucaucaagcaggagcuggacaaguacaagaacgcggucacggagcugcagcuccugaugcagagcaccccggccgccggguccggcagcgccaucgcguccgggaucgccgugugcaaggugcugcaccucgagggcgaggucaacaagaucaagaacgcccugcugagcaccaacaaggccguggugucccucagcggcugcggggucuccgugcugaccuucaaggugcuggaccucaagaacuacaucgacaagcagcugcugcccauccucaacaagcagagcugcuccaucagcaacaucgagacggucaucgaguuccagcagaagaacaaccggcugcuggagaucacccgcgaguucuccgugaacgccggcgugaccacccccgucagcacguacaugcucaccaacagcgagcugcugucccucaucaacgacaugcccaucaccaacgaccagaagaagcugaugagcaacaacgugcagaucgugcggcagcaguccuacagcaucaugugcaucaucaaggaggagguccuggcguacguggugcagcucccgcuguacggggucaucgacacccccugcuggaagcugcacacgagcccccucugcaccaccaacaccaaggagggcuccaacaucugccugacgcgcaccgaccgggggugguacugcgacaacgccggcuccgugagcuucuucccccaggccgagaccugcaaggugcaguccaaccgcgucuucugcgacaccaugaacagccggacgcucccguccgaggugaaccugugcaacaucgacaucuucaaccccaaguacgacugcaagaucaugaccagcaagaccgacgucuccagcuccgugaucaccagccugggcgccaucguguccugcuacgggaagacgaagugcaccgccagcaacaagugccggggcaucaucaagaccuucuccaacgggugcgacuacgucagcaacaagggcguggacaccgugagcgucggcaacacgcucuacuacgugaacaagcaggaggggaagucccuguacgugaagggcgagcccaucaucaacuucuacgacccccuggucuucccgagcgacgaguucgacgcguccaucagccaggugaacgagaagaucaaccagucccucgccuucauccgcaagagcgacgagcugcugcacaacgugaacgucgggaaguccaccaccaacaucaugaucaccaccaucaucaucgugaucaucgugauccuccugcugcucaucgccgucggccuguuccuguacugcaaggcccggagcacgcccgugacccuguccaaggaccagcucagcgggaucaacaacaucgccuucuccaacugaggacuaguaauaaggaaacuguaugaaugucugugggcaggaagugaagagauccuucuguaaagguuuuuggaauuaugucugcugaauaauaaacuuuuuugaaauaauaaaucugguagaaaaaugagaucuaaaaaaaaaaaaaaaaaaaaaaaaaaaaaaaaaaaaaaaaaaaaaaaaaaaaaaaaaaaaaaaaugcaucccccccccccccccccccccccccccccccaaaggcucuuuucagagccaccagaauu

SEQ ID NO: 17159 - RNA, 1970 nt, Artificial Sequence
  mRNA product Design g-2 comprising derived and/or modified sequence from HRSV(Memphis-37)__AIY60640.1__F_DSCav1_mut5 (opt2)
gggagaguccgcucagccagguugcagaagcggcuuagcguguguccuaaucuucucucugcguguagguaggccugugccgcaaacaagcuuaccauggagcuccccauccucaagaccaacgccaucaccaccauccucgccgccgucacccucugcuucgccuccucccagaacaucaccgaggaguucuaccaguccaccugcuccgccgucuccaagggcuaccucuccgcccuccgcaccggcugguacaccuccgucaucaccaucgagcucuccaacaucaaggagaacaagugcaacggcaccgacgccaaggucaagcucaucaagcaggagcucgacaaguacaagaacgccgucaccgagcuccagcuccucaugcaguccacccccgccgccggcuccggcuccgccaucgccuccggcaucgccgucugcaagguccuccaccucgagggcgaggucaacaagaucaagaacgcccuccucuccaccaacaaggccgucgucucccucuccggcugcggcgucuccguccucaccuucaagguccucgaccucaagaacuacaucgacaagcagcuccuccccauccucaacaagcaguccugcuccaucuccaacaucgagaccgucaucgaguuccagcagaagaacaaccgccuccucgagaucacccgcgaguucuccgucaacgccggcgucaccacccccgucuccaccuacaugcucaccaacuccgagcuccucucccucaucaacgacaugcccaucaccaacgaccagaagaagcucauguccaacaacguccagaucguccgccagcaguccuacuccaucaugugcaucaucaaggaggagguccucgccuacgucguccagcucccccucuacggcgucaucgacacccccugcuggaagcuccacaccuccccccucugcaccaccaacaccaaggagggcuccaacaucugccucacccgcaccgaccgcggcugguacugcgacaacgccggcuccgucuccuucuucccccaggccgagaccugcaagguccaguccaaccgcgucuucugcgacaccaugaacucccgcacccuccccuccgaggucaaccucugcaacaucgacaucuucaaccccaaguacgacugcaagaucaugaccuccaagaccgacgucuccuccuccgucaucaccucccucggcgccaucgucuccugcuacggcaagaccaagugcaccgccuccaacaagugccgcggcaucaucaagaccuucuccaacggcugcgacuacgucuccaacaagggcgucgacaccgucuccgucggcaacacccucuacuacgucaacaagcaggagggcaagucccucuacgucaagggcgagcccaucaucaacuucuacgacccccucgucuuccccuccgacgaguucgacgccuccaucucccaggucaacgagaagaucaaccagucccucgccuucauccgcaaguccgacgagcuccuccacaacgucaacgucggcaaguccaccaccaacaucaugaucaccaccaucaucaucgucaucaucgucauccuccuccuccucaucgccgucggccucuuccucuacugcaaggcccgcuccacccccgucacccucuccaaggaccagcucuccggcaucaacaacaucgccuucuccaacugaggacuaguaauaaggaaacuguaugaaugucugugggcaggaagugaagagauccuucuguaaagguuuuuggaauuaugucugcugaauaauaaacuuuuuugaaauaauaaaucugguagaaaaaugagaucuaaaaaaaaaaaaaaaaaaaaaaaaaaaaaaaaaaaaaaaaaaaaaaaaaaaaaaaaaaaaaaaaugcaucccccccccccccccccccccccccccccccaaaggcucuuuucagagccaccagaauu

SEQ ID NO: 17160 - RNA, 1970 nt, Artificial Sequence
  mRNA product Design g-2 comprising derived and/or modified sequence from HRSV(Memphis-37)__AIY60640.1__F_DSCav1_mut5 (opt3)
gggagaguccgcucagccagguugcagaagcggcuuagcguguguccuaaucuucucucugcguguagguaggccugugccgcaaacaagcuuaccauggagcugcccauccucaagaccaacgccauuacaacuauacuugcugcagugacgcugugcuucgccagcucccagaauaucaccgaagaguuuuaccaaucuacauguucagcggucaguaaaggcuauuugagcgcuuuaagaacugggugguacaccuccguuauuacaaucgaacugucuaacauuaaggagaauaaaugcaacggaaccgacgccaaggugaaacuaaucaagcaggaacucgauaaguauaaaaaugcaguaacugagcugcagcuucugaugcagucgaccccugccgcugguucaggcagcgcaauagccagugggaucgcuguguguaaggucuugcaccucgagggagaagugaacaaaauuaagaaugcccugcuguccacaaacaaagcgguugugucucucagcggcugcggugucuccguguuaacguucaagguacuggaccuuaagaauuacaucgauaaacaauugcugccaauucuaaacaagcagucauguaguaucagcaauauagagacuguuauugaauuucagcagaaaaacaauaggcuccuggagaucacccgggaguucucugugaacgcaggggucacaacuccgguguccaccuauaugcuuacaaauucagaacuguugagccucauuaacgacaugcccaucaccaacgaucaaaagaaacugaugaguaauaacgugcagaucguccgccagcagucuuacuccauuaugugcauaaucaaggaggaaguuuuagccuaugugguacaacugccucucuacggagugauugacacgccauguuggaaacuucauacuagcccccugugcacaaccaauacuaaggagggcucgaacaucuguuugacacgaaccgaucguggcugguacugcgacaaugcugggucugucuccuuuuucccucaggccgaaacguguaaggugcagucaaacagaguguuuugcgauaccaugaauaguagaacacugccaagcgaggugaaccucugcaauauagacauuuucaaccccaaauaugauuguaagaucaugacuuccaaaaccgacgucucuagcucagugaucacaagucugggagcaauuguauccugcuacgguaagacuaaauguaccgcuagcaauaagugcaggggcaucauuaagacauuuucuaacgggugugauuauguuucaaauaaaggaguggacaccgucagugugggcaacacucuuuacuaugucaauaagcaagaggguaaaagccuguacgugaagggggaaccuauaaucaacuucuaugacccauugguuuuuccguccgaugaguucgacgccucuauuucgcagguuaacgagaaaaucaaucagagccucgcguuuauccggaaguccgaugaacuguuacacaacguaaaugucggaaagucaacgacaaacauuaugauaaccacuaucauuaucgugauuaucguuauacugcuacuccugaucgccgugggccuuuucuuguacugcaaagcacgcaguacccccgucacacugucuaaggaccagcucagcggcauuaauaacaucgcuuucuccaauugaggacuaguaauaaggaaacuguaugaaugucugugggcaggaagugaagagauccuucuguaaagguuuuuggaauuaugucugcugaauaauaaacuuuuuugaaauaauaaaucugguagaaaaaugagaucuaaaaaaaaaaaaaaaaaaaaaaaaaaaaaaaaaaaaaaaaaaaaaaaaaaaaaaaaaaaaaaaaugcaucccccccccccccccccccccccccccccccaaaggcucuuuucagagccaccagaauu

SEQ ID NO: 17161 - RNA, 1970 nt, Artificial Sequence
  mRNA product Design g-2 comprising derived and/or modified sequence from HRSV(Memphis-37)__AIY60640.1__F_DSCav1_mut5 (opt4)
gggagaguccgcucagccagguugcagaagcggcuuagcguguguccuaaucuucucucugcguguagguaggccugugccgcaaacaagcuuaccauggagcugcccauccugaagaccaacgccaucaccaccauccuggccgccgugacccugugcuucgccagcagccagaacaucaccgaggaguucuaccagagcaccugcagcgccgugagcaagggcuaccugagcgcccugagaaccggcugguacaccagcgugaucaccaucgagcugagcaacaucaaggagaacaagugcaacggcaccgacgccaaggugaagcugaucaagcaggagcuggacaaguacaagaacgccgugaccgagcugcagcugcugaugcagagcacccccgccgccggcagcggcagcgccaucgccagcggcaucgccgugugcaaggugcugcaccuggagggcgaggugaacaagaucaagaacgcccugcugagcaccaacaaggccguggugagccugagcggcugcggcgugagcgugcugaccuucaaggugcuggaccugaagaacuacaucgacaagcagcugcugcccauccugaacaagcagagcugcagcaucagcaacaucgagaccgugaucgaguuccagcagaagaacaacagacugcuggagaucaccagagaguucagcgugaacgccggcgugaccacccccgugagcaccuacaugcugaccaacagcgagcugcugagccugaucaacgacaugcccaucaccaacgaccagaagaagcugaugagcaacaacgugcagaucgugagacagcagagcuacagcaucaugugcaucaucaaggaggaggugcuggccuacguggugcagcugccccuguacggcgugaucgacacccccugcuggaagcugcacaccagcccccugugcaccaccaacaccaaggagggcagcaacaucugccugaccagaaccgacagaggcugguacugcgacaacgccggcagcgugagcuucuucccccaggccgagaccugcaaggugcagagcaacagaguguucugcgacaccaugaacagcagaacccugcccagcgaggugaaccugugcaacaucgacaucuucaaccccaaguacgacugcaagaucaugaccagcaagaccgacgugagcagcagcgugaucaccagccugggcgccaucgugagcugcuacggcaagaccaagugcaccgccagcaacaagugcagaggcaucaucaagaccuucagcaacggcugcgacuacgugagcaacaagggcguggacaccgugagcgugggcaacacccuguacuacgugaacaagcaggagggcaagagccuguacgugaagggcgagcccaucaucaacuucuacgacccccugguguuccccagcgacgaguucgacgccagcaucagccaggugaacgagaagaucaaccagagccuggccuucaucagaaagagcgacgagcugcugcacaacgugaacgugggcaagagcaccaccaacaucaugaucaccaccaucaucaucgugaucaucgugauccugcugcugcugaucgccgugggccuguuccuguacugcaaggccagaagcacccccgugacccugagcaaggaccagcugagcggcaucaacaacaucgccuucagcaacugaggacuaguaauaaggaaacuguaugaaugucugugggcaggaagugaagagauccuucuguaaagguuuuuggaauuaugucugcugaauaauaaacuuuuuugaaauaauaaaucugguagaaaaaugagaucuaaaaaaaaaaaaaaaaaaaaaaaaaaaaaaaaaaaaaaaaaaaaaaaaaaaaaaaaaaaaaaaaugcaucccccccccccccccccccccccccccccccaaaggcucuuuucagagccaccagaauu

SEQ ID NO: 17162 - RNA, 1970 nt, Artificial Sequence
  mRNA product Design g-2 comprising derived and/or modified sequence from HRSV(Memphis-37)__AIY60640.1__F_DSCav1_mut5 (opt5)
gggagaguccgcucagccagguugcagaagcggcuuagcguguguccuaaucuucucucugcguguagguaggccugugccgcaaacaagcuuaccauggagcugcccauccucaagaccaacgccauuacaacgauccuggcugccgugacccuuugcuucgcgagcucccagaauauuacagaagaguuuuaccaaucuaccuguagcgcugucuccaaaggcuaucugucugcccucagaacagggugguacaccagcguuaucacaauugaacuguccaacaucaaggagaauaaaugcaacggaaccgacgccaaggugaaacuuaucaagcaggaacuggauaaguauaaaaaugcugugacggagcuccagcugcugaugcagucuaccccugccgcuggcagcggguccgccauugcgagcggaaucgccgucuguaaggugcuccaccuggagggcgaaguuaacaaaauuaagaaugcccuucugucuacaaacaaagcuguggucucccucagcgggugcggagugucuguucugaccuucaaggugcuugaccugaagaauuacaucgauaaacaacuccugccgauucugaacaagcaguccuguagcaucucuaauauugagacagucaucgaauuucagcagaaaaacaaucggcuccuggagaucacccgcgaguucuccgugaacgcuggcgugacgacacccgucagcaccuauaugcuuacaaauuccgaacugcucucucugauuaacgacaugccuaucaccaacgaucaaaagaaacuuaugagcaauaacguucagauugugagacagcaguccuacagcaucaugugcauuaucaaggaggaagugcuggccuaugucgugcaacucccccuguacggcguuaucgacaccccuuguuggaaacugcauacaucuccccucugcacgaccaauacaaaggagggguccaacauuugucugacccggacagaucgcggaugguacugcgacaaugcgggcagcgugagcuuuuucccucaggccgaaaccuguaagguccagucuaacagaguguuuugcgauacgaugaacuccagaacacugccgucugagguuaaucucugcaauaucgacauuuucaaccccaaauaugauuguaagaucaugaccagcaaaaccgacguguccagcucugucauuacaucccugggggcuaucgugagcugcuacggaaagaccaaauguacagccucuaauaagugccggggcaucauuaagacguuuuccaacgggugugauuaugucagcaauaaaggaguggacaccguuuccgugggcaacacacuuuacuaugucaauaagcaagagggcaaaucucuguacgugaagggggaaccuaucauuaacuucuaugacccccucguuuuuccuagcgaugaguucgacgcuuccaucucucaggugaacgagaaaauuaaucagagccuggccuuuauccgcaaguccgaugaacugcuccacaacgucaaugugggaaagagcaccacaaacauuaugaucaccacgaucauuaucgugauuaucguuauucugcuucugcucaucgccgucggccuguuccuguacugcaaagcuagaucuacccccgugacacuuuccaaggaccagcucagcgggaucaauaacauugcguucucuaauugaggacuaguaauaaggaaacuguaugaaugucugugggcaggaagugaagagauccuucuguaaagguuuuuggaauuaugucugcugaauaauaaacuuuuuugaaauaauaaaucugguagaaaaaugagaucuaaaaaaaaaaaaaaaaaaaaaaaaaaaaaaaaaaaaaaaaaaaaaaaaaaaaaaaaaaaaaaaaugcaucccccccccccccccccccccccccccccccaaaggcucuuuucagagccaccagaauu

SEQ ID NO: 17163 - RNA, 1970 nt, Artificial Sequence
  mRNA product Design g-2 comprising derived and/or modified sequence from HRSV(Memphis-37)__AIY60640.1__F_DSCav1_mut5 (opt6)
gggagaguccgcucagccagguugcagaagcggcuuagcguguguccuaaucuucucucugcguguagguaggccugugccgcaaacaagcuuaccauggaacucccaaucuuaaaaacaaacgcaauaacuacaauacucgcagcaguaacacuaugcuucgcaucaucacaaaacauaaccgaagaauuuuaccaaaguacaugcucagcaguaucaaaagguuaccucucagcccuaagaaccggaugguacacaucaguaaucacuauagaacuauccaauauaaaagaaaacaaaugcaacggcacugacgcaaaaguuaaauuaauuaaacaagaacucgauaaauauaaaaaugcaguaacagaacuacaacuacuaaugcaaagcaccccagcugcaggaagcggaucagcaaucgcaucaggaauagcaguauguaaaguacuacaccuagaaggagaagucaacaaaaucaaaaaugcacuacuaaguacaaacaaagcuguaguaagccuaucagguugcggaguaucaguauuaacauuuaaaguccucgaccuaaaaaauuacauagauaaacaacucuuaccaauacucaauaaacaaaguugcagcaucagcaacauagaaacagucaucgaauuucaacaaaaaaauaauagacuccuagaaauaacacgugaauuuucaguaaaugcuggaguaacaacaccaguaucuacauauaugcuaacaaauagcgaacuacucucacuuauuaacgauaugcccauaacaaacgaccaaaaaaaacuuaugucaaacaauguucaaauaguuagacaacaauccuacagcauaaugugcauaaucaaagaagaaguucuagcuuacguaguacaacuaccacucuaugguguuaucgacacccccuguuggaaacuucacacaucaccacuaugcacaacaaacacaaaagaaggaucaaauauuugcuuaacaagaacagauagaggaugguauugcgauaaugccggaucaguaucauuuuuuccacaagcagaaacauguaaaguacaauccaaccgaguauuuugcgacaccaugaacuccagaacacuaccaucugaagucaaccuauguaauauagauauauuuaacccaaaauaugacuguaaaaucaugacaucaaaaacugauguaaguucuaguguaauaaccagcuuaggcgccauaguaagcuguuacgguaaaacaaaaugcacagcaagcaacaaaugccgcgguauaauaaaaacauucucaaacggaugcgauuauguaaguaacaaaggaguagauacagucuccguaggcaacacauuauacuacguaaacaaacaagaaggaaaaucacuauauguaaaaggagaaccaaucauaaauuucuacgacccacuuguauuccccagcgacgaauuugaugcuuccauuucacaagucaacgaaaaaauaaaccaaucauuagccuucauaagaaaaucagacgaauuauuacauaauguuaaugucggcaaauccacaacuaauauaaugauaacaacaaucauaauaguaauaaucguuauacuacuauuacucauagcaguaggacucuucuuauauuguaaagccagauccaccccaguaacacucucaaaagaccaauuaucaggaauuaauaacaucgcauuuucaaacuaaggacuaguaauaaggaaacuguaugaaugucugugggcaggaagugaagagauccuucuguaaagguuuuuggaauuaugucugcugaauaauaaacuuuuuugaaauaauaaaucugguagaaaaaugagaucuaaaaaaaaaaaaaaaaaaaaaaaaaaaaaaaaaaaaaaaaaaaaaaaaaaaaaaaaaaaaaaaaugcaucccccccccccccccccccccccccccccccaaaggcucuuuucagagccaccagaauu

SEQ ID NO: 17164 - RNA, 1970 nt, Artificial Sequence
  mRNA product Design g-2 comprising derived and/or modified sequence from HRSV(Memphis-37)__AIY60640.1__F_DSCav1_mut5 (opt11)
gggagaguccgcucagccagguugcagaagcggcuuagcguguguccuaaucuucucucugcguguagguaggccugugccgcaaacaagcuuaccauggaacuccccauccuuaaaaccaacgcaaucaccacaauacucgccgccgucacccucugcuuugcguccucccagaacaucaccgaagaguucuaccaaucgaccugcagcgccgucagcaagggcuaccucucagcccuccgaacaggcugguacacauccgucaucaccaucgaacucucaaacauaaaagaaaacaaguguaacggcaccgacgcgaaaguuaaacucaucaaacaagaacucgauaaauacaaaaacgcaguaaccgaacuacaacuccuaaugcaauccacacccgcagccggcagcggcuccgcaaucgccuccggcauagcagucugcaaaguccuccaccucgaaggagaagucaauaaaaucaaaaacgcccuccuauccaccaacaaagcgguugucucccuguccggaugcggaguuagcguccuaaccuucaaggugcucgaccucaaaaacuacauagacaaacaacuacuccccauacucaacaaacaaucaugcuccaucagcaacaucgagaccgucaucgaguuccaacagaaaaacaaccgccuccucgaaaucacacgagaguucuccguaaacgccggcgucacaacccccguuuccacuuacaugcucacaaacagcgaacuccucucccucaucaacgacaugccaaucaccaacgaccaaaagaaacucauguccaacaacguccaaaucguccgccaacaaagcuacagcauaaugugcaucauaaaagaagaaguacucgcguacguaguccaacuaccccuauacggcgucaucgacacccccugcuggaaacugcacacuucuccccucuguacaaccaacacuaaagaaggcucgaacaucugccucaccagaacagaccgaggaugguacugcgacaacgccggcuccgucagcuucuucccccaggccgaaacaugcaaaguacaaucaaaccgagucuucugcgacacaaugaacagcagaacucuacccuccgaaguuaaccuaugcaacaucgacaucuucaaccccaaauacgacugcaaaauaaugaccucaaaaacagacguguccagcuccguuaucaccucucucggagccaucguauccuguuauggaaaaaccaaaugcaccgccucaaacaaaugccgaggcauaaucaaaacauucucaaauggaugcgacuacguauccaacaaaggagucgacaccgucagcgugggcaauacccucuacuacgucaacaaacaggaagggaaaucccucuauguaaagggcgagcccauuauuaacuucuaugacccccucguguucccaagcgacgaguucgacgccuccauaucacaagucaaugagaaaaucaaccaaucacuagcuuucauucgcaaauccgacgaacuccuucacaacgucaacgucggcaaauccaccaccaacaucaugaucaccaccauaauuaucgucauuaucgucauacuacuccuacucaucgccgucggccucuuccucuauugcaaagcacgcucgacacccgucacccuuucaaaagaccaacuuuccggcauaaacaacauagccuucagcaacuagggacuaguaauaaggaaacuguaugaaugucugugggcaggaagugaagagauccuucuguaaagguuuuuggaauuaugucugcugaauaauaaacuuuuuugaaauaauaaaucugguagaaaaaugagaucuaaaaaaaaaaaaaaaaaaaaaaaaaaaaaaaaaaaaaaaaaaaaaaaaaaaaaaaaaaaaaaaaugcaucccccccccccccccccccccccccccccccaaaggcucuuuucagagccaccagaauu

SEQ ID NO: 17165 - RNA, 2202 nt, Artificial Sequence
  mRNA product Design g-3 comprising derived and/or modified sequence from HRSV(Memphis-37)__AIY60640.1__F_DSCav1_mut5 (opt1)
gggagaguccgcucagccagguugcagaagcggcuuagcguguguccuaaucuucucucugcguguagguaggccugugccgcaaacaagcuuaccauggagcugcccauccucaagaccaacgccaucaccacgauccuggccgcggugacccugugcuucgccagcucccagaacaucaccgaggaguucuaccagagcacgugcuccgccgucagcaagggcuaccucuccgcccugcgcaccgggugguacaccagcgugaucaccaucgagcuguccaacaucaaggagaacaagugcaacggcaccgacgccaaggugaagcucaucaagcaggagcuggacaaguacaagaacgcggucacggagcugcagcuccugaugcagagcaccccggccgccggcuccgggagcgcgaucgccuccggcaucgccgucugcaaggugcugcaccucgagggcgaggugaacaagaucaagaacgcccugcuguccaccaacaaggccgucgugagccucuccggcugcggggugagcguccugaccuucaaggugcuggaccucaagaacuacaucgacaagcagcugcugcccauccugaacaagcagagcugcuccaucagcaacaucgagaccgucaucgaguuccagcagaagaacaaccgccuccuggagaucacgcgggaguucagcgugaacgcgggcgugaccacccccgucuccaccuacaugcugacgaacagcgagcuccugucccugaucaacgacaugccgaucaccaacgaccagaagaagcucaugagcaacaacgugcagaucgugcgccagcaguccuacagcaucaugugcaucaucaaggaggagguccuggccuacguggugcagcugccccucuacggggucaucgacacccccugcuggaagcugcacaccagcccccugugcacgaccaacaccaaggagggcuccaacaucugccucacccggacggaccgcgggugguacugcgacaacgccggcagcguguccuucuucccgcaggccgagaccugcaagguccagagcaaccggguguucugcgacaccaugaacucccggacccugcccagcgaggugaaccucugcaacaucgacaucuucaaccccaaguacgacugcaagaucaugacguccaagaccgacgucagcuccagcgugaucaccucccugggcgccaucgugagcugcuacgggaagaccaagugcacggcgagcaacaagugccgcggcaucaucaagaccuucuccaacgggugcgacuacgucagcaacaagggcguggacaccguguccgucggcaacacccuguacuacgugaacaagcaggagggcaagagccucuacgugaagggggagcccaucaucaacuucuacgacccgcuggucuuccccuccgacgaguucgacgccagcaucucccaggugaacgagaagaucaaccagagccuggccuucauccggaaguccgacgagcuccugcacaacgugaacgucggcaagagcaccacgaacaucaugaucaccaccaucaucaucgugaucaucgugauccugcugcuccugaucgccgucgggcuguuccucuacugcaaggcccgcuccacccccgugacgcugagcaaggaccagcuguccgggaucaacaacaucgcguucagcaacugaggacuagugaagggaacacccaaauuuaauucagccuuaagcacaauuaauuaagagugaaacguaauuguacaagcaguuggucacccaccauagggcaugaucaacaccgcaaccuuuccuuuuucccccagugauucugaaaaaccccucuucccuucagcuugcuuagauguuccaaauuuaguaagcuuaaggcggccuacagaagaaaaagaaaaaaaaggccacaaaaguucccucucacuuucaguaaauaaaauaaaagcagcaacagaaauaaagaaauaaaugaaauucaaaaugaaauaaauauuguguugugcagcauuaaaaaaucaauaaaaauuaaaaaugagcaagaucuaaaaaaaaaaaaaaaaaaaaaaaaaaaaaaaaaaaaaaaaaaaaaaaaaaaaaaaaaaaaaaaaugcaucccccccccccccccccccccccccccccccaaaggcucuuuucagagccaccagaauu

SEQ ID NO: 17166 - RNA, 2202 nt, Artificial Sequence
  mRNA product Design g-3 comprising derived and/or modified sequence from HRSV(Memphis-37)__AIY60640.1__F_DSCav1_mut5 (opt1)
gggagaguccgcucagccagguugcagaagcggcuuagcguguguccuaaucuucucucugcguguagguaggccugugccgcaaacaagcuuaccauggagcugcccauccucaagaccaacgccaucaccacgauccuggccgcggugacccugugcuucgccagcucccagaacaucaccgaggaguucuaccagagcacgugcuccgccgucagcaagggcuaccucuccgcccugcgcaccgggugguacaccagcgugaucaccaucgagcuguccaacaucaaggagaacaagugcaacggcaccgacgccaaggugaagcucaucaagcaggagcuggacaaguacaagaacgcggucacggagcugcagcuccugaugcagagcaccccggccgccggguccggcagcgccaucgcguccgggaucgccgugugcaaggugcugcaccucgagggcgaggucaacaagaucaagaacgcccugcugagcaccaacaaggccguggugucccucagcggcugcggggucuccgugcugaccuucaaggugcuggaccucaagaacuacaucgacaagcagcugcugcccauccucaacaagcagagcugcuccaucagcaacaucgagacggucaucgaguuccagcagaagaacaaccggcugcuggagaucacccgcgaguucuccgugaacgccggcgugaccacccccgucagcacguacaugcucaccaacagcgagcugcugucccucaucaacgacaugcccaucaccaacgaccagaagaagcugaugagcaacaacgugcagaucgugcggcagcaguccuacagcaucaugugcaucaucaaggaggagguccuggcguacguggugcagcucccgcuguacggggucaucgacacccccugcuggaagcugcacacgagcccccucugcaccaccaacaccaaggagggcuccaacaucugccugacgcgcaccgaccgggggugguacugcgacaacgccggcuccgugagcuucuucccccaggccgagaccugcaaggugcaguccaaccgcgucuucugcgacaccaugaacagccggacgcucccguccgaggugaaccugugcaacaucgacaucuucaaccccaaguacgacugcaagaucaugaccagcaagaccgacgucuccagcuccgugaucaccagccugggcgccaucguguccugcuacgggaagacgaagugcaccgccagcaacaagugccggggcaucaucaagaccuucuccaacgggugcgacuacgucagcaacaagggcguggacaccgugagcgucggcaacacgcucuacuacgugaacaagcaggaggggaagucccuguacgugaagggcgagcccaucaucaacuucuacgacccccuggucuucccgagcgacgaguucgacgcguccaucagccaggugaacgagaagaucaaccagucccucgccuucauccgcaagagcgacgagcugcugcacaacgugaacgucgggaaguccaccaccaacaucaugaucaccaccaucaucaucgugaucaucgugauccuccugcugcucaucgccgucggccuguuccuguacugcaaggcccggagcacgcccgugacccuguccaaggaccagcucagcgggaucaacaacaucgccuucuccaacugaggacuagugaagggaacacccaaauuuaauucagccuuaagcacaauuaauuaagagugaaacguaauuguacaagcaguuggucacccaccauagggcaugaucaacaccgcaaccuuuccuuuuucccccagugauucugaaaaaccccucuucccuucagcuugcuuagauguuccaaauuuaguaagcuuaaggcggccuacagaagaaaaagaaaaaaaaggccacaaaaguucccucucacuuucaguaaauaaaauaaaagcagcaacagaaauaaagaaauaaaugaaauucaaaaugaaauaaauauuguguugugcagcauuaaaaaaucaauaaaaauuaaaaaugagcaagaucuaaaaaaaaaaaaaaaaaaaaaaaaaaaaaaaaaaaaaaaaaaaaaaaaaaaaaaaaaaaaaaaaugcaucccccccccccccccccccccccccccccccaaaggcucuuuucagagccaccagaauu

SEQ ID NO: 17167 - RNA, 2202 nt, Artificial Sequence
  mRNA product Design g-3 comprising derived and/or modified sequence from HRSV(Memphis-37)__AIY60640.1__F_DSCav1_mut5 (opt2)
gggagaguccgcucagccagguugcagaagcggcuuagcguguguccuaaucuucucucugcguguagguaggccugugccgcaaacaagcuuaccauggagcuccccauccucaagaccaacgccaucaccaccauccucgccgccgucacccucugcuucgccuccucccagaacaucaccgaggaguucuaccaguccaccugcuccgccgucuccaagggcuaccucuccgcccuccgcaccggcugguacaccuccgucaucaccaucgagcucuccaacaucaaggagaacaagugcaacggcaccgacgccaaggucaagcucaucaagcaggagcucgacaaguacaagaacgccgucaccgagcuccagcuccucaugcaguccacccccgccgccggcuccggcuccgccaucgccuccggcaucgccgucugcaagguccuccaccucgagggcgaggucaacaagaucaagaacgcccuccucuccaccaacaaggccgucgucucccucuccggcugcggcgucuccguccucaccuucaagguccucgaccucaagaacuacaucgacaagcagcuccuccccauccucaacaagcaguccugcuccaucuccaacaucgagaccgucaucgaguuccagcagaagaacaaccgccuccucgagaucacccgcgaguucuccgucaacgccggcgucaccacccccgucuccaccuacaugcucaccaacuccgagcuccucucccucaucaacgacaugcccaucaccaacgaccagaagaagcucauguccaacaacguccagaucguccgccagcaguccuacuccaucaugugcaucaucaaggaggagguccucgccuacgucguccagcucccccucuacggcgucaucgacacccccugcuggaagcuccacaccuccccccucugcaccaccaacaccaaggagggcuccaacaucugccucacccgcaccgaccgcggcugguacugcgacaacgccggcuccgucuccuucuucccccaggccgagaccugcaagguccaguccaaccgcgucuucugcgacaccaugaacucccgcacccuccccuccgaggucaaccucugcaacaucgacaucuucaaccccaaguacgacugcaagaucaugaccuccaagaccgacgucuccuccuccgucaucaccucccucggcgccaucgucuccugcuacggcaagaccaagugcaccgccuccaacaagugccgcggcaucaucaagaccuucuccaacggcugcgacuacgucuccaacaagggcgucgacaccgucuccgucggcaacacccucuacuacgucaacaagcaggagggcaagucccucuacgucaagggcgagcccaucaucaacuucuacgacccccucgucuuccccuccgacgaguucgacgccuccaucucccaggucaacgagaagaucaaccagucccucgccuucauccgcaaguccgacgagcuccuccacaacgucaacgucggcaaguccaccaccaacaucaugaucaccaccaucaucaucgucaucaucgucauccuccuccuccucaucgccgucggccucuuccucuacugcaaggcccgcuccacccccgucacccucuccaaggaccagcucuccggcaucaacaacaucgccuucuccaacugaggacuagugaagggaacacccaaauuuaauucagccuuaagcacaauuaauuaagagugaaacguaauuguacaagcaguuggucacccaccauagggcaugaucaacaccgcaaccuuuccuuuuucccccagugauucugaaaaaccccucuucccuucagcuugcuuagauguuccaaauuuaguaagcuuaaggcggccuacagaagaaaaagaaaaaaaaggccacaaaaguucccucucacuuucaguaaauaaaauaaaagcagcaacagaaauaaagaaauaaaugaaauucaaaaugaaauaaauauuguguugugcagcauuaaaaaaucaauaaaaauuaaaaaugagcaagaucuaaaaaaaaaaaaaaaaaaaaaaaaaaaaaaaaaaaaaaaaaaaaaaaaaaaaaaaaaaaaaaaaugcaucccccccccccccccccccccccccccccccaaaggcucuuuucagagccaccagaauu

SEQ ID NO: 17168 - RNA, 2202 nt, Artificial Sequence
  mRNA product Design g-3 comprising derived and/or modified sequence from HRSV(Memphis-37)__AIY60640.1__F_DSCav1_mut5 (opt3)
gggagaguccgcucagccagguugcagaagcggcuuagcguguguccuaaucuucucucugcguguagguaggccugugccgcaaacaagcuuaccauggagcugcccauccucaagaccaacgccauuacaacuauacuugcugcagugacgcugugcuucgccagcucccagaauaucaccgaagaguuuuaccaaucuacauguucagcggucaguaaaggcuauuugagcgcuuuaagaacugggugguacaccuccguuauuacaaucgaacugucuaacauuaaggagaauaaaugcaacggaaccgacgccaaggugaaacuaaucaagcaggaacucgauaaguauaaaaaugcaguaacugagcugcagcuucugaugcagucgaccccugccgcugguucaggcagcgcaauagccagugggaucgcuguguguaaggucuugcaccucgagggagaagugaacaaaauuaagaaugcccugcuguccacaaacaaagcgguugugucucucagcggcugcggugucuccguguuaacguucaagguacuggaccuuaagaauuacaucgauaaacaauugcugccaauucuaaacaagcagucauguaguaucagcaauauagagacuguuauugaauuucagcagaaaaacaauaggcuccuggagaucacccgggaguucucugugaacgcaggggucacaacuccgguguccaccuauaugcuuacaaauucagaacuguugagccucauuaacgacaugcccaucaccaacgaucaaaagaaacugaugaguaauaacgugcagaucguccgccagcagucuuacuccauuaugugcauaaucaaggaggaaguuuuagccuaugugguacaacugccucucuacggagugauugacacgccauguuggaaacuucauacuagcccccugugcacaaccaauacuaaggagggcucgaacaucuguuugacacgaaccgaucguggcugguacugcgacaaugcugggucugucuccuuuuucccucaggccgaaacguguaaggugcagucaaacagaguguuuugcgauaccaugaauaguagaacacugccaagcgaggugaaccucugcaauauagacauuuucaaccccaaauaugauuguaagaucaugacuuccaaaaccgacgucucuagcucagugaucacaagucugggagcaauuguauccugcuacgguaagacuaaauguaccgcuagcaauaagugcaggggcaucauuaagacauuuucuaacgggugugauuauguuucaaauaaaggaguggacaccgucagugugggcaacacucuuuacuaugucaauaagcaagaggguaaaagccuguacgugaagggggaaccuauaaucaacuucuaugacccauugguuuuuccguccgaugaguucgacgccucuauuucgcagguuaacgagaaaaucaaucagagccucgcguuuauccggaaguccgaugaacuguuacacaacguaaaugucggaaagucaacgacaaacauuaugauaaccacuaucauuaucgugauuaucguuauacugcuacuccugaucgccgugggccuuuucuuguacugcaaagcacgcaguacccccgucacacugucuaaggaccagcucagcggcauuaauaacaucgcuuucuccaauugaggacuagugaagggaacacccaaauuuaauucagccuuaagcacaauuaauuaagagugaaacguaauuguacaagcaguuggucacccaccauagggcaugaucaacaccgcaaccuuuccuuuuucccccagugauucugaaaaaccccucuucccuucagcuugcuuagauguuccaaauuuaguaagcuuaaggcggccuacagaagaaaaagaaaaaaaaggccacaaaaguucccucucacuuucaguaaauaaaauaaaagcagcaacagaaauaaagaaauaaaugaaauucaaaaugaaauaaauauuguguugugcagcauuaaaaaaucaauaaaaauuaaaaaugagcaagaucuaaaaaaaaaaaaaaaaaaaaaaaaaaaaaaaaaaaaaaaaaaaaaaaaaaaaaaaaaaaaaaaaugcaucccccccccccccccccccccccccccccccaaaggcucuuuucagagccaccagaauu

SEQ ID NO: 17169 - RNA, 2202 nt, Artificial Sequence
  mRNA product Design g-3 comprising derived and/or modified sequence from HRSV(Memphis-37)__AIY60640.1__F_DSCav1_mut5 (opt4)
gggagaguccgcucagccagguugcagaagcggcuuagcguguguccuaaucuucucucugcguguagguaggccugugccgcaaacaagcuuaccauggagcugcccauccugaagaccaacgccaucaccaccauccuggccgccgugacccugugcuucgccagcagccagaacaucaccgaggaguucuaccagagcaccugcagcgccgugagcaagggcuaccugagcgcccugagaaccggcugguacaccagcgugaucaccaucgagcugagcaacaucaaggagaacaagugcaacggcaccgacgccaaggugaagcugaucaagcaggagcuggacaaguacaagaacgccgugaccgagcugcagcugcugaugcagagcacccccgccgccggcagcggcagcgccaucgccagcggcaucgccgugugcaaggugcugcaccuggagggcgaggugaacaagaucaagaacgcccugcugagcaccaacaaggccguggugagccugagcggcugcggcgugagcgugcugaccuucaaggugcuggaccugaagaacuacaucgacaagcagcugcugcccauccugaacaagcagagcugcagcaucagcaacaucgagaccgugaucgaguuccagcagaagaacaacagacugcuggagaucaccagagaguucagcgugaacgccggcgugaccacccccgugagcaccuacaugcugaccaacagcgagcugcugagccugaucaacgacaugcccaucaccaacgaccagaagaagcugaugagcaacaacgugcagaucgugagacagcagagcuacagcaucaugugcaucaucaaggaggaggugcuggccuacguggugcagcugccccuguacggcgugaucgacacccccugcuggaagcugcacaccagcccccugugcaccaccaacaccaaggagggcagcaacaucugccugaccagaaccgacagaggcugguacugcgacaacgccggcagcgugagcuucuucccccaggccgagaccugcaaggugcagagcaacagaguguucugcgacaccaugaacagcagaacccugcccagcgaggugaaccugugcaacaucgacaucuucaaccccaaguacgacugcaagaucaugaccagcaagaccgacgugagcagcagcgugaucaccagccugggcgccaucgugagcugcuacggcaagaccaagugcaccgccagcaacaagugcagaggcaucaucaagaccuucagcaacggcugcgacuacgugagcaacaagggcguggacaccgugagcgugggcaacacccuguacuacgugaacaagcaggagggcaagagccuguacgugaagggcgagcccaucaucaacuucuacgacccccugguguuccccagcgacgaguucgacgccagcaucagccaggugaacgagaagaucaaccagagccuggccuucaucagaaagagcgacgagcugcugcacaacgugaacgugggcaagagcaccaccaacaucaugaucaccaccaucaucaucgugaucaucgugauccugcugcugcugaucgccgugggccuguuccuguacugcaaggccagaagcacccccgugacccugagcaaggaccagcugagcggcaucaacaacaucgccuucagcaacugaggacuagugaagggaacacccaaauuuaauucagccuuaagcacaauuaauuaagagugaaacguaauuguacaagcaguuggucacccaccauagggcaugaucaacaccgcaaccuuuccuuuuucccccagugauucugaaaaaccccucuucccuucagcuugcuuagauguuccaaauuuaguaagcuuaaggcggccuacagaagaaaaagaaaaaaaaggccacaaaaguucccucucacuuucaguaaauaaaauaaaagcagcaacagaaauaaagaaauaaaugaaauucaaaaugaaauaaauauuguguugugcagcauuaaaaaaucaauaaaaauuaaaaaugagcaagaucuaaaaaaaaaaaaaaaaaaaaaaaaaaaaaaaaaaaaaaaaaaaaaaaaaaaaaaaaaaaaaaaaugcaucccccccccccccccccccccccccccccccaaaggcucuuuucagagccaccagaauu

SEQ ID NO: 17170 - RNA, 2202 nt, Artificial Sequence
  mRNA product Design g-3 comprising derived and/or modified sequence from HRSV(Memphis-37)__AIY60640.1__F_DSCav1_mut5 (opt5)
gggagaguccgcucagccagguugcagaagcggcuuagcguguguccuaaucuucucucugcguguagguaggccugugccgcaaacaagcuuaccauggagcugcccauccucaagaccaacgccauuacaacgauccuggcugccgugacccuuugcuucgcgagcucccagaauauuacagaagaguuuuaccaaucuaccuguagcgcugucuccaaaggcuaucugucugcccucagaacagggugguacaccagcguuaucacaauugaacuguccaacaucaaggagaauaaaugcaacggaaccgacgccaaggugaaacuuaucaagcaggaacuggauaaguauaaaaaugcugugacggagcuccagcugcugaugcagucuaccccugccgcuggcagcggguccgccauugcgagcggaaucgccgucuguaaggugcuccaccuggagggcgaaguuaacaaaauuaagaaugcccuucugucuacaaacaaagcuguggucucccucagcgggugcggagugucuguucugaccuucaaggugcuugaccugaagaauuacaucgauaaacaacuccugccgauucugaacaagcaguccuguagcaucucuaauauugagacagucaucgaauuucagcagaaaaacaaucggcuccuggagaucacccgcgaguucuccgugaacgcuggcgugacgacacccgucagcaccuauaugcuuacaaauuccgaacugcucucucugauuaacgacaugccuaucaccaacgaucaaaagaaacuuaugagcaauaacguucagauugugagacagcaguccuacagcaucaugugcauuaucaaggaggaagugcuggccuaugucgugcaacucccccuguacggcguuaucgacaccccuuguuggaaacugcauacaucuccccucugcacgaccaauacaaaggagggguccaacauuugucugacccggacagaucgcggaugguacugcgacaaugcgggcagcgugagcuuuuucccucaggccgaaaccuguaagguccagucuaacagaguguuuugcgauacgaugaacuccagaacacugccgucugagguuaaucucugcaauaucgacauuuucaaccccaaauaugauuguaagaucaugaccagcaaaaccgacguguccagcucugucauuacaucccugggggcuaucgugagcugcuacggaaagaccaaauguacagccucuaauaagugccggggcaucauuaagacguuuuccaacgggugugauuaugucagcaauaaaggaguggacaccguuuccgugggcaacacacuuuacuaugucaauaagcaagagggcaaaucucuguacgugaagggggaaccuaucauuaacuucuaugacccccucguuuuuccuagcgaugaguucgacgcuuccaucucucaggugaacgagaaaauuaaucagagccuggccuuuauccgcaaguccgaugaacugcuccacaacgucaaugugggaaagagcaccacaaacauuaugaucaccacgaucauuaucgugauuaucguuauucugcuucugcucaucgccgucggccuguuccuguacugcaaagcuagaucuacccccgugacacuuuccaaggaccagcucagcgggaucaauaacauugcguucucuaauugaggacuagugaagggaacacccaaauuuaauucagccuuaagcacaauuaauuaagagugaaacguaauuguacaagcaguuggucacccaccauagggcaugaucaacaccgcaaccuuuccuuuuucccccagugauucugaaaaaccccucuucccuucagcuugcuuagauguuccaaauuuaguaagcuuaaggcggccuacagaagaaaaagaaaaaaaaggccacaaaaguucccucucacuuucaguaaauaaaauaaaagcagcaacagaaauaaagaaauaaaugaaauucaaaaugaaauaaauauuguguugugcagcauuaaaaaaucaauaaaaauuaaaaaugagcaagaucuaaaaaaaaaaaaaaaaaaaaaaaaaaaaaaaaaaaaaaaaaaaaaaaaaaaaaaaaaaaaaaaaugcaucccccccccccccccccccccccccccccccaaaggcucuuuucagagccaccagaauu

SEQ ID NO: 17171 - RNA, 2202 nt, Artificial Sequence
  mRNA product Design g-3 comprising derived and/or modified sequence from HRSV(Memphis-37)__AIY60640.1__F_DSCav1_mut5 (opt6)
gggagaguccgcucagccagguugcagaagcggcuuagcguguguccuaaucuucucucugcguguagguaggccugugccgcaaacaagcuuaccauggaacucccaaucuuaaaaacaaacgcaauaacuacaauacucgcagcaguaacacuaugcuucgcaucaucacaaaacauaaccgaagaauuuuaccaaaguacaugcucagcaguaucaaaagguuaccucucagcccuaagaaccggaugguacacaucaguaaucacuauagaacuauccaauauaaaagaaaacaaaugcaacggcacugacgcaaaaguuaaauuaauuaaacaagaacucgauaaauauaaaaaugcaguaacagaacuacaacuacuaaugcaaagcaccccagcugcaggaagcggaucagcaaucgcaucaggaauagcaguauguaaaguacuacaccuagaaggagaagucaacaaaaucaaaaaugcacuacuaaguacaaacaaagcuguaguaagccuaucagguugcggaguaucaguauuaacauuuaaaguccucgaccuaaaaaauuacauagauaaacaacucuuaccaauacucaauaaacaaaguugcagcaucagcaacauagaaacagucaucgaauuucaacaaaaaaauaauagacuccuagaaauaacacgugaauuuucaguaaaugcuggaguaacaacaccaguaucuacauauaugcuaacaaauagcgaacuacucucacuuauuaacgauaugcccauaacaaacgaccaaaaaaaacuuaugucaaacaauguucaaauaguuagacaacaauccuacagcauaaugugcauaaucaaagaagaaguucuagcuuacguaguacaacuaccacucuaugguguuaucgacacccccuguuggaaacuucacacaucaccacuaugcacaacaaacacaaaagaaggaucaaauauuugcuuaacaagaacagauagaggaugguauugcgauaaugccggaucaguaucauuuuuuccacaagcagaaacauguaaaguacaauccaaccgaguauuuugcgacaccaugaacuccagaacacuaccaucugaagucaaccuauguaauauagauauauuuaacccaaaauaugacuguaaaaucaugacaucaaaaacugauguaaguucuaguguaauaaccagcuuaggcgccauaguaagcuguuacgguaaaacaaaaugcacagcaagcaacaaaugccgcgguauaauaaaaacauucucaaacggaugcgauuauguaaguaacaaaggaguagauacagucuccguaggcaacacauuauacuacguaaacaaacaagaaggaaaaucacuauauguaaaaggagaaccaaucauaaauuucuacgacccacuuguauuccccagcgacgaauuugaugcuuccauuucacaagucaacgaaaaaauaaaccaaucauuagccuucauaagaaaaucagacgaauuauuacauaauguuaaugucggcaaauccacaacuaauauaaugauaacaacaaucauaauaguaauaaucguuauacuacuauuacucauagcaguaggacucuucuuauauuguaaagccagauccaccccaguaacacucucaaaagaccaauuaucaggaauuaauaacaucgcauuuucaaacuaaggacuagugaagggaacacccaaauuuaauucagccuuaagcacaauuaauuaagagugaaacguaauuguacaagcaguuggucacccaccauagggcaugaucaacaccgcaaccuuuccuuuuucccccagugauucugaaaaaccccucuucccuucagcuugcuuagauguuccaaauuuaguaagcuuaaggcggccuacagaagaaaaagaaaaaaaaggccacaaaaguucccucucacuuucaguaaauaaaauaaaagcagcaacagaaauaaagaaauaaaugaaauucaaaaugaaauaaauauuguguugugcagcauuaaaaaaucaauaaaaauuaaaaaugagcaagaucuaaaaaaaaaaaaaaaaaaaaaaaaaaaaaaaaaaaaaaaaaaaaaaaaaaaaaaaaaaaaaaaaugcaucccccccccccccccccccccccccccccccaaaggcucuuuucagagccaccagaauu

SEQ ID NO: 17172 - RNA, 2202 nt, Artificial Sequence
  mRNA product Design g-3 comprising derived and/or modified sequence from HRSV(Memphis-37)__AIY60640.1__F_DSCav1_mut5 (opt11)
gggagaguccgcucagccagguugcagaagcggcuuagcguguguccuaaucuucucucugcguguagguaggccugugccgcaaacaagcuuaccauggaacuccccauccuuaaaaccaacgcaaucaccacaauacucgccgccgucacccucugcuuugcguccucccagaacaucaccgaagaguucuaccaaucgaccugcagcgccgucagcaagggcuaccucucagcccuccgaacaggcugguacacauccgucaucaccaucgaacucucaaacauaaaagaaaacaaguguaacggcaccgacgcgaaaguuaaacucaucaaacaagaacucgauaaauacaaaaacgcaguaaccgaacuacaacuccuaaugcaauccacacccgcagccggcagcggcuccgcaaucgccuccggcauagcagucugcaaaguccuccaccucgaaggagaagucaauaaaaucaaaaacgcccuccuauccaccaacaaagcgguugucucccuguccggaugcggaguuagcguccuaaccuucaaggugcucgaccucaaaaacuacauagacaaacaacuacuccccauacucaacaaacaaucaugcuccaucagcaacaucgagaccgucaucgaguuccaacagaaaaacaaccgccuccucgaaaucacacgagaguucuccguaaacgccggcgucacaacccccguuuccacuuacaugcucacaaacagcgaacuccucucccucaucaacgacaugccaaucaccaacgaccaaaagaaacucauguccaacaacguccaaaucguccgccaacaaagcuacagcauaaugugcaucauaaaagaagaaguacucgcguacguaguccaacuaccccuauacggcgucaucgacacccccugcuggaaacugcacacuucuccccucuguacaaccaacacuaaagaaggcucgaacaucugccucaccagaacagaccgaggaugguacugcgacaacgccggcuccgucagcuucuucccccaggccgaaacaugcaaaguacaaucaaaccgagucuucugcgacacaaugaacagcagaacucuacccuccgaaguuaaccuaugcaacaucgacaucuucaaccccaaauacgacugcaaaauaaugaccucaaaaacagacguguccagcuccguuaucaccucucucggagccaucguauccuguuauggaaaaaccaaaugcaccgccucaaacaaaugccgaggcauaaucaaaacauucucaaauggaugcgacuacguauccaacaaaggagucgacaccgucagcgugggcaauacccucuacuacgucaacaaacaggaagggaaaucccucuauguaaagggcgagcccauuauuaacuucuaugacccccucguguucccaagcgacgaguucgacgccuccauaucacaagucaaugagaaaaucaaccaaucacuagcuuucauucgcaaauccgacgaacuccuucacaacgucaacgucggcaaauccaccaccaacaucaugaucaccaccauaauuaucgucauuaucgucauacuacuccuacucaucgccgucggccucuuccucuauugcaaagcacgcucgacacccgucacccuuucaaaagaccaacuuuccggcauaaacaacauagccuucagcaacuagggacuagugaagggaacacccaaauuuaauucagccuuaagcacaauuaauuaagagugaaacguaauuguacaagcaguuggucacccaccauagggcaugaucaacaccgcaaccuuuccuuuuucccccagugauucugaaaaaccccucuucccuucagcuugcuuagauguuccaaauuuaguaagcuuaaggcggccuacagaagaaaaagaaaaaaaaggccacaaaaguucccucucacuuucaguaaauaaaauaaaagcagcaacagaaauaaagaaauaaaugaaauucaaaaugaaauaaauauuguguugugcagcauuaaaaaaucaauaaaaauuaaaaaugagcaagaucuaaaaaaaaaaaaaaaaaaaaaaaaaaaaaaaaaaaaaaaaaaaaaaaaaaaaaaaaaaaaaaaaugcaucccccccccccccccccccccccccccccccaaaggcucuuuucagagccaccagaauu

SEQ ID NO: 17173 - RNA, 1997 nt, Artificial Sequence
  mRNA product Design g-4 comprising derived and/or modified sequence from HRSV(Memphis-37)__AIY60640.1__F_DSCav1_mut5 (opt1)
gggagacuccugucgggcggaaguaggaggaguagaguuuaaaaacaguacucuuuuuccgguucgggacguaguugaagcaacgacaagccggauaaccgcucuugagacaggaagcuuaccauggagcugcccauccucaagaccaacgccaucaccacgauccuggccgcggugacccugugcuucgccagcucccagaacaucaccgaggaguucuaccagagcacgugcuccgccgucagcaagggcuaccucuccgcccugcgcaccgggugguacaccagcgugaucaccaucgagcuguccaacaucaaggagaacaagugcaacggcaccgacgccaaggugaagcucaucaagcaggagcuggacaaguacaagaacgcggucacggagcugcagcuccugaugcagagcaccccggccgccggcuccgggagcgcgaucgccuccggcaucgccgucugcaaggugcugcaccucgagggcgaggugaacaagaucaagaacgcccugcuguccaccaacaaggccgucgugagccucuccggcugcggggugagcguccugaccuucaaggugcuggaccucaagaacuacaucgacaagcagcugcugcccauccugaacaagcagagcugcuccaucagcaacaucgagaccgucaucgaguuccagcagaagaacaaccgccuccuggagaucacgcgggaguucagcgugaacgcgggcgugaccacccccgucuccaccuacaugcugacgaacagcgagcuccugucccugaucaacgacaugccgaucaccaacgaccagaagaagcucaugagcaacaacgugcagaucgugcgccagcaguccuacagcaucaugugcaucaucaaggaggagguccuggccuacguggugcagcugccccucuacggggucaucgacacccccugcuggaagcugcacaccagcccccugugcacgaccaacaccaaggagggcuccaacaucugccucacccggacggaccgcgggugguacugcgacaacgccggcagcguguccuucuucccgcaggccgagaccugcaagguccagagcaaccggguguucugcgacaccaugaacucccggacccugcccagcgaggugaaccucugcaacaucgacaucuucaaccccaaguacgacugcaagaucaugacguccaagaccgacgucagcuccagcgugaucaccucccugggcgccaucgugagcugcuacgggaagaccaagugcacggcgagcaacaagugccgcggcaucaucaagaccuucuccaacgggugcgacuacgucagcaacaagggcguggacaccguguccgucggcaacacccuguacuacgugaacaagcaggagggcaagagccucuacgugaagggggagcccaucaucaacuucuacgacccgcuggucuuccccuccgacgaguucgacgccagcaucucccaggugaacgagaagaucaaccagagccuggccuucauccggaaguccgacgagcuccugcacaacgugaacgucggcaagagcaccacgaacaucaugaucaccaccaucaucaucgugaucaucgugauccugcugcuccugaucgccgucgggcuguuccucuacugcaaggcccgcuccacccccgugacgcugagcaaggaccagcuguccgggaucaacaacaucgcguucagcaacugaggacuaguaauaaggaaacuguaugaaugucugugggcaggaagugaagagauccuucuguaaagguuuuuggaauuaugucugcugaauaauaaacuuuuuugaaauaauaaaucugguagaaaaaugagaucuaaaaaaaaaaaaaaaaaaaaaaaaaaaaaaaaaaaaaaaaaaaaaaaaaaaaaaaaaaaaaaaaugcaucccccccccccccccccccccccccccccccaaaggcucuuuucagagccaccagaauu

SEQ ID NO: 17174 - RNA, 1997 nt, Artificial Sequence
  mRNA product Design g-4 comprising derived and/or modified sequence from HRSV(Memphis-37)__AIY60640.1__F_DSCav1_mut5 (opt1)
gggagacuccugucgggcggaaguaggaggaguagaguuuaaaaacaguacucuuuuuccgguucgggacguaguugaagcaacgacaagccggauaaccgcucuugagacaggaagcuuaccauggagcugcccauccucaagaccaacgccaucaccacgauccuggccgcggugacccugugcuucgccagcucccagaacaucaccgaggaguucuaccagagcacgugcuccgccgucagcaagggcuaccucuccgcccugcgcaccgggugguacaccagcgugaucaccaucgagcuguccaacaucaaggagaacaagugcaacggcaccgacgccaaggugaagcucaucaagcaggagcuggacaaguacaagaacgcggucacggagcugcagcuccugaugcagagcaccccggccgccggguccggcagcgccaucgcguccgggaucgccgugugcaaggugcugcaccucgagggcgaggucaacaagaucaagaacgcccugcugagcaccaacaaggccguggugucccucagcggcugcggggucuccgugcugaccuucaaggugcuggaccucaagaacuacaucgacaagcagcugcugcccauccucaacaagcagagcugcuccaucagcaacaucgagacggucaucgaguuccagcagaagaacaaccggcugcuggagaucacccgcgaguucuccgugaacgccggcgugaccacccccgucagcacguacaugcucaccaacagcgagcugcugucccucaucaacgacaugcccaucaccaacgaccagaagaagcugaugagcaacaacgugcagaucgugcggcagcaguccuacagcaucaugugcaucaucaaggaggagguccuggcguacguggugcagcucccgcuguacggggucaucgacacccccugcuggaagcugcacacgagcccccucugcaccaccaacaccaaggagggcuccaacaucugccugacgcgcaccgaccgggggugguacugcgacaacgccggcuccgugagcuucuucccccaggccgagaccugcaaggugcaguccaaccgcgucuucugcgacaccaugaacagccggacgcucccguccgaggugaaccugugcaacaucgacaucuucaaccccaaguacgacugcaagaucaugaccagcaagaccgacgucuccagcuccgugaucaccagccugggcgccaucguguccugcuacgggaagacgaagugcaccgccagcaacaagugccggggcaucaucaagaccuucuccaacgggugcgacuacgucagcaacaagggcguggacaccgugagcgucggcaacacgcucuacuacgugaacaagcaggaggggaagucccuguacgugaagggcgagcccaucaucaacuucuacgacccccuggucuucccgagcgacgaguucgacgcguccaucagccaggugaacgagaagaucaaccagucccucgccuucauccgcaagagcgacgagcugcugcacaacgugaacgucgggaaguccaccaccaacaucaugaucaccaccaucaucaucgugaucaucgugauccuccugcugcucaucgccgucggccuguuccuguacugcaaggcccggagcacgcccgugacccuguccaaggaccagcucagcgggaucaacaacaucgccuucuccaacugaggacuaguaauaaggaaacuguaugaaugucugugggcaggaagugaagagauccuucuguaaagguuuuuggaauuaugucugcugaauaauaaacuuuuuugaaauaauaaaucugguagaaaaaugagaucuaaaaaaaaaaaaaaaaaaaaaaaaaaaaaaaaaaaaaaaaaaaaaaaaaaaaaaaaaaaaaaaaugcaucccccccccccccccccccccccccccccccaaaggcucuuuucagagccaccagaauu

SEQ ID NO: 17175 - RNA, 1997 nt, Artificial Sequence
  mRNA product Design g-4 comprising derived and/or modified sequence from HRSV(Memphis-37)__AIY60640.1__F_DSCav1_mut5 (opt2)
gggagacuccugucgggcggaaguaggaggaguagaguuuaaaaacaguacucuuuuuccgguucgggacguaguugaagcaacgacaagccggauaaccgcucuugagacaggaagcuuaccauggagcuccccauccucaagaccaacgccaucaccaccauccucgccgccgucacccucugcuucgccuccucccagaacaucaccgaggaguucuaccaguccaccugcuccgccgucuccaagggcuaccucuccgcccuccgcaccggcugguacaccuccgucaucaccaucgagcucuccaacaucaaggagaacaagugcaacggcaccgacgccaaggucaagcucaucaagcaggagcucgacaaguacaagaacgccgucaccgagcuccagcuccucaugcaguccacccccgccgccggcuccggcuccgccaucgccuccggcaucgccgucugcaagguccuccaccucgagggcgaggucaacaagaucaagaacgcccuccucuccaccaacaaggccgucgucucccucuccggcugcggcgucuccguccucaccuucaagguccucgaccucaagaacuacaucgacaagcagcuccuccccauccucaacaagcaguccugcuccaucuccaacaucgagaccgucaucgaguuccagcagaagaacaaccgccuccucgagaucacccgcgaguucuccgucaacgccggcgucaccacccccgucuccaccuacaugcucaccaacuccgagcuccucucccucaucaacgacaugcccaucaccaacgaccagaagaagcucauguccaacaacguccagaucguccgccagcaguccuacuccaucaugugcaucaucaaggaggagguccucgccuacgucguccagcucccccucuacggcgucaucgacacccccugcuggaagcuccacaccuccccccucugcaccaccaacaccaaggagggcuccaacaucugccucacccgcaccgaccgcggcugguacugcgacaacgccggcuccgucuccuucuucccccaggccgagaccugcaagguccaguccaaccgcgucuucugcgacaccaugaacucccgcacccuccccuccgaggucaaccucugcaacaucgacaucuucaaccccaaguacgacugcaagaucaugaccuccaagaccgacgucuccuccuccgucaucaccucccucggcgccaucgucuccugcuacggcaagaccaagugcaccgccuccaacaagugccgcggcaucaucaagaccuucuccaacggcugcgacuacgucuccaacaagggcgucgacaccgucuccgucggcaacacccucuacuacgucaacaagcaggagggcaagucccucuacgucaagggcgagcccaucaucaacuucuacgacccccucgucuuccccuccgacgaguucgacgccuccaucucccaggucaacgagaagaucaaccagucccucgccuucauccgcaaguccgacgagcuccuccacaacgucaacgucggcaaguccaccaccaacaucaugaucaccaccaucaucaucgucaucaucgucauccuccuccuccucaucgccgucggccucuuccucuacugcaaggcccgcuccacccccgucacccucuccaaggaccagcucuccggcaucaacaacaucgccuucuccaacugaggacuaguaauaaggaaacuguaugaaugucugugggcaggaagugaagagauccuucuguaaagguuuuuggaauuaugucugcugaauaauaaacuuuuuugaaauaauaaaucugguagaaaaaugagaucuaaaaaaaaaaaaaaaaaaaaaaaaaaaaaaaaaaaaaaaaaaaaaaaaaaaaaaaaaaaaaaaaugcaucccccccccccccccccccccccccccccccaaaggcucuuuucagagccaccagaauu

SEQ ID NO: 17176 - RNA, 1997 nt, Artificial Sequence
  mRNA product Design g-4 comprising derived and/or modified sequence from HRSV(Memphis-37)__AIY60640.1__F_DSCav1_mut5 (opt3)
gggagacuccugucgggcggaaguaggaggaguagaguuuaaaaacaguacucuuuuuccgguucgggacguaguugaagcaacgacaagccggauaaccgcucuugagacaggaagcuuaccauggagcugcccauccucaagaccaacgccauuacaacuauacuugcugcagugacgcugugcuucgccagcucccagaauaucaccgaagaguuuuaccaaucuacauguucagcggucaguaaaggcuauuugagcgcuuuaagaacugggugguacaccuccguuauuacaaucgaacugucuaacauuaaggagaauaaaugcaacggaaccgacgccaaggugaaacuaaucaagcaggaacucgauaaguauaaaaaugcaguaacugagcugcagcuucugaugcagucgaccccugccgcugguucaggcagcgcaauagccagugggaucgcuguguguaaggucuugcaccucgagggagaagugaacaaaauuaagaaugcccugcuguccacaaacaaagcgguugugucucucagcggcugcggugucuccguguuaacguucaagguacuggaccuuaagaauuacaucgauaaacaauugcugccaauucuaaacaagcagucauguaguaucagcaauauagagacuguuauugaauuucagcagaaaaacaauaggcuccuggagaucacccgggaguucucugugaacgcaggggucacaacuccgguguccaccuauaugcuuacaaauucagaacuguugagccucauuaacgacaugcccaucaccaacgaucaaaagaaacugaugaguaauaacgugcagaucguccgccagcagucuuacuccauuaugugcauaaucaaggaggaaguuuuagccuaugugguacaacugccucucuacggagugauugacacgccauguuggaaacuucauacuagcccccugugcacaaccaauacuaaggagggcucgaacaucuguuugacacgaaccgaucguggcugguacugcgacaaugcugggucugucuccuuuuucccucaggccgaaacguguaaggugcagucaaacagaguguuuugcgauaccaugaauaguagaacacugccaagcgaggugaaccucugcaauauagacauuuucaaccccaaauaugauuguaagaucaugacuuccaaaaccgacgucucuagcucagugaucacaagucugggagcaauuguauccugcuacgguaagacuaaauguaccgcuagcaauaagugcaggggcaucauuaagacauuuucuaacgggugugauuauguuucaaauaaaggaguggacaccgucagugugggcaacacucuuuacuaugucaauaagcaagaggguaaaagccuguacgugaagggggaaccuauaaucaacuucuaugacccauugguuuuuccguccgaugaguucgacgccucuauuucgcagguuaacgagaaaaucaaucagagccucgcguuuauccggaaguccgaugaacuguuacacaacguaaaugucggaaagucaacgacaaacauuaugauaaccacuaucauuaucgugauuaucguuauacugcuacuccugaucgccgugggccuuuucuuguacugcaaagcacgcaguacccccgucacacugucuaaggaccagcucagcggcauuaauaacaucgcuuucuccaauugaggacuaguaauaaggaaacuguaugaaugucugugggcaggaagugaagagauccuucuguaaagguuuuuggaauuaugucugcugaauaauaaacuuuuuugaaauaauaaaucugguagaaaaaugagaucuaaaaaaaaaaaaaaaaaaaaaaaaaaaaaaaaaaaaaaaaaaaaaaaaaaaaaaaaaaaaaaaaugcaucccccccccccccccccccccccccccccccaaaggcucuuuucagagccaccagaauu

SEQ ID NO: 17177 - RNA, 1997 nt, Artificial Sequence
  mRNA product Design g-4 comprising derived and/or modified sequence from HRSV(Memphis-37)__AIY60640.1__F_DSCav1_mut5 (opt4)
gggagacuccugucgggcggaaguaggaggaguagaguuuaaaaacaguacucuuuuuccgguucgggacguaguugaagcaacgacaagccggauaaccgcucuugagacaggaagcuuaccauggagcugcccauccugaagaccaacgccaucaccaccauccuggccgccgugacccugugcuucgccagcagccagaacaucaccgaggaguucuaccagagcaccugcagcgccgugagcaagggcuaccugagcgcccugagaaccggcugguacaccagcgugaucaccaucgagcugagcaacaucaaggagaacaagugcaacggcaccgacgccaaggugaagcugaucaagcaggagcuggacaaguacaagaacgccgugaccgagcugcagcugcugaugcagagcacccccgccgccggcagcggcagcgccaucgccagcggcaucgccgugugcaaggugcugcaccuggagggcgaggugaacaagaucaagaacgcccugcugagcaccaacaaggccguggugagccugagcggcugcggcgugagcgugcugaccuucaaggugcuggaccugaagaacuacaucgacaagcagcugcugcccauccugaacaagcagagcugcagcaucagcaacaucgagaccgugaucgaguuccagcagaagaacaacagacugcuggagaucaccagagaguucagcgugaacgccggcgugaccacccccgugagcaccuacaugcugaccaacagcgagcugcugagccugaucaacgacaugcccaucaccaacgaccagaagaagcugaugagcaacaacgugcagaucgugagacagcagagcuacagcaucaugugcaucaucaaggaggaggugcuggccuacguggugcagcugccccuguacggcgugaucgacacccccugcuggaagcugcacaccagcccccugugcaccaccaacaccaaggagggcagcaacaucugccugaccagaaccgacagaggcugguacugcgacaacgccggcagcgugagcuucuucccccaggccgagaccugcaaggugcagagcaacagaguguucugcgacaccaugaacagcagaacccugcccagcgaggugaaccugugcaacaucgacaucuucaaccccaaguacgacugcaagaucaugaccagcaagaccgacgugagcagcagcgugaucaccagccugggcgccaucgugagcugcuacggcaagaccaagugcaccgccagcaacaagugcagaggcaucaucaagaccuucagcaacggcugcgacuacgugagcaacaagggcguggacaccgugagcgugggcaacacccuguacuacgugaacaagcaggagggcaagagccuguacgugaagggcgagcccaucaucaacuucuacgacccccugguguuccccagcgacgaguucgacgccagcaucagccaggugaacgagaagaucaaccagagccuggccuucaucagaaagagcgacgagcugcugcacaacgugaacgugggcaagagcaccaccaacaucaugaucaccaccaucaucaucgugaucaucgugauccugcugcugcugaucgccgugggccuguuccuguacugcaaggccagaagcacccccgugacccugagcaaggaccagcugagcggcaucaacaacaucgccuucagcaacugaggacuaguaauaaggaaacuguaugaaugucugugggcaggaagugaagagauccuucuguaaagguuuuuggaauuaugucugcugaauaauaaacuuuuuugaaauaauaaaucugguagaaaaaugagaucuaaaaaaaaaaaaaaaaaaaaaaaaaaaaaaaaaaaaaaaaaaaaaaaaaaaaaaaaaaaaaaaaugcaucccccccccccccccccccccccccccccccaaaggcucuuuucagagccaccagaauu

SEQ ID NO: 17178 - RNA, 1997 nt, Artificial Sequence
  mRNA product Design g-4 comprising derived and/or modified sequence from HRSV(Memphis-37)__AIY60640.1__F_DSCav1_mut5 (opt5)
gggagacuccugucgggcggaaguaggaggaguagaguuuaaaaacaguacucuuuuuccgguucgggacguaguugaagcaacgacaagccggauaaccgcucuugagacaggaagcuuaccauggagcugcccauccucaagaccaacgccauuacaacgauccuggcugccgugacccuuugcuucgcgagcucccagaauauuacagaagaguuuuaccaaucuaccuguagcgcugucuccaaaggcuaucugucugcccucagaacagggugguacaccagcguuaucacaauugaacuguccaacaucaaggagaauaaaugcaacggaaccgacgccaaggugaaacuuaucaagcaggaacuggauaaguauaaaaaugcugugacggagcuccagcugcugaugcagucuaccccugccgcuggcagcggguccgccauugcgagcggaaucgccgucuguaaggugcuccaccuggagggcgaaguuaacaaaauuaagaaugcccuucugucuacaaacaaagcuguggucucccucagcgggugcggagugucuguucugaccuucaaggugcuugaccugaagaauuacaucgauaaacaacuccugccgauucugaacaagcaguccuguagcaucucuaauauugagacagucaucgaauuucagcagaaaaacaaucggcuccuggagaucacccgcgaguucuccgugaacgcuggcgugacgacacccgucagcaccuauaugcuuacaaauuccgaacugcucucucugauuaacgacaugccuaucaccaacgaucaaaagaaacuuaugagcaauaacguucagauugugagacagcaguccuacagcaucaugugcauuaucaaggaggaagugcuggccuaugucgugcaacucccccuguacggcguuaucgacaccccuuguuggaaacugcauacaucuccccucugcacgaccaauacaaaggagggguccaacauuugucugacccggacagaucgcggaugguacugcgacaaugcgggcagcgugagcuuuuucccucaggccgaaaccuguaagguccagucuaacagaguguuuugcgauacgaugaacuccagaacacugccgucugagguuaaucucugcaauaucgacauuuucaaccccaaauaugauuguaagaucaugaccagcaaaaccgacguguccagcucugucauuacaucccugggggcuaucgugagcugcuacggaaagaccaaauguacagccucuaauaagugccggggcaucauuaagacguuuuccaacgggugugauuaugucagcaauaaaggaguggacaccguuuccgugggcaacacacuuuacuaugucaauaagcaagagggcaaaucucuguacgugaagggggaaccuaucauuaacuucuaugacccccucguuuuuccuagcgaugaguucgacgcuuccaucucucaggugaacgagaaaauuaaucagagccuggccuuuauccgcaaguccgaugaacugcuccacaacgucaaugugggaaagagcaccacaaacauuaugaucaccacgaucauuaucgugauuaucguuauucugcuucugcucaucgccgucggccuguuccuguacugcaaagcuagaucuacccccgugacacuuuccaaggaccagcucagcgggaucaauaacauugcguucucuaauugaggacuaguaauaaggaaacuguaugaaugucugugggcaggaagugaagagauccuucuguaaagguuuuuggaauuaugucugcugaauaauaaacuuuuuugaaauaauaaaucugguagaaaaaugagaucuaaaaaaaaaaaaaaaaaaaaaaaaaaaaaaaaaaaaaaaaaaaaaaaaaaaaaaaaaaaaaaaaugcaucccccccccccccccccccccccccccccccaaaggcucuuuucagagccaccagaauu

SEQ ID NO: 17179 - RNA, 1997 nt, Artificial Sequence
  mRNA product Design g-4 comprising derived and/or modified sequence from HRSV(Memphis-37)__AIY60640.1__F_DSCav1_mut5 (opt6)
gggagacuccugucgggcggaaguaggaggaguagaguuuaaaaacaguacucuuuuuccgguucgggacguaguugaagcaacgacaagccggauaaccgcucuugagacaggaagcuuaccauggaacucccaaucuuaaaaacaaacgcaauaacuacaauacucgcagcaguaacacuaugcuucgcaucaucacaaaacauaaccgaagaauuuuaccaaaguacaugcucagcaguaucaaaagguuaccucucagcccuaagaaccggaugguacacaucaguaaucacuauagaacuauccaauauaaaagaaaacaaaugcaacggcacugacgcaaaaguuaaauuaauuaaacaagaacucgauaaauauaaaaaugcaguaacagaacuacaacuacuaaugcaaagcaccccagcugcaggaagcggaucagcaaucgcaucaggaauagcaguauguaaaguacuacaccuagaaggagaagucaacaaaaucaaaaaugcacuacuaaguacaaacaaagcuguaguaagccuaucagguugcggaguaucaguauuaacauuuaaaguccucgaccuaaaaaauuacauagauaaacaacucuuaccaauacucaauaaacaaaguugcagcaucagcaacauagaaacagucaucgaauuucaacaaaaaaauaauagacuccuagaaauaacacgugaauuuucaguaaaugcuggaguaacaacaccaguaucuacauauaugcuaacaaauagcgaacuacucucacuuauuaacgauaugcccauaacaaacgaccaaaaaaaacuuaugucaaacaauguucaaauaguuagacaacaauccuacagcauaaugugcauaaucaaagaagaaguucuagcuuacguaguacaacuaccacucuaugguguuaucgacacccccuguuggaaacuucacacaucaccacuaugcacaacaaacacaaaagaaggaucaaauauuugcuuaacaagaacagauagaggaugguauugcgauaaugccggaucaguaucauuuuuuccacaagcagaaacauguaaaguacaauccaaccgaguauuuugcgacaccaugaacuccagaacacuaccaucugaagucaaccuauguaauauagauauauuuaacccaaaauaugacuguaaaaucaugacaucaaaaacugauguaaguucuaguguaauaaccagcuuaggcgccauaguaagcuguuacgguaaaacaaaaugcacagcaagcaacaaaugccgcgguauaauaaaaacauucucaaacggaugcgauuauguaaguaacaaaggaguagauacagucuccguaggcaacacauuauacuacguaaacaaacaagaaggaaaaucacuauauguaaaaggagaaccaaucauaaauuucuacgacccacuuguauuccccagcgacgaauuugaugcuuccauuucacaagucaacgaaaaaauaaaccaaucauuagccuucauaagaaaaucagacgaauuauuacauaauguuaaugucggcaaauccacaacuaauauaaugauaacaacaaucauaauaguaauaaucguuauacuacuauuacucauagcaguaggacucuucuuauauuguaaagccagauccaccccaguaacacucucaaaagaccaauuaucaggaauuaauaacaucgcauuuucaaacuaaggacuaguaauaaggaaacuguaugaaugucugugggcaggaagugaagagauccuucuguaaagguuuuuggaauuaugucugcugaauaauaaacuuuuuugaaauaauaaaucugguagaaaaaugagaucuaaaaaaaaaaaaaaaaaaaaaaaaaaaaaaaaaaaaaaaaaaaaaaaaaaaaaaaaaaaaaaaaugcaucccccccccccccccccccccccccccccccaaaggcucuuuucagagccaccagaauu

SEQ ID NO: 17180 - RNA, 1997 nt, Artificial Sequence
  mRNA product Design g-4 comprising derived and/or modified sequence from HRSV(Memphis-37)__AIY60640.1__F_DSCav1_mut5 (opt11)
gggagacuccugucgggcggaaguaggaggaguagaguuuaaaaacaguacucuuuuuccgguucgggacguaguugaagcaacgacaagccggauaaccgcucuugagacaggaagcuuaccauggaacuccccauccuuaaaaccaacgcaaucaccacaauacucgccgccgucacccucugcuuugcguccucccagaacaucaccgaagaguucuaccaaucgaccugcagcgccgucagcaagggcuaccucucagcccuccgaacaggcugguacacauccgucaucaccaucgaacucucaaacauaaaagaaaacaaguguaacggcaccgacgcgaaaguuaaacucaucaaacaagaacucgauaaauacaaaaacgcaguaaccgaacuacaacuccuaaugcaauccacacccgcagccggcagcggcuccgcaaucgccuccggcauagcagucugcaaaguccuccaccucgaaggagaagucaauaaaaucaaaaacgcccuccuauccaccaacaaagcgguugucucccuguccggaugcggaguuagcguccuaaccuucaaggugcucgaccucaaaaacuacauagacaaacaacuacuccccauacucaacaaacaaucaugcuccaucagcaacaucgagaccgucaucgaguuccaacagaaaaacaaccgccuccucgaaaucacacgagaguucuccguaaacgccggcgucacaacccccguuuccacuuacaugcucacaaacagcgaacuccucucccucaucaacgacaugccaaucaccaacgaccaaaagaaacucauguccaacaacguccaaaucguccgccaacaaagcuacagcauaaugugcaucauaaaagaagaaguacucgcguacguaguccaacuaccccuauacggcgucaucgacacccccugcuggaaacugcacacuucuccccucuguacaaccaacacuaaagaaggcucgaacaucugccucaccagaacagaccgaggaugguacugcgacaacgccggcuccgucagcuucuucccccaggccgaaacaugcaaaguacaaucaaaccgagucuucugcgacacaaugaacagcagaacucuacccuccgaaguuaaccuaugcaacaucgacaucuucaaccccaaauacgacugcaaaauaaugaccucaaaaacagacguguccagcuccguuaucaccucucucggagccaucguauccuguuauggaaaaaccaaaugcaccgccucaaacaaaugccgaggcauaaucaaaacauucucaaauggaugcgacuacguauccaacaaaggagucgacaccgucagcgugggcaauacccucuacuacgucaacaaacaggaagggaaaucccucuauguaaagggcgagcccauuauuaacuucuaugacccccucguguucccaagcgacgaguucgacgccuccauaucacaagucaaugagaaaaucaaccaaucacuagcuuucauucgcaaauccgacgaacuccuucacaacgucaacgucggcaaauccaccaccaacaucaugaucaccaccauaauuaucgucauuaucgucauacuacuccuacucaucgccgucggccucuuccucuauugcaaagcacgcucgacacccgucacccuuucaaaagaccaacuuuccggcauaaacaacauagccuucagcaacuagggacuaguaauaaggaaacuguaugaaugucugugggcaggaagugaagagauccuucuguaaagguuuuuggaauuaugucugcugaauaauaaacuuuuuugaaauaauaaaucugguagaaaaaugagaucuaaaaaaaaaaaaaaaaaaaaaaaaaaaaaaaaaaaaaaaaaaaaaaaaaaaaaaaaaaaaaaaaugcaucccccccccccccccccccccccccccccccaaaggcucuuuucagagccaccagaauu

SEQ ID NO: 17181 - RNA, 1973 nt, Artificial Sequence
  mRNA product Design g-5 comprising derived and/or modified sequence from HRSV(Memphis-37)__AIY60640.1__F_DSCav1_mut5 (opt1)
gggagacccgugacccggaaguuguacggcuacgcgacuuucccucccacaaacccucgcgcccuuccuuuccuacuugggcccggcagaaagcuuaccauggagcugcccauccucaagaccaacgccaucaccacgauccuggccgcggugacccugugcuucgccagcucccagaacaucaccgaggaguucuaccagagcacgugcuccgccgucagcaagggcuaccucuccgcccugcgcaccgggugguacaccagcgugaucaccaucgagcuguccaacaucaaggagaacaagugcaacggcaccgacgccaaggugaagcucaucaagcaggagcuggacaaguacaagaacgcggucacggagcugcagcuccugaugcagagcaccccggccgccggcuccgggagcgcgaucgccuccggcaucgccgucugcaaggugcugcaccucgagggcgaggugaacaagaucaagaacgcccugcuguccaccaacaaggccgucgugagccucuccggcugcggggugagcguccugaccuucaaggugcuggaccucaagaacuacaucgacaagcagcugcugcccauccugaacaagcagagcugcuccaucagcaacaucgagaccgucaucgaguuccagcagaagaacaaccgccuccuggagaucacgcgggaguucagcgugaacgcgggcgugaccacccccgucuccaccuacaugcugacgaacagcgagcuccugucccugaucaacgacaugccgaucaccaacgaccagaagaagcucaugagcaacaacgugcagaucgugcgccagcaguccuacagcaucaugugcaucaucaaggaggagguccuggccuacguggugcagcugccccucuacggggucaucgacacccccugcuggaagcugcacaccagcccccugugcacgaccaacaccaaggagggcuccaacaucugccucacccggacggaccgcgggugguacugcgacaacgccggcagcguguccuucuucccgcaggccgagaccugcaagguccagagcaaccggguguucugcgacaccaugaacucccggacccugcccagcgaggugaaccucugcaacaucgacaucuucaaccccaaguacgacugcaagaucaugacguccaagaccgacgucagcuccagcgugaucaccucccugggcgccaucgugagcugcuacgggaagaccaagugcacggcgagcaacaagugccgcggcaucaucaagaccuucuccaacgggugcgacuacgucagcaacaagggcguggacaccguguccgucggcaacacccuguacuacgugaacaagcaggagggcaagagccucuacgugaagggggagcccaucaucaacuucuacgacccgcuggucuuccccuccgacgaguucgacgccagcaucucccaggugaacgagaagaucaaccagagccuggccuucauccggaaguccgacgagcuccugcacaacgugaacgucggcaagagcaccacgaacaucaugaucaccaccaucaucaucgugaucaucgugauccugcugcuccugaucgccgucgggcuguuccucuacugcaaggcccgcuccacccccgugacgcugagcaaggaccagcuguccgggaucaacaacaucgcguucagcaacugaggacuaguaauaaggaaacuguaugaaugucugugggcaggaagugaagagauccuucuguaaagguuuuuggaauuaugucugcugaauaauaaacuuuuuugaaauaauaaaucugguagaaaaaugagaucuaaaaaaaaaaaaaaaaaaaaaaaaaaaaaaaaaaaaaaaaaaaaaaaaaaaaaaaaaaaaaaaaugcaucccccccccccccccccccccccccccccccaaaggcucuuuucagagccaccagaauu

SEQ ID NO: 17182 - RNA, 1973 nt, Artificial Sequence
  mRNA product Design g-5 comprising derived and/or modified sequence from HRSV(Memphis-37)__AIY60640.1__F_DSCav1_mut5 (opt1)
gggagacccgugacccggaaguuguacggcuacgcgacuuucccucccacaaacccucgcgcccuuccuuuccuacuugggcccggcagaaagcuuaccauggagcugcccauccucaagaccaacgccaucaccacgauccuggccgcggugacccugugcuucgccagcucccagaacaucaccgaggaguucuaccagagcacgugcuccgccgucagcaagggcuaccucuccgcccugcgcaccgggugguacaccagcgugaucaccaucgagcuguccaacaucaaggagaacaagugcaacggcaccgacgccaaggugaagcucaucaagcaggagcuggacaaguacaagaacgcggucacggagcugcagcuccugaugcagagcaccccggccgccggguccggcagcgccaucgcguccgggaucgccgugugcaaggugcugcaccucgagggcgaggucaacaagaucaagaacgcccugcugagcaccaacaaggccguggugucccucagcggcugcggggucuccgugcugaccuucaaggugcuggaccucaagaacuacaucgacaagcagcugcugcccauccucaacaagcagagcugcuccaucagcaacaucgagacggucaucgaguuccagcagaagaacaaccggcugcuggagaucacccgcgaguucuccgugaacgccggcgugaccacccccgucagcacguacaugcucaccaacagcgagcugcugucccucaucaacgacaugcccaucaccaacgaccagaagaagcugaugagcaacaacgugcagaucgugcggcagcaguccuacagcaucaugugcaucaucaaggaggagguccuggcguacguggugcagcucccgcuguacggggucaucgacacccccugcuggaagcugcacacgagcccccucugcaccaccaacaccaaggagggcuccaacaucugccugacgcgcaccgaccgggggugguacugcgacaacgccggcuccgugagcuucuucccccaggccgagaccugcaaggugcaguccaaccgcgucuucugcgacaccaugaacagccggacgcucccguccgaggugaaccugugcaacaucgacaucuucaaccccaaguacgacugcaagaucaugaccagcaagaccgacgucuccagcuccgugaucaccagccugggcgccaucguguccugcuacgggaagacgaagugcaccgccagcaacaagugccggggcaucaucaagaccuucuccaacgggugcgacuacgucagcaacaagggcguggacaccgugagcgucggcaacacgcucuacuacgugaacaagcaggaggggaagucccuguacgugaagggcgagcccaucaucaacuucuacgacccccuggucuucccgagcgacgaguucgacgcguccaucagccaggugaacgagaagaucaaccagucccucgccuucauccgcaagagcgacgagcugcugcacaacgugaacgucgggaaguccaccaccaacaucaugaucaccaccaucaucaucgugaucaucgugauccuccugcugcucaucgccgucggccuguuccuguacugcaaggcccggagcacgcccgugacccuguccaaggaccagcucagcgggaucaacaacaucgccuucuccaacugaggacuaguaauaaggaaacuguaugaaugucugugggcaggaagugaagagauccuucuguaaagguuuuuggaauuaugucugcugaauaauaaacuuuuuugaaauaauaaaucugguagaaaaaugagaucuaaaaaaaaaaaaaaaaaaaaaaaaaaaaaaaaaaaaaaaaaaaaaaaaaaaaaaaaaaaaaaaaugcaucccccccccccccccccccccccccccccccaaaggcucuuuucagagccaccagaauu

SEQ ID NO: 17183 - RNA, 1973 nt, Artificial Sequence
  mRNA product Design g-5 comprising derived and/or modified sequence from HRSV(Memphis-37)__AIY60640.1__F_DSCav1_mut5 (opt2)
gggagacccgugacccggaaguuguacggcuacgcgacuuucccucccacaaacccucgcgcccuuccuuuccuacuugggcccggcagaaagcuuaccauggagcuccccauccucaagaccaacgccaucaccaccauccucgccgccgucacccucugcuucgccuccucccagaacaucaccgaggaguucuaccaguccaccugcuccgccgucuccaagggcuaccucuccgcccuccgcaccggcugguacaccuccgucaucaccaucgagcucuccaacaucaaggagaacaagugcaacggcaccgacgccaaggucaagcucaucaagcaggagcucgacaaguacaagaacgccgucaccgagcuccagcuccucaugcaguccacccccgccgccggcuccggcuccgccaucgccuccggcaucgccgucugcaagguccuccaccucgagggcgaggucaacaagaucaagaacgcccuccucuccaccaacaaggccgucgucucccucuccggcugcggcgucuccguccucaccuucaagguccucgaccucaagaacuacaucgacaagcagcuccuccccauccucaacaagcaguccugcuccaucuccaacaucgagaccgucaucgaguuccagcagaagaacaaccgccuccucgagaucacccgcgaguucuccgucaacgccggcgucaccacccccgucuccaccuacaugcucaccaacuccgagcuccucucccucaucaacgacaugcccaucaccaacgaccagaagaagcucauguccaacaacguccagaucguccgccagcaguccuacuccaucaugugcaucaucaaggaggagguccucgccuacgucguccagcucccccucuacggcgucaucgacacccccugcuggaagcuccacaccuccccccucugcaccaccaacaccaaggagggcuccaacaucugccucacccgcaccgaccgcggcugguacugcgacaacgccggcuccgucuccuucuucccccaggccgagaccugcaagguccaguccaaccgcgucuucugcgacaccaugaacucccgcacccuccccuccgaggucaaccucugcaacaucgacaucuucaaccccaaguacgacugcaagaucaugaccuccaagaccgacgucuccuccuccgucaucaccucccucggcgccaucgucuccugcuacggcaagaccaagugcaccgccuccaacaagugccgcggcaucaucaagaccuucuccaacggcugcgacuacgucuccaacaagggcgucgacaccgucuccgucggcaacacccucuacuacgucaacaagcaggagggcaagucccucuacgucaagggcgagcccaucaucaacuucuacgacccccucgucuuccccuccgacgaguucgacgccuccaucucccaggucaacgagaagaucaaccagucccucgccuucauccgcaaguccgacgagcuccuccacaacgucaacgucggcaaguccaccaccaacaucaugaucaccaccaucaucaucgucaucaucgucauccuccuccuccucaucgccgucggccucuuccucuacugcaaggcccgcuccacccccgucacccucuccaaggaccagcucuccggcaucaacaacaucgccuucuccaacugaggacuaguaauaaggaaacuguaugaaugucugugggcaggaagugaagagauccuucuguaaagguuuuuggaauuaugucugcugaauaauaaacuuuuuugaaauaauaaaucugguagaaaaaugagaucuaaaaaaaaaaaaaaaaaaaaaaaaaaaaaaaaaaaaaaaaaaaaaaaaaaaaaaaaaaaaaaaaugcaucccccccccccccccccccccccccccccccaaaggcucuuuucagagccaccagaauu

SEQ ID NO: 17184 - RNA, 1973 nt, Artificial Sequence
  mRNA product Design g-5 comprising derived and/or modified sequence from HRSV(Memphis-37)__AIY60640.1__F_DSCav1_mut5 (opt3)
gggagacccgugacccggaaguuguacggcuacgcgacuuucccucccacaaacccucgcgcccuuccuuuccuacuugggcccggcagaaagcuuaccauggagcugcccauccucaagaccaacgccauuacaacuauacuugcugcagugacgcugugcuucgccagcucccagaauaucaccgaagaguuuuaccaaucuacauguucagcggucaguaaaggcuauuugagcgcuuuaagaacugggugguacaccuccguuauuacaaucgaacugucuaacauuaaggagaauaaaugcaacggaaccgacgccaaggugaaacuaaucaagcaggaacucgauaaguauaaaaaugcaguaacugagcugcagcuucugaugcagucgaccccugccgcugguucaggcagcgcaauagccagugggaucgcuguguguaaggucuugcaccucgagggagaagugaacaaaauuaagaaugcccugcuguccacaaacaaagcgguugugucucucagcggcugcggugucuccguguuaacguucaagguacuggaccuuaagaauuacaucgauaaacaauugcugccaauucuaaacaagcagucauguaguaucagcaauauagagacuguuauugaauuucagcagaaaaacaauaggcuccuggagaucacccgggaguucucugugaacgcaggggucacaacuccgguguccaccuauaugcuuacaaauucagaacuguugagccucauuaacgacaugcccaucaccaacgaucaaaagaaacugaugaguaauaacgugcagaucguccgccagcagucuuacuccauuaugugcauaaucaaggaggaaguuuuagccuaugugguacaacugccucucuacggagugauugacacgccauguuggaaacuucauacuagcccccugugcacaaccaauacuaaggagggcucgaacaucuguuugacacgaaccgaucguggcugguacugcgacaaugcugggucugucuccuuuuucccucaggccgaaacguguaaggugcagucaaacagaguguuuugcgauaccaugaauaguagaacacugccaagcgaggugaaccucugcaauauagacauuuucaaccccaaauaugauuguaagaucaugacuuccaaaaccgacgucucuagcucagugaucacaagucugggagcaauuguauccugcuacgguaagacuaaauguaccgcuagcaauaagugcaggggcaucauuaagacauuuucuaacgggugugauuauguuucaaauaaaggaguggacaccgucagugugggcaacacucuuuacuaugucaauaagcaagaggguaaaagccuguacgugaagggggaaccuauaaucaacuucuaugacccauugguuuuuccguccgaugaguucgacgccucuauuucgcagguuaacgagaaaaucaaucagagccucgcguuuauccggaaguccgaugaacuguuacacaacguaaaugucggaaagucaacgacaaacauuaugauaaccacuaucauuaucgugauuaucguuauacugcuacuccugaucgccgugggccuuuucuuguacugcaaagcacgcaguacccccgucacacugucuaaggaccagcucagcggcauuaauaacaucgcuuucuccaauugaggacuaguaauaaggaaacuguaugaaugucugugggcaggaagugaagagauccuucuguaaagguuuuuggaauuaugucugcugaauaauaaacuuuuuugaaauaauaaaucugguagaaaaaugagaucuaaaaaaaaaaaaaaaaaaaaaaaaaaaaaaaaaaaaaaaaaaaaaaaaaaaaaaaaaaaaaaaaugcaucccccccccccccccccccccccccccccccaaaggcucuuuucagagccaccagaauu

SEQ ID NO: 17185 - RNA, 1973 nt, Artificial Sequence
  mRNA product Design g-5 comprising derived and/or modified sequence from HRSV(Memphis-37)__AIY60640.1__F_DSCav1_mut5 (opt4)
gggagacccgugacccggaaguuguacggcuacgcgacuuucccucccacaaacccucgcgcccuuccuuuccuacuugggcccggcagaaagcuuaccauggagcugcccauccugaagaccaacgccaucaccaccauccuggccgccgugacccugugcuucgccagcagccagaacaucaccgaggaguucuaccagagcaccugcagcgccgugagcaagggcuaccugagcgcccugagaaccggcugguacaccagcgugaucaccaucgagcugagcaacaucaaggagaacaagugcaacggcaccgacgccaaggugaagcugaucaagcaggagcuggacaaguacaagaacgccgugaccgagcugcagcugcugaugcagagcacccccgccgccggcagcggcagcgccaucgccagcggcaucgccgugugcaaggugcugcaccuggagggcgaggugaacaagaucaagaacgcccugcugagcaccaacaaggccguggugagccugagcggcugcggcgugagcgugcugaccuucaaggugcuggaccugaagaacuacaucgacaagcagcugcugcccauccugaacaagcagagcugcagcaucagcaacaucgagaccgugaucgaguuccagcagaagaacaacagacugcuggagaucaccagagaguucagcgugaacgccggcgugaccacccccgugagcaccuacaugcugaccaacagcgagcugcugagccugaucaacgacaugcccaucaccaacgaccagaagaagcugaugagcaacaacgugcagaucgugagacagcagagcuacagcaucaugugcaucaucaaggaggaggugcuggccuacguggugcagcugccccuguacggcgugaucgacacccccugcuggaagcugcacaccagcccccugugcaccaccaacaccaaggagggcagcaacaucugccugaccagaaccgacagaggcugguacugcgacaacgccggcagcgugagcuucuucccccaggccgagaccugcaaggugcagagcaacagaguguucugcgacaccaugaacagcagaacccugcccagcgaggugaaccugugcaacaucgacaucuucaaccccaaguacgacugcaagaucaugaccagcaagaccgacgugagcagcagcgugaucaccagccugggcgccaucgugagcugcuacggcaagaccaagugcaccgccagcaacaagugcagaggcaucaucaagaccuucagcaacggcugcgacuacgugagcaacaagggcguggacaccgugagcgugggcaacacccuguacuacgugaacaagcaggagggcaagagccuguacgugaagggcgagcccaucaucaacuucuacgacccccugguguuccccagcgacgaguucgacgccagcaucagccaggugaacgagaagaucaaccagagccuggccuucaucagaaagagcgacgagcugcugcacaacgugaacgugggcaagagcaccaccaacaucaugaucaccaccaucaucaucgugaucaucgugauccugcugcugcugaucgccgugggccuguuccuguacugcaaggccagaagcacccccgugacccugagcaaggaccagcugagcggcaucaacaacaucgccuucagcaacugaggacuaguaauaaggaaacuguaugaaugucugugggcaggaagugaagagauccuucuguaaagguuuuuggaauuaugucugcugaauaauaaacuuuuuugaaauaauaaaucugguagaaaaaugagaucuaaaaaaaaaaaaaaaaaaaaaaaaaaaaaaaaaaaaaaaaaaaaaaaaaaaaaaaaaaaaaaaaugcaucccccccccccccccccccccccccccccccaaaggcucuuuucagagccaccagaauu

SEQ ID NO: 17186 - RNA, 1973 nt, Artificial Sequence
  mRNA product Design g-5 comprising derived and/or modified sequence from HRSV(Memphis-37)__AIY60640.1__F_DSCav1_mut5 (opt5)
gggagacccgugacccggaaguuguacggcuacgcgacuuucccucccacaaacccucgcgcccuuccuuuccuacuugggcccggcagaaagcuuaccauggagcugcccauccucaagaccaacgccauuacaacgauccuggcugccgugacccuuugcuucgcgagcucccagaauauuacagaagaguuuuaccaaucuaccuguagcgcugucuccaaaggcuaucugucugcccucagaacagggugguacaccagcguuaucacaauugaacuguccaacaucaaggagaauaaaugcaacggaaccgacgccaaggugaaacuuaucaagcaggaacuggauaaguauaaaaaugcugugacggagcuccagcugcugaugcagucuaccccugccgcuggcagcggguccgccauugcgagcggaaucgccgucuguaaggugcuccaccuggagggcgaaguuaacaaaauuaagaaugcccuucugucuacaaacaaagcuguggucucccucagcgggugcggagugucuguucugaccuucaaggugcuugaccugaagaauuacaucgauaaacaacuccugccgauucugaacaagcaguccuguagcaucucuaauauugagacagucaucgaauuucagcagaaaaacaaucggcuccuggagaucacccgcgaguucuccgugaacgcuggcgugacgacacccgucagcaccuauaugcuuacaaauuccgaacugcucucucugauuaacgacaugccuaucaccaacgaucaaaagaaacuuaugagcaauaacguucagauugugagacagcaguccuacagcaucaugugcauuaucaaggaggaagugcuggccuaugucgugcaacucccccuguacggcguuaucgacaccccuuguuggaaacugcauacaucuccccucugcacgaccaauacaaaggagggguccaacauuugucugacccggacagaucgcggaugguacugcgacaaugcgggcagcgugagcuuuuucccucaggccgaaaccuguaagguccagucuaacagaguguuuugcgauacgaugaacuccagaacacugccgucugagguuaaucucugcaauaucgacauuuucaaccccaaauaugauuguaagaucaugaccagcaaaaccgacguguccagcucugucauuacaucccugggggcuaucgugagcugcuacggaaagaccaaauguacagccucuaauaagugccggggcaucauuaagacguuuuccaacgggugugauuaugucagcaauaaaggaguggacaccguuuccgugggcaacacacuuuacuaugucaauaagcaagagggcaaaucucuguacgugaagggggaaccuaucauuaacuucuaugacccccucguuuuuccuagcgaugaguucgacgcuuccaucucucaggugaacgagaaaauuaaucagagccuggccuuuauccgcaaguccgaugaacugcuccacaacgucaaugugggaaagagcaccacaaacauuaugaucaccacgaucauuaucgugauuaucguuauucugcuucugcucaucgccgucggccuguuccuguacugcaaagcuagaucuacccccgugacacuuuccaaggaccagcucagcgggaucaauaacauugcguucucuaauugaggacuaguaauaaggaaacuguaugaaugucugugggcaggaagugaagagauccuucuguaaagguuuuuggaauuaugucugcugaauaauaaacuuuuuugaaauaauaaaucugguagaaaaaugagaucuaaaaaaaaaaaaaaaaaaaaaaaaaaaaaaaaaaaaaaaaaaaaaaaaaaaaaaaaaaaaaaaaugcaucccccccccccccccccccccccccccccccaaaggcucuuuucagagccaccagaauu

SEQ ID NO: 17187 - RNA, 1973 nt, Artificial Sequence
  mRNA product Design g-5 comprising derived and/or modified sequence from HRSV(Memphis-37)__AIY60640.1__F_DSCav1_mut5 (opt6)
gggagacccgugacccggaaguuguacggcuacgcgacuuucccucccacaaacccucgcgcccuuccuuuccuacuugggcccggcagaaagcuuaccauggaacucccaaucuuaaaaacaaacgcaauaacuacaauacucgcagcaguaacacuaugcuucgcaucaucacaaaacauaaccgaagaauuuuaccaaaguacaugcucagcaguaucaaaagguuaccucucagcccuaagaaccggaugguacacaucaguaaucacuauagaacuauccaauauaaaagaaaacaaaugcaacggcacugacgcaaaaguuaaauuaauuaaacaagaacucgauaaauauaaaaaugcaguaacagaacuacaacuacuaaugcaaagcaccccagcugcaggaagcggaucagcaaucgcaucaggaauagcaguauguaaaguacuacaccuagaaggagaagucaacaaaaucaaaaaugcacuacuaaguacaaacaaagcuguaguaagccuaucagguugcggaguaucaguauuaacauuuaaaguccucgaccuaaaaaauuacauagauaaacaacucuuaccaauacucaauaaacaaaguugcagcaucagcaacauagaaacagucaucgaauuucaacaaaaaaauaauagacuccuagaaauaacacgugaauuuucaguaaaugcuggaguaacaacaccaguaucuacauauaugcuaacaaauagcgaacuacucucacuuauuaacgauaugcccauaacaaacgaccaaaaaaaacuuaugucaaacaauguucaaauaguuagacaacaauccuacagcauaaugugcauaaucaaagaagaaguucuagcuuacguaguacaacuaccacucuaugguguuaucgacacccccuguuggaaacuucacacaucaccacuaugcacaacaaacacaaaagaaggaucaaauauuugcuuaacaagaacagauagaggaugguauugcgauaaugccggaucaguaucauuuuuuccacaagcagaaacauguaaaguacaauccaaccgaguauuuugcgacaccaugaacuccagaacacuaccaucugaagucaaccuauguaauauagauauauuuaacccaaaauaugacuguaaaaucaugacaucaaaaacugauguaaguucuaguguaauaaccagcuuaggcgccauaguaagcuguuacgguaaaacaaaaugcacagcaagcaacaaaugccgcgguauaauaaaaacauucucaaacggaugcgauuauguaaguaacaaaggaguagauacagucuccguaggcaacacauuauacuacguaaacaaacaagaaggaaaaucacuauauguaaaaggagaaccaaucauaaauuucuacgacccacuuguauuccccagcgacgaauuugaugcuuccauuucacaagucaacgaaaaaauaaaccaaucauuagccuucauaagaaaaucagacgaauuauuacauaauguuaaugucggcaaauccacaacuaauauaaugauaacaacaaucauaauaguaauaaucguuauacuacuauuacucauagcaguaggacucuucuuauauuguaaagccagauccaccccaguaacacucucaaaagaccaauuaucaggaauuaauaacaucgcauuuucaaacuaaggacuaguaauaaggaaacuguaugaaugucugugggcaggaagugaagagauccuucuguaaagguuuuuggaauuaugucugcugaauaauaaacuuuuuugaaauaauaaaucugguagaaaaaugagaucuaaaaaaaaaaaaaaaaaaaaaaaaaaaaaaaaaaaaaaaaaaaaaaaaaaaaaaaaaaaaaaaaugcaucccccccccccccccccccccccccccccccaaaggcucuuuucagagccaccagaauu

SEQ ID NO: 17188 - RNA, 1973 nt, Artificial Sequence
  mRNA product Design g-5 comprising derived and/or modified sequence from HRSV(Memphis-37)__AIY60640.1__F_DSCav1_mut5 (opt11)
gggagacccgugacccggaaguuguacggcuacgcgacuuucccucccacaaacccucgcgcccuuccuuuccuacuugggcccggcagaaagcuuaccauggaacuccccauccuuaaaaccaacgcaaucaccacaauacucgccgccgucacccucugcuuugcguccucccagaacaucaccgaagaguucuaccaaucgaccugcagcgccgucagcaagggcuaccucucagcccuccgaacaggcugguacacauccgucaucaccaucgaacucucaaacauaaaagaaaacaaguguaacggcaccgacgcgaaaguuaaacucaucaaacaagaacucgauaaauacaaaaacgcaguaaccgaacuacaacuccuaaugcaauccacacccgcagccggcagcggcuccgcaaucgccuccggcauagcagucugcaaaguccuccaccucgaaggagaagucaauaaaaucaaaaacgcccuccuauccaccaacaaagcgguugucucccuguccggaugcggaguuagcguccuaaccuucaaggugcucgaccucaaaaacuacauagacaaacaacuacuccccauacucaacaaacaaucaugcuccaucagcaacaucgagaccgucaucgaguuccaacagaaaaacaaccgccuccucgaaaucacacgagaguucuccguaaacgccggcgucacaacccccguuuccacuuacaugcucacaaacagcgaacuccucucccucaucaacgacaugccaaucaccaacgaccaaaagaaacucauguccaacaacguccaaaucguccgccaacaaagcuacagcauaaugugcaucauaaaagaagaaguacucgcguacguaguccaacuaccccuauacggcgucaucgacacccccugcuggaaacugcacacuucuccccucuguacaaccaacacuaaagaaggcucgaacaucugccucaccagaacagaccgaggaugguacugcgacaacgccggcuccgucagcuucuucccccaggccgaaacaugcaaaguacaaucaaaccgagucuucugcgacacaaugaacagcagaacucuacccuccgaaguuaaccuaugcaacaucgacaucuucaaccccaaauacgacugcaaaauaaugaccucaaaaacagacguguccagcuccguuaucaccucucucggagccaucguauccuguuauggaaaaaccaaaugcaccgccucaaacaaaugccgaggcauaaucaaaacauucucaaauggaugcgacuacguauccaacaaaggagucgacaccgucagcgugggcaauacccucuacuacgucaacaaacaggaagggaaaucccucuauguaaagggcgagcccauuauuaacuucuaugacccccucguguucccaagcgacgaguucgacgccuccauaucacaagucaaugagaaaaucaaccaaucacuagcuuucauucgcaaauccgacgaacuccuucacaacgucaacgucggcaaauccaccaccaacaucaugaucaccaccauaauuaucgucauuaucgucauacuacuccuacucaucgccgucggccucuuccucuauugcaaagcacgcucgacacccgucacccuuucaaaagaccaacuuuccggcauaaacaacauagccuucagcaacuagggacuaguaauaaggaaacuguaugaaugucugugggcaggaagugaagagauccuucuguaaagguuuuuggaauuaugucugcugaauaauaaacuuuuuugaaauaauaaaucugguagaaaaaugagaucuaaaaaaaaaaaaaaaaaaaaaaaaaaaaaaaaaaaaaaaaaaaaaaaaaaaaaaaaaaaaaaaaugcaucccccccccccccccccccccccccccccccaaaggcucuuuucagagccaccagaauu

SEQ ID NO: 17189 - RNA, 1989 nt, Artificial Sequence
  mRNA product Design h-1 comprising derived and/or modified sequence from HRSV(Memphis-37)__AIY60640.1__F_DSCav1_mut5 (opt1)
gggagacccgugacccggaaguuguacggcuacgcgacuuucccucccacaaacccucgcgcccuuccuuuccuacuugggcccggcagaaagcuuaccauggagcugcccauccucaagaccaacgccaucaccacgauccuggccgcggugacccugugcuucgccagcucccagaacaucaccgaggaguucuaccagagcacgugcuccgccgucagcaagggcuaccucuccgcccugcgcaccgggugguacaccagcgugaucaccaucgagcuguccaacaucaaggagaacaagugcaacggcaccgacgccaaggugaagcucaucaagcaggagcuggacaaguacaagaacgcggucacggagcugcagcuccugaugcagagcaccccggccgccggcuccgggagcgcgaucgccuccggcaucgccgucugcaaggugcugcaccucgagggcgaggugaacaagaucaagaacgcccugcuguccaccaacaaggccgucgugagccucuccggcugcggggugagcguccugaccuucaaggugcuggaccucaagaacuacaucgacaagcagcugcugcccauccugaacaagcagagcugcuccaucagcaacaucgagaccgucaucgaguuccagcagaagaacaaccgccuccuggagaucacgcgggaguucagcgugaacgcgggcgugaccacccccgucuccaccuacaugcugacgaacagcgagcuccugucccugaucaacgacaugccgaucaccaacgaccagaagaagcucaugagcaacaacgugcagaucgugcgccagcaguccuacagcaucaugugcaucaucaaggaggagguccuggccuacguggugcagcugccccucuacggggucaucgacacccccugcuggaagcugcacaccagcccccugugcacgaccaacaccaaggagggcuccaacaucugccucacccggacggaccgcgggugguacugcgacaacgccggcagcguguccuucuucccgcaggccgagaccugcaagguccagagcaaccggguguucugcgacaccaugaacucccggacccugcccagcgaggugaaccucugcaacaucgacaucuucaaccccaaguacgacugcaagaucaugacguccaagaccgacgucagcuccagcgugaucaccucccugggcgccaucgugagcugcuacgggaagaccaagugcacggcgagcaacaagugccgcggcaucaucaagaccuucuccaacgggugcgacuacgucagcaacaagggcguggacaccguguccgucggcaacacccuguacuacgugaacaagcaggagggcaagagccucuacgugaagggggagcccaucaucaacuucuacgacccgcuggucuuccccuccgacgaguucgacgccagcaucucccaggugaacgagaagaucaaccagagccuggccuucauccggaaguccgacgagcuccugcacaacgugaacgucggcaagagcaccacgaacaucaugaucaccaccaucaucaucgugaucaucgugauccugcugcuccugaucgccgucgggcuguuccucuacugcaaggcccgcuccacccccgugacgcugagcaaggaccagcuguccgggaucaacaacaucgcguucagcaacugaggacuaguacuggcugcaucucccuuuccucuguccuccauccuucucccaggauggugaagggggaccugguacccagugauccccaccccaggauccuaaaucaugacuuaccugcuaauaaaaacucauuggaaaagugagaagaucuaaaaaaaaaaaaaaaaaaaaaaaaaaaaaaaaaaaaaaaaaaaaaaaaaaaaaaaaaaaaaaaaugcaucccccccccccccccccccccccccccccccaaaggcucuuuucagagccaccagaauu

SEQ ID NO: 17190 - RNA, 1989 nt, Artificial Sequence
  mRNA product Design h-1 comprising derived and/or modified sequence from HRSV(Memphis-37)__AIY60640.1__F_DSCav1_mut5 (opt1)
gggagacccgugacccggaaguuguacggcuacgcgacuuucccucccacaaacccucgcgcccuuccuuuccuacuugggcccggcagaaagcuuaccauggagcugcccauccucaagaccaacgccaucaccacgauccuggccgcggugacccugugcuucgccagcucccagaacaucaccgaggaguucuaccagagcacgugcuccgccgucagcaagggcuaccucuccgcccugcgcaccgggugguacaccagcgugaucaccaucgagcuguccaacaucaaggagaacaagugcaacggcaccgacgccaaggugaagcucaucaagcaggagcuggacaaguacaagaacgcggucacggagcugcagcuccugaugcagagcaccccggccgccggguccggcagcgccaucgcguccgggaucgccgugugcaaggugcugcaccucgagggcgaggucaacaagaucaagaacgcccugcugagcaccaacaaggccguggugucccucagcggcugcggggucuccgugcugaccuucaaggugcuggaccucaagaacuacaucgacaagcagcugcugcccauccucaacaagcagagcugcuccaucagcaacaucgagacggucaucgaguuccagcagaagaacaaccggcugcuggagaucacccgcgaguucuccgugaacgccggcgugaccacccccgucagcacguacaugcucaccaacagcgagcugcugucccucaucaacgacaugcccaucaccaacgaccagaagaagcugaugagcaacaacgugcagaucgugcggcagcaguccuacagcaucaugugcaucaucaaggaggagguccuggcguacguggugcagcucccgcuguacggggucaucgacacccccugcuggaagcugcacacgagcccccucugcaccaccaacaccaaggagggcuccaacaucugccugacgcgcaccgaccgggggugguacugcgacaacgccggcuccgugagcuucuucccccaggccgagaccugcaaggugcaguccaaccgcgucuucugcgacaccaugaacagccggacgcucccguccgaggugaaccugugcaacaucgacaucuucaaccccaaguacgacugcaagaucaugaccagcaagaccgacgucuccagcuccgugaucaccagccugggcgccaucguguccugcuacgggaagacgaagugcaccgccagcaacaagugccggggcaucaucaagaccuucuccaacgggugcgacuacgucagcaacaagggcguggacaccgugagcgucggcaacacgcucuacuacgugaacaagcaggaggggaagucccuguacgugaagggcgagcccaucaucaacuucuacgacccccuggucuucccgagcgacgaguucgacgcguccaucagccaggugaacgagaagaucaaccagucccucgccuucauccgcaagagcgacgagcugcugcacaacgugaacgucgggaaguccaccaccaacaucaugaucaccaccaucaucaucgugaucaucgugauccuccugcugcucaucgccgucggccuguuccuguacugcaaggcccggagcacgcccgugacccuguccaaggaccagcucagcgggaucaacaacaucgccuucuccaacugaggacuaguacuggcugcaucucccuuuccucuguccuccauccuucucccaggauggugaagggggaccugguacccagugauccccaccccaggauccuaaaucaugacuuaccugcuaauaaaaacucauuggaaaagugagaagaucuaaaaaaaaaaaaaaaaaaaaaaaaaaaaaaaaaaaaaaaaaaaaaaaaaaaaaaaaaaaaaaaaugcaucccccccccccccccccccccccccccccccaaaggcucuuuucagagccaccagaauu

SEQ ID NO: 17191 - RNA, 1989 nt, Artificial Sequence
  mRNA product Design h-1 comprising derived and/or modified sequence from HRSV(Memphis-37)__AIY60640.1__F_DSCav1_mut5 (opt2)
gggagacccgugacccggaaguuguacggcuacgcgacuuucccucccacaaacccucgcgcccuuccuuuccuacuugggcccggcagaaagcuuaccauggagcuccccauccucaagaccaacgccaucaccaccauccucgccgccgucacccucugcuucgccuccucccagaacaucaccgaggaguucuaccaguccaccugcuccgccgucuccaagggcuaccucuccgcccuccgcaccggcugguacaccuccgucaucaccaucgagcucuccaacaucaaggagaacaagugcaacggcaccgacgccaaggucaagcucaucaagcaggagcucgacaaguacaagaacgccgucaccgagcuccagcuccucaugcaguccacccccgccgccggcuccggcuccgccaucgccuccggcaucgccgucugcaagguccuccaccucgagggcgaggucaacaagaucaagaacgcccuccucuccaccaacaaggccgucgucucccucuccggcugcggcgucuccguccucaccuucaagguccucgaccucaagaacuacaucgacaagcagcuccuccccauccucaacaagcaguccugcuccaucuccaacaucgagaccgucaucgaguuccagcagaagaacaaccgccuccucgagaucacccgcgaguucuccgucaacgccggcgucaccacccccgucuccaccuacaugcucaccaacuccgagcuccucucccucaucaacgacaugcccaucaccaacgaccagaagaagcucauguccaacaacguccagaucguccgccagcaguccuacuccaucaugugcaucaucaaggaggagguccucgccuacgucguccagcucccccucuacggcgucaucgacacccccugcuggaagcuccacaccuccccccucugcaccaccaacaccaaggagggcuccaacaucugccucacccgcaccgaccgcggcugguacugcgacaacgccggcuccgucuccuucuucccccaggccgagaccugcaagguccaguccaaccgcgucuucugcgacaccaugaacucccgcacccuccccuccgaggucaaccucugcaacaucgacaucuucaaccccaaguacgacugcaagaucaugaccuccaagaccgacgucuccuccuccgucaucaccucccucggcgccaucgucuccugcuacggcaagaccaagugcaccgccuccaacaagugccgcggcaucaucaagaccuucuccaacggcugcgacuacgucuccaacaagggcgucgacaccgucuccgucggcaacacccucuacuacgucaacaagcaggagggcaagucccucuacgucaagggcgagcccaucaucaacuucuacgacccccucgucuuccccuccgacgaguucgacgccuccaucucccaggucaacgagaagaucaaccagucccucgccuucauccgcaaguccgacgagcuccuccacaacgucaacgucggcaaguccaccaccaacaucaugaucaccaccaucaucaucgucaucaucgucauccuccuccuccucaucgccgucggccucuuccucuacugcaaggcccgcuccacccccgucacccucuccaaggaccagcucuccggcaucaacaacaucgccuucuccaacugaggacuaguacuggcugcaucucccuuuccucuguccuccauccuucucccaggauggugaagggggaccugguacccagugauccccaccccaggauccuaaaucaugacuuaccugcuaauaaaaacucauuggaaaagugagaagaucuaaaaaaaaaaaaaaaaaaaaaaaaaaaaaaaaaaaaaaaaaaaaaaaaaaaaaaaaaaaaaaaaugcaucccccccccccccccccccccccccccccccaaaggcucuuuucagagccaccagaauu

SEQ ID NO: 17192 - RNA, 1989 nt, Artificial Sequence
  mRNA product Design h-1 comprising derived and/or modified sequence from HRSV(Memphis-37)__AIY60640.1__F_DSCav1_mut5 (opt3)
gggagacccgugacccggaaguuguacggcuacgcgacuuucccucccacaaacccucgcgcccuuccuuuccuacuugggcccggcagaaagcuuaccauggagcugcccauccucaagaccaacgccauuacaacuauacuugcugcagugacgcugugcuucgccagcucccagaauaucaccgaagaguuuuaccaaucuacauguucagcggucaguaaaggcuauuugagcgcuuuaagaacugggugguacaccuccguuauuacaaucgaacugucuaacauuaaggagaauaaaugcaacggaaccgacgccaaggugaaacuaaucaagcaggaacucgauaaguauaaaaaugcaguaacugagcugcagcuucugaugcagucgaccccugccgcugguucaggcagcgcaauagccagugggaucgcuguguguaaggucuugcaccucgagggagaagugaacaaaauuaagaaugcccugcuguccacaaacaaagcgguugugucucucagcggcugcggugucuccguguuaacguucaagguacuggaccuuaagaauuacaucgauaaacaauugcugccaauucuaaacaagcagucauguaguaucagcaauauagagacuguuauugaauuucagcagaaaaacaauaggcuccuggagaucacccgggaguucucugugaacgcaggggucacaacuccgguguccaccuauaugcuuacaaauucagaacuguugagccucauuaacgacaugcccaucaccaacgaucaaaagaaacugaugaguaauaacgugcagaucguccgccagcagucuuacuccauuaugugcauaaucaaggaggaaguuuuagccuaugugguacaacugccucucuacggagugauugacacgccauguuggaaacuucauacuagcccccugugcacaaccaauacuaaggagggcucgaacaucuguuugacacgaaccgaucguggcugguacugcgacaaugcugggucugucuccuuuuucccucaggccgaaacguguaaggugcagucaaacagaguguuuugcgauaccaugaauaguagaacacugccaagcgaggugaaccucugcaauauagacauuuucaaccccaaauaugauuguaagaucaugacuuccaaaaccgacgucucuagcucagugaucacaagucugggagcaauuguauccugcuacgguaagacuaaauguaccgcuagcaauaagugcaggggcaucauuaagacauuuucuaacgggugugauuauguuucaaauaaaggaguggacaccgucagugugggcaacacucuuuacuaugucaauaagcaagaggguaaaagccuguacgugaagggggaaccuauaaucaacuucuaugacccauugguuuuuccguccgaugaguucgacgccucuauuucgcagguuaacgagaaaaucaaucagagccucgcguuuauccggaaguccgaugaacuguuacacaacguaaaugucggaaagucaacgacaaacauuaugauaaccacuaucauuaucgugauuaucguuauacugcuacuccugaucgccgugggccuuuucuuguacugcaaagcacgcaguacccccgucacacugucuaaggaccagcucagcggcauuaauaacaucgcuuucuccaauugaggacuaguacuggcugcaucucccuuuccucuguccuccauccuucucccaggauggugaagggggaccugguacccagugauccccaccccaggauccuaaaucaugacuuaccugcuaauaaaaacucauuggaaaagugagaagaucuaaaaaaaaaaaaaaaaaaaaaaaaaaaaaaaaaaaaaaaaaaaaaaaaaaaaaaaaaaaaaaaaugcaucccccccccccccccccccccccccccccccaaaggcucuuuucagagccaccagaauu

SEQ ID NO: 17193 - RNA, 1989 nt, Artificial Sequence
  mRNA product Design h-1 comprising derived and/or modified sequence from HRSV(Memphis-37)__AIY60640.1__F_DSCav1_mut5 (opt4)
gggagacccgugacccggaaguuguacggcuacgcgacuuucccucccacaaacccucgcgcccuuccuuuccuacuugggcccggcagaaagcuuaccauggagcugcccauccugaagaccaacgccaucaccaccauccuggccgccgugacccugugcuucgccagcagccagaacaucaccgaggaguucuaccagagcaccugcagcgccgugagcaagggcuaccugagcgcccugagaaccggcugguacaccagcgugaucaccaucgagcugagcaacaucaaggagaacaagugcaacggcaccgacgccaaggugaagcugaucaagcaggagcuggacaaguacaagaacgccgugaccgagcugcagcugcugaugcagagcacccccgccgccggcagcggcagcgccaucgccagcggcaucgccgugugcaaggugcugcaccuggagggcgaggugaacaagaucaagaacgcccugcugagcaccaacaaggccguggugagccugagcggcugcggcgugagcgugcugaccuucaaggugcuggaccugaagaacuacaucgacaagcagcugcugcccauccugaacaagcagagcugcagcaucagcaacaucgagaccgugaucgaguuccagcagaagaacaacagacugcuggagaucaccagagaguucagcgugaacgccggcgugaccacccccgugagcaccuacaugcugaccaacagcgagcugcugagccugaucaacgacaugcccaucaccaacgaccagaagaagcugaugagcaacaacgugcagaucgugagacagcagagcuacagcaucaugugcaucaucaaggaggaggugcuggccuacguggugcagcugccccuguacggcgugaucgacacccccugcuggaagcugcacaccagcccccugugcaccaccaacaccaaggagggcagcaacaucugccugaccagaaccgacagaggcugguacugcgacaacgccggcagcgugagcuucuucccccaggccgagaccugcaaggugcagagcaacagaguguucugcgacaccaugaacagcagaacccugcccagcgaggugaaccugugcaacaucgacaucuucaaccccaaguacgacugcaagaucaugaccagcaagaccgacgugagcagcagcgugaucaccagccugggcgccaucgugagcugcuacggcaagaccaagugcaccgccagcaacaagugcagaggcaucaucaagaccuucagcaacggcugcgacuacgugagcaacaagggcguggacaccgugagcgugggcaacacccuguacuacgugaacaagcaggagggcaagagccuguacgugaagggcgagcccaucaucaacuucuacgacccccugguguuccccagcgacgaguucgacgccagcaucagccaggugaacgagaagaucaaccagagccuggccuucaucagaaagagcgacgagcugcugcacaacgugaacgugggcaagagcaccaccaacaucaugaucaccaccaucaucaucgugaucaucgugauccugcugcugcugaucgccgugggccuguuccuguacugcaaggccagaagcacccccgugacccugagcaaggaccagcugagcggcaucaacaacaucgccuucagcaacugaggacuaguacuggcugcaucucccuuuccucuguccuccauccuucucccaggauggugaagggggaccugguacccagugauccccaccccaggauccuaaaucaugacuuaccugcuaauaaaaacucauuggaaaagugagaagaucuaaaaaaaaaaaaaaaaaaaaaaaaaaaaaaaaaaaaaaaaaaaaaaaaaaaaaaaaaaaaaaaaugcaucccccccccccccccccccccccccccccccaaaggcucuuuucagagccaccagaauu

SEQ ID NO: 17194 - RNA, 1989 nt, Artificial Sequence
  mRNA product Design h-1 comprising derived and/or modified sequence from HRSV(Memphis-37)__AIY60640.1__F_DSCav1_mut5 (opt5)
gggagacccgugacccggaaguuguacggcuacgcgacuuucccucccacaaacccucgcgcccuuccuuuccuacuugggcccggcagaaagcuuaccauggagcugcccauccucaagaccaacgccauuacaacgauccuggcugccgugacccuuugcuucgcgagcucccagaauauuacagaagaguuuuaccaaucuaccuguagcgcugucuccaaaggcuaucugucugcccucagaacagggugguacaccagcguuaucacaauugaacuguccaacaucaaggagaauaaaugcaacggaaccgacgccaaggugaaacuuaucaagcaggaacuggauaaguauaaaaaugcugugacggagcuccagcugcugaugcagucuaccccugccgcuggcagcggguccgccauugcgagcggaaucgccgucuguaaggugcuccaccuggagggcgaaguuaacaaaauuaagaaugcccuucugucuacaaacaaagcuguggucucccucagcgggugcggagugucuguucugaccuucaaggugcuugaccugaagaauuacaucgauaaacaacuccugccgauucugaacaagcaguccuguagcaucucuaauauugagacagucaucgaauuucagcagaaaaacaaucggcuccuggagaucacccgcgaguucuccgugaacgcuggcgugacgacacccgucagcaccuauaugcuuacaaauuccgaacugcucucucugauuaacgacaugccuaucaccaacgaucaaaagaaacuuaugagcaauaacguucagauugugagacagcaguccuacagcaucaugugcauuaucaaggaggaagugcuggccuaugucgugcaacucccccuguacggcguuaucgacaccccuuguuggaaacugcauacaucuccccucugcacgaccaauacaaaggagggguccaacauuugucugacccggacagaucgcggaugguacugcgacaaugcgggcagcgugagcuuuuucccucaggccgaaaccuguaagguccagucuaacagaguguuuugcgauacgaugaacuccagaacacugccgucugagguuaaucucugcaauaucgacauuuucaaccccaaauaugauuguaagaucaugaccagcaaaaccgacguguccagcucugucauuacaucccugggggcuaucgugagcugcuacggaaagaccaaauguacagccucuaauaagugccggggcaucauuaagacguuuuccaacgggugugauuaugucagcaauaaaggaguggacaccguuuccgugggcaacacacuuuacuaugucaauaagcaagagggcaaaucucuguacgugaagggggaaccuaucauuaacuucuaugacccccucguuuuuccuagcgaugaguucgacgcuuccaucucucaggugaacgagaaaauuaaucagagccuggccuuuauccgcaaguccgaugaacugcuccacaacgucaaugugggaaagagcaccacaaacauuaugaucaccacgaucauuaucgugauuaucguuauucugcuucugcucaucgccgucggccuguuccuguacugcaaagcuagaucuacccccgugacacuuuccaaggaccagcucagcgggaucaauaacauugcguucucuaauugaggacuaguacuggcugcaucucccuuuccucuguccuccauccuucucccaggauggugaagggggaccugguacccagugauccccaccccaggauccuaaaucaugacuuaccugcuaauaaaaacucauuggaaaagugagaagaucuaaaaaaaaaaaaaaaaaaaaaaaaaaaaaaaaaaaaaaaaaaaaaaaaaaaaaaaaaaaaaaaaugcaucccccccccccccccccccccccccccccccaaaggcucuuuucagagccaccagaauu

SEQ ID NO: 17195 - RNA, 1989 nt, Artificial Sequence
  mRNA product Design h-1 comprising derived and/or modified sequence from HRSV(Memphis-37)__AIY60640.1__F_DSCav1_mut5 (opt6)
gggagacccgugacccggaaguuguacggcuacgcgacuuucccucccacaaacccucgcgcccuuccuuuccuacuugggcccggcagaaagcuuaccauggaacucccaaucuuaaaaacaaacgcaauaacuacaauacucgcagcaguaacacuaugcuucgcaucaucacaaaacauaaccgaagaauuuuaccaaaguacaugcucagcaguaucaaaagguuaccucucagcccuaagaaccggaugguacacaucaguaaucacuauagaacuauccaauauaaaagaaaacaaaugcaacggcacugacgcaaaaguuaaauuaauuaaacaagaacucgauaaauauaaaaaugcaguaacagaacuacaacuacuaaugcaaagcaccccagcugcaggaagcggaucagcaaucgcaucaggaauagcaguauguaaaguacuacaccuagaaggagaagucaacaaaaucaaaaaugcacuacuaaguacaaacaaagcuguaguaagccuaucagguugcggaguaucaguauuaacauuuaaaguccucgaccuaaaaaauuacauagauaaacaacucuuaccaauacucaauaaacaaaguugcagcaucagcaacauagaaacagucaucgaauuucaacaaaaaaauaauagacuccuagaaauaacacgugaauuuucaguaaaugcuggaguaacaacaccaguaucuacauauaugcuaacaaauagcgaacuacucucacuuauuaacgauaugcccauaacaaacgaccaaaaaaaacuuaugucaaacaauguucaaauaguuagacaacaauccuacagcauaaugugcauaaucaaagaagaaguucuagcuuacguaguacaacuaccacucuaugguguuaucgacacccccuguuggaaacuucacacaucaccacuaugcacaacaaacacaaaagaaggaucaaauauuugcuuaacaagaacagauagaggaugguauugcgauaaugccggaucaguaucauuuuuuccacaagcagaaacauguaaaguacaauccaaccgaguauuuugcgacaccaugaacuccagaacacuaccaucugaagucaaccuauguaauauagauauauuuaacccaaaauaugacuguaaaaucaugacaucaaaaacugauguaaguucuaguguaauaaccagcuuaggcgccauaguaagcuguuacgguaaaacaaaaugcacagcaagcaacaaaugccgcgguauaauaaaaacauucucaaacggaugcgauuauguaaguaacaaaggaguagauacagucuccguaggcaacacauuauacuacguaaacaaacaagaaggaaaaucacuauauguaaaaggagaaccaaucauaaauuucuacgacccacuuguauuccccagcgacgaauuugaugcuuccauuucacaagucaacgaaaaaauaaaccaaucauuagccuucauaagaaaaucagacgaauuauuacauaauguuaaugucggcaaauccacaacuaauauaaugauaacaacaaucauaauaguaauaaucguuauacuacuauuacucauagcaguaggacucuucuuauauuguaaagccagauccaccccaguaacacucucaaaagaccaauuaucaggaauuaauaacaucgcauuuucaaacuaaggacuaguacuggcugcaucucccuuuccucuguccuccauccuucucccaggauggugaagggggaccugguacccagugauccccaccccaggauccuaaaucaugacuuaccugcuaauaaaaacucauuggaaaagugagaagaucuaaaaaaaaaaaaaaaaaaaaaaaaaaaaaaaaaaaaaaaaaaaaaaaaaaaaaaaaaaaaaaaaugcaucccccccccccccccccccccccccccccccaaaggcucuuuucagagccaccagaauu

SEQ ID NO: 17196 - RNA, 1989 nt, Artificial Sequence
  mRNA product Design h-1 comprising derived and/or modified sequence from HRSV(Memphis-37)__AIY60640.1__F_DSCav1_mut5 (opt11)
gggagacccgugacccggaaguuguacggcuacgcgacuuucccucccacaaacccucgcgcccuuccuuuccuacuugggcccggcagaaagcuuaccauggaacuccccauccuuaaaaccaacgcaaucaccacaauacucgccgccgucacccucugcuuugcguccucccagaacaucaccgaagaguucuaccaaucgaccugcagcgccgucagcaagggcuaccucucagcccuccgaacaggcugguacacauccgucaucaccaucgaacucucaaacauaaaagaaaacaaguguaacggcaccgacgcgaaaguuaaacucaucaaacaagaacucgauaaauacaaaaacgcaguaaccgaacuacaacuccuaaugcaauccacacccgcagccggcagcggcuccgcaaucgccuccggcauagcagucugcaaaguccuccaccucgaaggagaagucaauaaaaucaaaaacgcccuccuauccaccaacaaagcgguugucucccuguccggaugcggaguuagcguccuaaccuucaaggugcucgaccucaaaaacuacauagacaaacaacuacuccccauacucaacaaacaaucaugcuccaucagcaacaucgagaccgucaucgaguuccaacagaaaaacaaccgccuccucgaaaucacacgagaguucuccguaaacgccggcgucacaacccccguuuccacuuacaugcucacaaacagcgaacuccucucccucaucaacgacaugccaaucaccaacgaccaaaagaaacucauguccaacaacguccaaaucguccgccaacaaagcuacagcauaaugugcaucauaaaagaagaaguacucgcguacguaguccaacuaccccuauacggcgucaucgacacccccugcuggaaacugcacacuucuccccucuguacaaccaacacuaaagaaggcucgaacaucugccucaccagaacagaccgaggaugguacugcgacaacgccggcuccgucagcuucuucccccaggccgaaacaugcaaaguacaaucaaaccgagucuucugcgacacaaugaacagcagaacucuacccuccgaaguuaaccuaugcaacaucgacaucuucaaccccaaauacgacugcaaaauaaugaccucaaaaacagacguguccagcuccguuaucaccucucucggagccaucguauccuguuauggaaaaaccaaaugcaccgccucaaacaaaugccgaggcauaaucaaaacauucucaaauggaugcgacuacguauccaacaaaggagucgacaccgucagcgugggcaauacccucuacuacgucaacaaacaggaagggaaaucccucuauguaaagggcgagcccauuauuaacuucuaugacccccucguguucccaagcgacgaguucgacgccuccauaucacaagucaaugagaaaaucaaccaaucacuagcuuucauucgcaaauccgacgaacuccuucacaacgucaacgucggcaaauccaccaccaacaucaugaucaccaccauaauuaucgucauuaucgucauacuacuccuacucaucgccgucggccucuuccucuauugcaaagcacgcucgacacccgucacccuuucaaaagaccaacuuuccggcauaaacaacauagccuucagcaacuagggacuaguacuggcugcaucucccuuuccucuguccuccauccuucucccaggauggugaagggggaccugguacccagugauccccaccccaggauccuaaaucaugacuuaccugcuaauaaaaacucauuggaaaagugagaagaucuaaaaaaaaaaaaaaaaaaaaaaaaaaaaaaaaaaaaaaaaaaaaaaaaaaaaaaaaaaaaaaaaugcaucccccccccccccccccccccccccccccccaaaggcucuuuucagagccaccagaauu

SEQ ID NO: 17197 - RNA, 2205 nt, Artificial Sequence
  mRNA product Design h-2 comprising derived and/or modified sequence from HRSV(Memphis-37)__AIY60640.1__F_DSCav1_mut5 (opt1)
gggagacccgugacccggaaguuguacggcuacgcgacuuucccucccacaaacccucgcgcccuuccuuuccuacuugggcccggcagaaagcuuaccauggagcugcccauccucaagaccaacgccaucaccacgauccuggccgcggugacccugugcuucgccagcucccagaacaucaccgaggaguucuaccagagcacgugcuccgccgucagcaagggcuaccucuccgcccugcgcaccgggugguacaccagcgugaucaccaucgagcuguccaacaucaaggagaacaagugcaacggcaccgacgccaaggugaagcucaucaagcaggagcuggacaaguacaagaacgcggucacggagcugcagcuccugaugcagagcaccccggccgccggcuccgggagcgcgaucgccuccggcaucgccgucugcaaggugcugcaccucgagggcgaggugaacaagaucaagaacgcccugcuguccaccaacaaggccgucgugagccucuccggcugcggggugagcguccugaccuucaaggugcuggaccucaagaacuacaucgacaagcagcugcugcccauccugaacaagcagagcugcuccaucagcaacaucgagaccgucaucgaguuccagcagaagaacaaccgccuccuggagaucacgcgggaguucagcgugaacgcgggcgugaccacccccgucuccaccuacaugcugacgaacagcgagcuccugucccugaucaacgacaugccgaucaccaacgaccagaagaagcucaugagcaacaacgugcagaucgugcgccagcaguccuacagcaucaugugcaucaucaaggaggagguccuggccuacguggugcagcugccccucuacggggucaucgacacccccugcuggaagcugcacaccagcccccugugcacgaccaacaccaaggagggcuccaacaucugccucacccggacggaccgcgggugguacugcgacaacgccggcagcguguccuucuucccgcaggccgagaccugcaagguccagagcaaccggguguucugcgacaccaugaacucccggacccugcccagcgaggugaaccucugcaacaucgacaucuucaaccccaaguacgacugcaagaucaugacguccaagaccgacgucagcuccagcgugaucaccucccugggcgccaucgugagcugcuacgggaagaccaagugcacggcgagcaacaagugccgcggcaucaucaagaccuucuccaacgggugcgacuacgucagcaacaagggcguggacaccguguccgucggcaacacccuguacuacgugaacaagcaggagggcaagagccucuacgugaagggggagcccaucaucaacuucuacgacccgcuggucuuccccuccgacgaguucgacgccagcaucucccaggugaacgagaagaucaaccagagccuggccuucauccggaaguccgacgagcuccugcacaacgugaacgucggcaagagcaccacgaacaucaugaucaccaccaucaucaucgugaucaucgugauccugcugcuccugaucgccgucgggcuguuccucuacugcaaggcccgcuccacccccgugacgcugagcaaggaccagcuguccgggaucaacaacaucgcguucagcaacugaggacuagugaagggaacacccaaauuuaauucagccuuaagcacaauuaauuaagagugaaacguaauuguacaagcaguuggucacccaccauagggcaugaucaacaccgcaaccuuuccuuuuucccccagugauucugaaaaaccccucuucccuucagcuugcuuagauguuccaaauuuaguaagcuuaaggcggccuacagaagaaaaagaaaaaaaaggccacaaaaguucccucucacuuucaguaaauaaaauaaaagcagcaacagaaauaaagaaauaaaugaaauucaaaaugaaauaaauauuguguugugcagcauuaaaaaaucaauaaaaauuaaaaaugagcaagaucuaaaaaaaaaaaaaaaaaaaaaaaaaaaaaaaaaaaaaaaaaaaaaaaaaaaaaaaaaaaaaaaaugcaucccccccccccccccccccccccccccccccaaaggcucuuuucagagccaccagaauu

SEQ ID NO: 17198 - RNA, 2205 nt, Artificial Sequence
  mRNA product Design h-2 comprising derived and/or modified sequence from HRSV(Memphis-37)__AIY60640.1__F_DSCav1_mut5 (opt1)
gggagacccgugacccggaaguuguacggcuacgcgacuuucccucccacaaacccucgcgcccuuccuuuccuacuugggcccggcagaaagcuuaccauggagcugcccauccucaagaccaacgccaucaccacgauccuggccgcggugacccugugcuucgccagcucccagaacaucaccgaggaguucuaccagagcacgugcuccgccgucagcaagggcuaccucuccgcccugcgcaccgggugguacaccagcgugaucaccaucgagcuguccaacaucaaggagaacaagugcaacggcaccgacgccaaggugaagcucaucaagcaggagcuggacaaguacaagaacgcggucacggagcugcagcuccugaugcagagcaccccggccgccggguccggcagcgccaucgcguccgggaucgccgugugcaaggugcugcaccucgagggcgaggucaacaagaucaagaacgcccugcugagcaccaacaaggccguggugucccucagcggcugcggggucuccgugcugaccuucaaggugcuggaccucaagaacuacaucgacaagcagcugcugcccauccucaacaagcagagcugcuccaucagcaacaucgagacggucaucgaguuccagcagaagaacaaccggcugcuggagaucacccgcgaguucuccgugaacgccggcgugaccacccccgucagcacguacaugcucaccaacagcgagcugcugucccucaucaacgacaugcccaucaccaacgaccagaagaagcugaugagcaacaacgugcagaucgugcggcagcaguccuacagcaucaugugcaucaucaaggaggagguccuggcguacguggugcagcucccgcuguacggggucaucgacacccccugcuggaagcugcacacgagcccccucugcaccaccaacaccaaggagggcuccaacaucugccugacgcgcaccgaccgggggugguacugcgacaacgccggcuccgugagcuucuucccccaggccgagaccugcaaggugcaguccaaccgcgucuucugcgacaccaugaacagccggacgcucccguccgaggugaaccugugcaacaucgacaucuucaaccccaaguacgacugcaagaucaugaccagcaagaccgacgucuccagcuccgugaucaccagccugggcgccaucguguccugcuacgggaagacgaagugcaccgccagcaacaagugccggggcaucaucaagaccuucuccaacgggugcgacuacgucagcaacaagggcguggacaccgugagcgucggcaacacgcucuacuacgugaacaagcaggaggggaagucccuguacgugaagggcgagcccaucaucaacuucuacgacccccuggucuucccgagcgacgaguucgacgcguccaucagccaggugaacgagaagaucaaccagucccucgccuucauccgcaagagcgacgagcugcugcacaacgugaacgucgggaaguccaccaccaacaucaugaucaccaccaucaucaucgugaucaucgugauccuccugcugcucaucgccgucggccuguuccuguacugcaaggcccggagcacgcccgugacccuguccaaggaccagcucagcgggaucaacaacaucgccuucuccaacugaggacuagugaagggaacacccaaauuuaauucagccuuaagcacaauuaauuaagagugaaacguaauuguacaagcaguuggucacccaccauagggcaugaucaacaccgcaaccuuuccuuuuucccccagugauucugaaaaaccccucuucccuucagcuugcuuagauguuccaaauuuaguaagcuuaaggcggccuacagaagaaaaagaaaaaaaaggccacaaaaguucccucucacuuucaguaaauaaaauaaaagcagcaacagaaauaaagaaauaaaugaaauucaaaaugaaauaaauauuguguugugcagcauuaaaaaaucaauaaaaauuaaaaaugagcaagaucuaaaaaaaaaaaaaaaaaaaaaaaaaaaaaaaaaaaaaaaaaaaaaaaaaaaaaaaaaaaaaaaaugcaucccccccccccccccccccccccccccccccaaaggcucuuuucagagccaccagaauu

SEQ ID NO: 17199 - RNA, 2205 nt, Artificial Sequence
  mRNA product Design h-2 comprising derived and/or modified sequence from HRSV(Memphis-37)__AIY60640.1__F_DSCav1_mut5 (opt2)
gggagacccgugacccggaaguuguacggcuacgcgacuuucccucccacaaacccucgcgcccuuccuuuccuacuugggcccggcagaaagcuuaccauggagcuccccauccucaagaccaacgccaucaccaccauccucgccgccgucacccucugcuucgccuccucccagaacaucaccgaggaguucuaccaguccaccugcuccgccgucuccaagggcuaccucuccgcccuccgcaccggcugguacaccuccgucaucaccaucgagcucuccaacaucaaggagaacaagugcaacggcaccgacgccaaggucaagcucaucaagcaggagcucgacaaguacaagaacgccgucaccgagcuccagcuccucaugcaguccacccccgccgccggcuccggcuccgccaucgccuccggcaucgccgucugcaagguccuccaccucgagggcgaggucaacaagaucaagaacgcccuccucuccaccaacaaggccgucgucucccucuccggcugcggcgucuccguccucaccuucaagguccucgaccucaagaacuacaucgacaagcagcuccuccccauccucaacaagcaguccugcuccaucuccaacaucgagaccgucaucgaguuccagcagaagaacaaccgccuccucgagaucacccgcgaguucuccgucaacgccggcgucaccacccccgucuccaccuacaugcucaccaacuccgagcuccucucccucaucaacgacaugcccaucaccaacgaccagaagaagcucauguccaacaacguccagaucguccgccagcaguccuacuccaucaugugcaucaucaaggaggagguccucgccuacgucguccagcucccccucuacggcgucaucgacacccccugcuggaagcuccacaccuccccccucugcaccaccaacaccaaggagggcuccaacaucugccucacccgcaccgaccgcggcugguacugcgacaacgccggcuccgucuccuucuucccccaggccgagaccugcaagguccaguccaaccgcgucuucugcgacaccaugaacucccgcacccuccccuccgaggucaaccucugcaacaucgacaucuucaaccccaaguacgacugcaagaucaugaccuccaagaccgacgucuccuccuccgucaucaccucccucggcgccaucgucuccugcuacggcaagaccaagugcaccgccuccaacaagugccgcggcaucaucaagaccuucuccaacggcugcgacuacgucuccaacaagggcgucgacaccgucuccgucggcaacacccucuacuacgucaacaagcaggagggcaagucccucuacgucaagggcgagcccaucaucaacuucuacgacccccucgucuuccccuccgacgaguucgacgccuccaucucccaggucaacgagaagaucaaccagucccucgccuucauccgcaaguccgacgagcuccuccacaacgucaacgucggcaaguccaccaccaacaucaugaucaccaccaucaucaucgucaucaucgucauccuccuccuccucaucgccgucggccucuuccucuacugcaaggcccgcuccacccccgucacccucuccaaggaccagcucuccggcaucaacaacaucgccuucuccaacugaggacuagugaagggaacacccaaauuuaauucagccuuaagcacaauuaauuaagagugaaacguaauuguacaagcaguuggucacccaccauagggcaugaucaacaccgcaaccuuuccuuuuucccccagugauucugaaaaaccccucuucccuucagcuugcuuagauguuccaaauuuaguaagcuuaaggcggccuacagaagaaaaagaaaaaaaaggccacaaaaguucccucucacuuucaguaaauaaaauaaaagcagcaacagaaauaaagaaauaaaugaaauucaaaaugaaauaaauauuguguugugcagcauuaaaaaaucaauaaaaauuaaaaaugagcaagaucuaaaaaaaaaaaaaaaaaaaaaaaaaaaaaaaaaaaaaaaaaaaaaaaaaaaaaaaaaaaaaaaaugcaucccccccccccccccccccccccccccccccaaaggcucuuuucagagccaccagaauu

SEQ ID NO: 17200 - RNA, 2205 nt, Artificial Sequence
  mRNA product Design h-2 comprising derived and/or modified sequence from HRSV(Memphis-37)__AIY60640.1__F_DSCav1_mut5 (opt3)
gggagacccgugacccggaaguuguacggcuacgcgacuuucccucccacaaacccucgcgcccuuccuuuccuacuugggcccggcagaaagcuuaccauggagcugcccauccucaagaccaacgccauuacaacuauacuugcugcagugacgcugugcuucgccagcucccagaauaucaccgaagaguuuuaccaaucuacauguucagcggucaguaaaggcuauuugagcgcuuuaagaacugggugguacaccuccguuauuacaaucgaacugucuaacauuaaggagaauaaaugcaacggaaccgacgccaaggugaaacuaaucaagcaggaacucgauaaguauaaaaaugcaguaacugagcugcagcuucugaugcagucgaccccugccgcugguucaggcagcgcaauagccagugggaucgcuguguguaaggucuugcaccucgagggagaagugaacaaaauuaagaaugcccugcuguccacaaacaaagcgguugugucucucagcggcugcggugucuccguguuaacguucaagguacuggaccuuaagaauuacaucgauaaacaauugcugccaauucuaaacaagcagucauguaguaucagcaauauagagacuguuauugaauuucagcagaaaaacaauaggcuccuggagaucacccgggaguucucugugaacgcaggggucacaacuccgguguccaccuauaugcuuacaaauucagaacuguugagccucauuaacgacaugcccaucaccaacgaucaaaagaaacugaugaguaauaacgugcagaucguccgccagcagucuuacuccauuaugugcauaaucaaggaggaaguuuuagccuaugugguacaacugccucucuacggagugauugacacgccauguuggaaacuucauacuagcccccugugcacaaccaauacuaaggagggcucgaacaucuguuugacacgaaccgaucguggcugguacugcgacaaugcugggucugucuccuuuuucccucaggccgaaacguguaaggugcagucaaacagaguguuuugcgauaccaugaauaguagaacacugccaagcgaggugaaccucugcaauauagacauuuucaaccccaaauaugauuguaagaucaugacuuccaaaaccgacgucucuagcucagugaucacaagucugggagcaauuguauccugcuacgguaagacuaaauguaccgcuagcaauaagugcaggggcaucauuaagacauuuucuaacgggugugauuauguuucaaauaaaggaguggacaccgucagugugggcaacacucuuuacuaugucaauaagcaagaggguaaaagccuguacgugaagggggaaccuauaaucaacuucuaugacccauugguuuuuccguccgaugaguucgacgccucuauuucgcagguuaacgagaaaaucaaucagagccucgcguuuauccggaaguccgaugaacuguuacacaacguaaaugucggaaagucaacgacaaacauuaugauaaccacuaucauuaucgugauuaucguuauacugcuacuccugaucgccgugggccuuuucuuguacugcaaagcacgcaguacccccgucacacugucuaaggaccagcucagcggcauuaauaacaucgcuuucuccaauugaggacuagugaagggaacacccaaauuuaauucagccuuaagcacaauuaauuaagagugaaacguaauuguacaagcaguuggucacccaccauagggcaugaucaacaccgcaaccuuuccuuuuucccccagugauucugaaaaaccccucuucccuucagcuugcuuagauguuccaaauuuaguaagcuuaaggcggccuacagaagaaaaagaaaaaaaaggccacaaaaguucccucucacuuucaguaaauaaaauaaaagcagcaacagaaauaaagaaauaaaugaaauucaaaaugaaauaaauauuguguugugcagcauuaaaaaaucaauaaaaauuaaaaaugagcaagaucuaaaaaaaaaaaaaaaaaaaaaaaaaaaaaaaaaaaaaaaaaaaaaaaaaaaaaaaaaaaaaaaaugcaucccccccccccccccccccccccccccccccaaaggcucuuuucagagccaccagaauu

SEQ ID NO: 17201 - RNA, 2205 nt, Artificial Sequence
  mRNA product Design h-2 comprising derived and/or modified sequence from HRSV(Memphis-37)__AIY60640.1__F_DSCav1_mut5 (opt4)
gggagacccgugacccggaaguuguacggcuacgcgacuuucccucccacaaacccucgcgcccuuccuuuccuacuugggcccggcagaaagcuuaccauggagcugcccauccugaagaccaacgccaucaccaccauccuggccgccgugacccugugcuucgccagcagccagaacaucaccgaggaguucuaccagagcaccugcagcgccgugagcaagggcuaccugagcgcccugagaaccggcugguacaccagcgugaucaccaucgagcugagcaacaucaaggagaacaagugcaacggcaccgacgccaaggugaagcugaucaagcaggagcuggacaaguacaagaacgccgugaccgagcugcagcugcugaugcagagcacccccgccgccggcagcggcagcgccaucgccagcggcaucgccgugugcaaggugcugcaccuggagggcgaggugaacaagaucaagaacgcccugcugagcaccaacaaggccguggugagccugagcggcugcggcgugagcgugcugaccuucaaggugcuggaccugaagaacuacaucgacaagcagcugcugcccauccugaacaagcagagcugcagcaucagcaacaucgagaccgugaucgaguuccagcagaagaacaacagacugcuggagaucaccagagaguucagcgugaacgccggcgugaccacccccgugagcaccuacaugcugaccaacagcgagcugcugagccugaucaacgacaugcccaucaccaacgaccagaagaagcugaugagcaacaacgugcagaucgugagacagcagagcuacagcaucaugugcaucaucaaggaggaggugcuggccuacguggugcagcugccccuguacggcgugaucgacacccccugcuggaagcugcacaccagcccccugugcaccaccaacaccaaggagggcagcaacaucugccugaccagaaccgacagaggcugguacugcgacaacgccggcagcgugagcuucuucccccaggccgagaccugcaaggugcagagcaacagaguguucugcgacaccaugaacagcagaacccugcccagcgaggugaaccugugcaacaucgacaucuucaaccccaaguacgacugcaagaucaugaccagcaagaccgacgugagcagcagcgugaucaccagccugggcgccaucgugagcugcuacggcaagaccaagugcaccgccagcaacaagugcagaggcaucaucaagaccuucagcaacggcugcgacuacgugagcaacaagggcguggacaccgugagcgugggcaacacccuguacuacgugaacaagcaggagggcaagagccuguacgugaagggcgagcccaucaucaacuucuacgacccccugguguuccccagcgacgaguucgacgccagcaucagccaggugaacgagaagaucaaccagagccuggccuucaucagaaagagcgacgagcugcugcacaacgugaacgugggcaagagcaccaccaacaucaugaucaccaccaucaucaucgugaucaucgugauccugcugcugcugaucgccgugggccuguuccuguacugcaaggccagaagcacccccgugacccugagcaaggaccagcugagcggcaucaacaacaucgccuucagcaacugaggacuagugaagggaacacccaaauuuaauucagccuuaagcacaauuaauuaagagugaaacguaauuguacaagcaguuggucacccaccauagggcaugaucaacaccgcaaccuuuccuuuuucccccagugauucugaaaaaccccucuucccuucagcuugcuuagauguuccaaauuuaguaagcuuaaggcggccuacagaagaaaaagaaaaaaaaggccacaaaaguucccucucacuuucaguaaauaaaauaaaagcagcaacagaaauaaagaaauaaaugaaauucaaaaugaaauaaauauuguguugugcagcauuaaaaaaucaauaaaaauuaaaaaugagcaagaucuaaaaaaaaaaaaaaaaaaaaaaaaaaaaaaaaaaaaaaaaaaaaaaaaaaaaaaaaaaaaaaaaugcaucccccccccccccccccccccccccccccccaaaggcucuuuucagagccaccagaauu

SEQ ID NO: 17202 - RNA, 2205 nt, Artificial Sequence
  mRNA product Design h-2 comprising derived and/or modified sequence from HRSV(Memphis-37)__AIY60640.1__F_DSCav1_mut5 (opt5)
gggagacccgugacccggaaguuguacggcuacgcgacuuucccucccacaaacccucgcgcccuuccuuuccuacuugggcccggcagaaagcuuaccauggagcugcccauccucaagaccaacgccauuacaacgauccuggcugccgugacccuuugcuucgcgagcucccagaauauuacagaagaguuuuaccaaucuaccuguagcgcugucuccaaaggcuaucugucugcccucagaacagggugguacaccagcguuaucacaauugaacuguccaacaucaaggagaauaaaugcaacggaaccgacgccaaggugaaacuuaucaagcaggaacuggauaaguauaaaaaugcugugacggagcuccagcugcugaugcagucuaccccugccgcuggcagcggguccgccauugcgagcggaaucgccgucuguaaggugcuccaccuggagggcgaaguuaacaaaauuaagaaugcccuucugucuacaaacaaagcuguggucucccucagcgggugcggagugucuguucugaccuucaaggugcuugaccugaagaauuacaucgauaaacaacuccugccgauucugaacaagcaguccuguagcaucucuaauauugagacagucaucgaauuucagcagaaaaacaaucggcuccuggagaucacccgcgaguucuccgugaacgcuggcgugacgacacccgucagcaccuauaugcuuacaaauuccgaacugcucucucugauuaacgacaugccuaucaccaacgaucaaaagaaacuuaugagcaauaacguucagauugugagacagcaguccuacagcaucaugugcauuaucaaggaggaagugcuggccuaugucgugcaacucccccuguacggcguuaucgacaccccuuguuggaaacugcauacaucuccccucugcacgaccaauacaaaggagggguccaacauuugucugacccggacagaucgcggaugguacugcgacaaugcgggcagcgugagcuuuuucccucaggccgaaaccuguaagguccagucuaacagaguguuuugcgauacgaugaacuccagaacacugccgucugagguuaaucucugcaauaucgacauuuucaaccccaaauaugauuguaagaucaugaccagcaaaaccgacguguccagcucugucauuacaucccugggggcuaucgugagcugcuacggaaagaccaaauguacagccucuaauaagugccggggcaucauuaagacguuuuccaacgggugugauuaugucagcaauaaaggaguggacaccguuuccgugggcaacacacuuuacuaugucaauaagcaagagggcaaaucucuguacgugaagggggaaccuaucauuaacuucuaugacccccucguuuuuccuagcgaugaguucgacgcuuccaucucucaggugaacgagaaaauuaaucagagccuggccuuuauccgcaaguccgaugaacugcuccacaacgucaaugugggaaagagcaccacaaacauuaugaucaccacgaucauuaucgugauuaucguuauucugcuucugcucaucgccgucggccuguuccuguacugcaaagcuagaucuacccccgugacacuuuccaaggaccagcucagcgggaucaauaacauugcguucucuaauugaggacuagugaagggaacacccaaauuuaauucagccuuaagcacaauuaauuaagagugaaacguaauuguacaagcaguuggucacccaccauagggcaugaucaacaccgcaaccuuuccuuuuucccccagugauucugaaaaaccccucuucccuucagcuugcuuagauguuccaaauuuaguaagcuuaaggcggccuacagaagaaaaagaaaaaaaaggccacaaaaguucccucucacuuucaguaaauaaaauaaaagcagcaacagaaauaaagaaauaaaugaaauucaaaaugaaauaaauauuguguugugcagcauuaaaaaaucaauaaaaauuaaaaaugagcaagaucuaaaaaaaaaaaaaaaaaaaaaaaaaaaaaaaaaaaaaaaaaaaaaaaaaaaaaaaaaaaaaaaaugcaucccccccccccccccccccccccccccccccaaaggcucuuuucagagccaccagaauu

SEQ ID NO: 17203 - RNA, 2205 nt, Artificial Sequence
  mRNA product Design h-2 comprising derived and/or modified sequence from HRSV(Memphis-37)__AIY60640.1__F_DSCav1_mut5 (opt6)
gggagacccgugacccggaaguuguacggcuacgcgacuuucccucccacaaacccucgcgcccuuccuuuccuacuugggcccggcagaaagcuuaccauggaacucccaaucuuaaaaacaaacgcaauaacuacaauacucgcagcaguaacacuaugcuucgcaucaucacaaaacauaaccgaagaauuuuaccaaaguacaugcucagcaguaucaaaagguuaccucucagcccuaagaaccggaugguacacaucaguaaucacuauagaacuauccaauauaaaagaaaacaaaugcaacggcacugacgcaaaaguuaaauuaauuaaacaagaacucgauaaauauaaaaaugcaguaacagaacuacaacuacuaaugcaaagcaccccagcugcaggaagcggaucagcaaucgcaucaggaauagcaguauguaaaguacuacaccuagaaggagaagucaacaaaaucaaaaaugcacuacuaaguacaaacaaagcuguaguaagccuaucagguugcggaguaucaguauuaacauuuaaaguccucgaccuaaaaaauuacauagauaaacaacucuuaccaauacucaauaaacaaaguugcagcaucagcaacauagaaacagucaucgaauuucaacaaaaaaauaauagacuccuagaaauaacacgugaauuuucaguaaaugcuggaguaacaacaccaguaucuacauauaugcuaacaaauagcgaacuacucucacuuauuaacgauaugcccauaacaaacgaccaaaaaaaacuuaugucaaacaauguucaaauaguuagacaacaauccuacagcauaaugugcauaaucaaagaagaaguucuagcuuacguaguacaacuaccacucuaugguguuaucgacacccccuguuggaaacuucacacaucaccacuaugcacaacaaacacaaaagaaggaucaaauauuugcuuaacaagaacagauagaggaugguauugcgauaaugccggaucaguaucauuuuuuccacaagcagaaacauguaaaguacaauccaaccgaguauuuugcgacaccaugaacuccagaacacuaccaucugaagucaaccuauguaauauagauauauuuaacccaaaauaugacuguaaaaucaugacaucaaaaacugauguaaguucuaguguaauaaccagcuuaggcgccauaguaagcuguuacgguaaaacaaaaugcacagcaagcaacaaaugccgcgguauaauaaaaacauucucaaacggaugcgauuauguaaguaacaaaggaguagauacagucuccguaggcaacacauuauacuacguaaacaaacaagaaggaaaaucacuauauguaaaaggagaaccaaucauaaauuucuacgacccacuuguauuccccagcgacgaauuugaugcuuccauuucacaagucaacgaaaaaauaaaccaaucauuagccuucauaagaaaaucagacgaauuauuacauaauguuaaugucggcaaauccacaacuaauauaaugauaacaacaaucauaauaguaauaaucguuauacuacuauuacucauagcaguaggacucuucuuauauuguaaagccagauccaccccaguaacacucucaaaagaccaauuaucaggaauuaauaacaucgcauuuucaaacuaaggacuagugaagggaacacccaaauuuaauucagccuuaagcacaauuaauuaagagugaaacguaauuguacaagcaguuggucacccaccauagggcaugaucaacaccgcaaccuuuccuuuuucccccagugauucugaaaaaccccucuucccuucagcuugcuuagauguuccaaauuuaguaagcuuaaggcggccuacagaagaaaaagaaaaaaaaggccacaaaaguucccucucacuuucaguaaauaaaauaaaagcagcaacagaaauaaagaaauaaaugaaauucaaaaugaaauaaauauuguguugugcagcauuaaaaaaucaauaaaaauuaaaaaugagcaagaucuaaaaaaaaaaaaaaaaaaaaaaaaaaaaaaaaaaaaaaaaaaaaaaaaaaaaaaaaaaaaaaaaugcaucccccccccccccccccccccccccccccccaaaggcucuuuucagagccaccagaauu

SEQ ID NO: 17204 - RNA, 2205 nt, Artificial Sequence
  mRNA product Design h-2 comprising derived and/or modified sequence from HRSV(Memphis-37)__AIY60640.1__F_DSCav1_mut5 (opt11)
gggagacccgugacccggaaguuguacggcuacgcgacuuucccucccacaaacccucgcgcccuuccuuuccuacuugggcccggcagaaagcuuaccauggaacuccccauccuuaaaaccaacgcaaucaccacaauacucgccgccgucacccucugcuuugcguccucccagaacaucaccgaagaguucuaccaaucgaccugcagcgccgucagcaagggcuaccucucagcccuccgaacaggcugguacacauccgucaucaccaucgaacucucaaacauaaaagaaaacaaguguaacggcaccgacgcgaaaguuaaacucaucaaacaagaacucgauaaauacaaaaacgcaguaaccgaacuacaacuccuaaugcaauccacacccgcagccggcagcggcuccgcaaucgccuccggcauagcagucugcaaaguccuccaccucgaaggagaagucaauaaaaucaaaaacgcccuccuauccaccaacaaagcgguugucucccuguccggaugcggaguuagcguccuaaccuucaaggugcucgaccucaaaaacuacauagacaaacaacuacuccccauacucaacaaacaaucaugcuccaucagcaacaucgagaccgucaucgaguuccaacagaaaaacaaccgccuccucgaaaucacacgagaguucuccguaaacgccggcgucacaacccccguuuccacuuacaugcucacaaacagcgaacuccucucccucaucaacgacaugccaaucaccaacgaccaaaagaaacucauguccaacaacguccaaaucguccgccaacaaagcuacagcauaaugugcaucauaaaagaagaaguacucgcguacguaguccaacuaccccuauacggcgucaucgacacccccugcuggaaacugcacacuucuccccucuguacaaccaacacuaaagaaggcucgaacaucugccucaccagaacagaccgaggaugguacugcgacaacgccggcuccgucagcuucuucccccaggccgaaacaugcaaaguacaaucaaaccgagucuucugcgacacaaugaacagcagaacucuacccuccgaaguuaaccuaugcaacaucgacaucuucaaccccaaauacgacugcaaaauaaugaccucaaaaacagacguguccagcuccguuaucaccucucucggagccaucguauccuguuauggaaaaaccaaaugcaccgccucaaacaaaugccgaggcauaaucaaaacauucucaaauggaugcgacuacguauccaacaaaggagucgacaccgucagcgugggcaauacccucuacuacgucaacaaacaggaagggaaaucccucuauguaaagggcgagcccauuauuaacuucuaugacccccucguguucccaagcgacgaguucgacgccuccauaucacaagucaaugagaaaaucaaccaaucacuagcuuucauucgcaaauccgacgaacuccuucacaacgucaacgucggcaaauccaccaccaacaucaugaucaccaccauaauuaucgucauuaucgucauacuacuccuacucaucgccgucggccucuuccucuauugcaaagcacgcucgacacccgucacccuuucaaaagaccaacuuuccggcauaaacaacauagccuucagcaacuagggacuagugaagggaacacccaaauuuaauucagccuuaagcacaauuaauuaagagugaaacguaauuguacaagcaguuggucacccaccauagggcaugaucaacaccgcaaccuuuccuuuuucccccagugauucugaaaaaccccucuucccuucagcuugcuuagauguuccaaauuuaguaagcuuaaggcggccuacagaagaaaaagaaaaaaaaggccacaaaaguucccucucacuuucaguaaauaaaauaaaagcagcaacagaaauaaagaaauaaaugaaauucaaaaugaaauaaauauuguguugugcagcauuaaaaaaucaauaaaaauuaaaaaugagcaagaucuaaaaaaaaaaaaaaaaaaaaaaaaaaaaaaaaaaaaaaaaaaaaaaaaaaaaaaaaaaaaaaaaugcaucccccccccccccccccccccccccccccccaaaggcucuuuucagagccaccagaauu

SEQ ID NO: 17205 - RNA, 1985 nt, Artificial Sequence
  mRNA product Design h-3 comprising derived and/or modified sequence from HRSV(Memphis-37)__AIY60640.1__F_DSCav1_mut5 (opt1)
gggagacccgugacccggaaguuguacggcuacgcgacuuucccucccacaaacccucgcgcccuuccuuuccuacuugggcccggcagaaagcuuaccauggagcugcccauccucaagaccaacgccaucaccacgauccuggccgcggugacccugugcuucgccagcucccagaacaucaccgaggaguucuaccagagcacgugcuccgccgucagcaagggcuaccucuccgcccugcgcaccgggugguacaccagcgugaucaccaucgagcuguccaacaucaaggagaacaagugcaacggcaccgacgccaaggugaagcucaucaagcaggagcuggacaaguacaagaacgcggucacggagcugcagcuccugaugcagagcaccccggccgccggcuccgggagcgcgaucgccuccggcaucgccgucugcaaggugcugcaccucgagggcgaggugaacaagaucaagaacgcccugcuguccaccaacaaggccgucgugagccucuccggcugcggggugagcguccugaccuucaaggugcuggaccucaagaacuacaucgacaagcagcugcugcccauccugaacaagcagagcugcuccaucagcaacaucgagaccgucaucgaguuccagcagaagaacaaccgccuccuggagaucacgcgggaguucagcgugaacgcgggcgugaccacccccgucuccaccuacaugcugacgaacagcgagcuccugucccugaucaacgacaugccgaucaccaacgaccagaagaagcucaugagcaacaacgugcagaucgugcgccagcaguccuacagcaucaugugcaucaucaaggaggagguccuggccuacguggugcagcugccccucuacggggucaucgacacccccugcuggaagcugcacaccagcccccugugcacgaccaacaccaaggagggcuccaacaucugccucacccggacggaccgcgggugguacugcgacaacgccggcagcguguccuucuucccgcaggccgagaccugcaagguccagagcaaccggguguucugcgacaccaugaacucccggacccugcccagcgaggugaaccucugcaacaucgacaucuucaaccccaaguacgacugcaagaucaugacguccaagaccgacgucagcuccagcgugaucaccucccugggcgccaucgugagcugcuacgggaagaccaagugcacggcgagcaacaagugccgcggcaucaucaagaccuucuccaacgggugcgacuacgucagcaacaagggcguggacaccguguccgucggcaacacccuguacuacgugaacaagcaggagggcaagagccucuacgugaagggggagcccaucaucaacuucuacgacccgcuggucuuccccuccgacgaguucgacgccagcaucucccaggugaacgagaagaucaaccagagccuggccuucauccggaaguccgacgagcuccugcacaacgugaacgucggcaagagcaccacgaacaucaugaucaccaccaucaucaucgugaucaucgugauccugcugcuccugaucgccgucgggcuguuccucuacugcaaggcccgcuccacccccgugacgcugagcaaggaccagcuguccgggaucaacaacaucgcguucagcaacugaggacuaguggaagcauuuuccuggcugauuaaaagaaauuacucagcuauggucaucuguuccuguuagaaggcuaugcagcauauuauauacuaugcgcauguuaugaaaugcauaauaaaaaauuuuaaaaaaucuaaaagaucuaaaaaaaaaaaaaaaaaaaaaaaaaaaaaaaaaaaaaaaaaaaaaaaaaaaaaaaaaaaaaaaaugcaucccccccccccccccccccccccccccccccaaaggcucuuuucagagccaccagaauu

SEQ ID NO: 17206 - RNA, 1985 nt, Artificial Sequence
  mRNA product Design h-3 comprising derived and/or modified sequence from HRSV(Memphis-37)__AIY60640.1__F_DSCav1_mut5 (opt1)
gggagacccgugacccggaaguuguacggcuacgcgacuuucccucccacaaacccucgcgcccuuccuuuccuacuugggcccggcagaaagcuuaccauggagcugcccauccucaagaccaacgccaucaccacgauccuggccgcggugacccugugcuucgccagcucccagaacaucaccgaggaguucuaccagagcacgugcuccgccgucagcaagggcuaccucuccgcccugcgcaccgggugguacaccagcgugaucaccaucgagcuguccaacaucaaggagaacaagugcaacggcaccgacgccaaggugaagcucaucaagcaggagcuggacaaguacaagaacgcggucacggagcugcagcuccugaugcagagcaccccggccgccggguccggcagcgccaucgcguccgggaucgccgugugcaaggugcugcaccucgagggcgaggucaacaagaucaagaacgcccugcugagcaccaacaaggccguggugucccucagcggcugcggggucuccgugcugaccuucaaggugcuggaccucaagaacuacaucgacaagcagcugcugcccauccucaacaagcagagcugcuccaucagcaacaucgagacggucaucgaguuccagcagaagaacaaccggcugcuggagaucacccgcgaguucuccgugaacgccggcgugaccacccccgucagcacguacaugcucaccaacagcgagcugcugucccucaucaacgacaugcccaucaccaacgaccagaagaagcugaugagcaacaacgugcagaucgugcggcagcaguccuacagcaucaugugcaucaucaaggaggagguccuggcguacguggugcagcucccgcuguacggggucaucgacacccccugcuggaagcugcacacgagcccccucugcaccaccaacaccaaggagggcuccaacaucugccugacgcgcaccgaccgggggugguacugcgacaacgccggcuccgugagcuucuucccccaggccgagaccugcaaggugcaguccaaccgcgucuucugcgacaccaugaacagccggacgcucccguccgaggugaaccugugcaacaucgacaucuucaaccccaaguacgacugcaagaucaugaccagcaagaccgacgucuccagcuccgugaucaccagccugggcgccaucguguccugcuacgggaagacgaagugcaccgccagcaacaagugccggggcaucaucaagaccuucuccaacgggugcgacuacgucagcaacaagggcguggacaccgugagcgucggcaacacgcucuacuacgugaacaagcaggaggggaagucccuguacgugaagggcgagcccaucaucaacuucuacgacccccuggucuucccgagcgacgaguucgacgcguccaucagccaggugaacgagaagaucaaccagucccucgccuucauccgcaagagcgacgagcugcugcacaacgugaacgucgggaaguccaccaccaacaucaugaucaccaccaucaucaucgugaucaucgugauccuccugcugcucaucgccgucggccuguuccuguacugcaaggcccggagcacgcccgugacccuguccaaggaccagcucagcgggaucaacaacaucgccuucuccaacugaggacuaguggaagcauuuuccuggcugauuaaaagaaauuacucagcuauggucaucuguuccuguuagaaggcuaugcagcauauuauauacuaugcgcauguuaugaaaugcauaauaaaaaauuuuaaaaaaucuaaaagaucuaaaaaaaaaaaaaaaaaaaaaaaaaaaaaaaaaaaaaaaaaaaaaaaaaaaaaaaaaaaaaaaaugcaucccccccccccccccccccccccccccccccaaaggcucuuuucagagccaccagaauu

SEQ ID NO: 17207 - RNA, 1985 nt, Artificial Sequence
  mRNA product Design h-3 comprising derived and/or modified sequence from HRSV(Memphis-37)__AIY60640.1__F_DSCav1_mut5 (opt2)
gggagacccgugacccggaaguuguacggcuacgcgacuuucccucccacaaacccucgcgcccuuccuuuccuacuugggcccggcagaaagcuuaccauggagcuccccauccucaagaccaacgccaucaccaccauccucgccgccgucacccucugcuucgccuccucccagaacaucaccgaggaguucuaccaguccaccugcuccgccgucuccaagggcuaccucuccgcccuccgcaccggcugguacaccuccgucaucaccaucgagcucuccaacaucaaggagaacaagugcaacggcaccgacgccaaggucaagcucaucaagcaggagcucgacaaguacaagaacgccgucaccgagcuccagcuccucaugcaguccacccccgccgccggcuccggcuccgccaucgccuccggcaucgccgucugcaagguccuccaccucgagggcgaggucaacaagaucaagaacgcccuccucuccaccaacaaggccgucgucucccucuccggcugcggcgucuccguccucaccuucaagguccucgaccucaagaacuacaucgacaagcagcuccuccccauccucaacaagcaguccugcuccaucuccaacaucgagaccgucaucgaguuccagcagaagaacaaccgccuccucgagaucacccgcgaguucuccgucaacgccggcgucaccacccccgucuccaccuacaugcucaccaacuccgagcuccucucccucaucaacgacaugcccaucaccaacgaccagaagaagcucauguccaacaacguccagaucguccgccagcaguccuacuccaucaugugcaucaucaaggaggagguccucgccuacgucguccagcucccccucuacggcgucaucgacacccccugcuggaagcuccacaccuccccccucugcaccaccaacaccaaggagggcuccaacaucugccucacccgcaccgaccgcggcugguacugcgacaacgccggcuccgucuccuucuucccccaggccgagaccugcaagguccaguccaaccgcgucuucugcgacaccaugaacucccgcacccuccccuccgaggucaaccucugcaacaucgacaucuucaaccccaaguacgacugcaagaucaugaccuccaagaccgacgucuccuccuccgucaucaccucccucggcgccaucgucuccugcuacggcaagaccaagugcaccgccuccaacaagugccgcggcaucaucaagaccuucuccaacggcugcgacuacgucuccaacaagggcgucgacaccgucuccgucggcaacacccucuacuacgucaacaagcaggagggcaagucccucuacgucaagggcgagcccaucaucaacuucuacgacccccucgucuuccccuccgacgaguucgacgccuccaucucccaggucaacgagaagaucaaccagucccucgccuucauccgcaaguccgacgagcuccuccacaacgucaacgucggcaaguccaccaccaacaucaugaucaccaccaucaucaucgucaucaucgucauccuccuccuccucaucgccgucggccucuuccucuacugcaaggcccgcuccacccccgucacccucuccaaggaccagcucuccggcaucaacaacaucgccuucuccaacugaggacuaguggaagcauuuuccuggcugauuaaaagaaauuacucagcuauggucaucuguuccuguuagaaggcuaugcagcauauuauauacuaugcgcauguuaugaaaugcauaauaaaaaauuuuaaaaaaucuaaaagaucuaaaaaaaaaaaaaaaaaaaaaaaaaaaaaaaaaaaaaaaaaaaaaaaaaaaaaaaaaaaaaaaaugcaucccccccccccccccccccccccccccccccaaaggcucuuuucagagccaccagaauu

SEQ ID NO: 17208 - RNA, 1985 nt, Artificial Sequence
  mRNA product Design h-3 comprising derived and/or modified sequence from HRSV(Memphis-37)__AIY60640.1__F_DSCav1_mut5 (opt3)
gggagacccgugacccggaaguuguacggcuacgcgacuuucccucccacaaacccucgcgcccuuccuuuccuacuugggcccggcagaaagcuuaccauggagcugcccauccucaagaccaacgccauuacaacuauacuugcugcagugacgcugugcuucgccagcucccagaauaucaccgaagaguuuuaccaaucuacauguucagcggucaguaaaggcuauuugagcgcuuuaagaacugggugguacaccuccguuauuacaaucgaacugucuaacauuaaggagaauaaaugcaacggaaccgacgccaaggugaaacuaaucaagcaggaacucgauaaguauaaaaaugcaguaacugagcugcagcuucugaugcagucgaccccugccgcugguucaggcagcgcaauagccagugggaucgcuguguguaaggucuugcaccucgagggagaagugaacaaaauuaagaaugcccugcuguccacaaacaaagcgguugugucucucagcggcugcggugucuccguguuaacguucaagguacuggaccuuaagaauuacaucgauaaacaauugcugccaauucuaaacaagcagucauguaguaucagcaauauagagacuguuauugaauuucagcagaaaaacaauaggcuccuggagaucacccgggaguucucugugaacgcaggggucacaacuccgguguccaccuauaugcuuacaaauucagaacuguugagccucauuaacgacaugcccaucaccaacgaucaaaagaaacugaugaguaauaacgugcagaucguccgccagcagucuuacuccauuaugugcauaaucaaggaggaaguuuuagccuaugugguacaacugccucucuacggagugauugacacgccauguuggaaacuucauacuagcccccugugcacaaccaauacuaaggagggcucgaacaucuguuugacacgaaccgaucguggcugguacugcgacaaugcugggucugucuccuuuuucccucaggccgaaacguguaaggugcagucaaacagaguguuuugcgauaccaugaauaguagaacacugccaagcgaggugaaccucugcaauauagacauuuucaaccccaaauaugauuguaagaucaugacuuccaaaaccgacgucucuagcucagugaucacaagucugggagcaauuguauccugcuacgguaagacuaaauguaccgcuagcaauaagugcaggggcaucauuaagacauuuucuaacgggugugauuauguuucaaauaaaggaguggacaccgucagugugggcaacacucuuuacuaugucaauaagcaagaggguaaaagccuguacgugaagggggaaccuauaaucaacuucuaugacccauugguuuuuccguccgaugaguucgacgccucuauuucgcagguuaacgagaaaaucaaucagagccucgcguuuauccggaaguccgaugaacuguuacacaacguaaaugucggaaagucaacgacaaacauuaugauaaccacuaucauuaucgugauuaucguuauacugcuacuccugaucgccgugggccuuuucuuguacugcaaagcacgcaguacccccgucacacugucuaaggaccagcucagcggcauuaauaacaucgcuuucuccaauugaggacuaguggaagcauuuuccuggcugauuaaaagaaauuacucagcuauggucaucuguuccuguuagaaggcuaugcagcauauuauauacuaugcgcauguuaugaaaugcauaauaaaaaauuuuaaaaaaucuaaaagaucuaaaaaaaaaaaaaaaaaaaaaaaaaaaaaaaaaaaaaaaaaaaaaaaaaaaaaaaaaaaaaaaaugcaucccccccccccccccccccccccccccccccaaaggcucuuuucagagccaccagaauu

SEQ ID NO: 17209 - RNA, 1985 nt, Artificial Sequence
  mRNA product Design h-3 comprising derived and/or modified sequence from HRSV(Memphis-37)__AIY60640.1__F_DSCav1_mut5 (opt4)
gggagacccgugacccggaaguuguacggcuacgcgacuuucccucccacaaacccucgcgcccuuccuuuccuacuugggcccggcagaaagcuuaccauggagcugcccauccugaagaccaacgccaucaccaccauccuggccgccgugacccugugcuucgccagcagccagaacaucaccgaggaguucuaccagagcaccugcagcgccgugagcaagggcuaccugagcgcccugagaaccggcugguacaccagcgugaucaccaucgagcugagcaacaucaaggagaacaagugcaacggcaccgacgccaaggugaagcugaucaagcaggagcuggacaaguacaagaacgccgugaccgagcugcagcugcugaugcagagcacccccgccgccggcagcggcagcgccaucgccagcggcaucgccgugugcaaggugcugcaccuggagggcgaggugaacaagaucaagaacgcccugcugagcaccaacaaggccguggugagccugagcggcugcggcgugagcgugcugaccuucaaggugcuggaccugaagaacuacaucgacaagcagcugcugcccauccugaacaagcagagcugcagcaucagcaacaucgagaccgugaucgaguuccagcagaagaacaacagacugcuggagaucaccagagaguucagcgugaacgccggcgugaccacccccgugagcaccuacaugcugaccaacagcgagcugcugagccugaucaacgacaugcccaucaccaacgaccagaagaagcugaugagcaacaacgugcagaucgugagacagcagagcuacagcaucaugugcaucaucaaggaggaggugcuggccuacguggugcagcugccccuguacggcgugaucgacacccccugcuggaagcugcacaccagcccccugugcaccaccaacaccaaggagggcagcaacaucugccugaccagaaccgacagaggcugguacugcgacaacgccggcagcgugagcuucuucccccaggccgagaccugcaaggugcagagcaacagaguguucugcgacaccaugaacagcagaacccugcccagcgaggugaaccugugcaacaucgacaucuucaaccccaaguacgacugcaagaucaugaccagcaagaccgacgugagcagcagcgugaucaccagccugggcgccaucgugagcugcuacggcaagaccaagugcaccgccagcaacaagugcagaggcaucaucaagaccuucagcaacggcugcgacuacgugagcaacaagggcguggacaccgugagcgugggcaacacccuguacuacgugaacaagcaggagggcaagagccuguacgugaagggcgagcccaucaucaacuucuacgacccccugguguuccccagcgacgaguucgacgccagcaucagccaggugaacgagaagaucaaccagagccuggccuucaucagaaagagcgacgagcugcugcacaacgugaacgugggcaagagcaccaccaacaucaugaucaccaccaucaucaucgugaucaucgugauccugcugcugcugaucgccgugggccuguuccuguacugcaaggccagaagcacccccgugacccugagcaaggaccagcugagcggcaucaacaacaucgccuucagcaacugaggacuaguggaagcauuuuccuggcugauuaaaagaaauuacucagcuauggucaucuguuccuguuagaaggcuaugcagcauauuauauacuaugcgcauguuaugaaaugcauaauaaaaaauuuuaaaaaaucuaaaagaucuaaaaaaaaaaaaaaaaaaaaaaaaaaaaaaaaaaaaaaaaaaaaaaaaaaaaaaaaaaaaaaaaugcaucccccccccccccccccccccccccccccccaaaggcucuuuucagagccaccagaauu

SEQ ID NO: 17210 - RNA, 1985 nt, Artificial Sequence
  mRNA product Design h-3 comprising derived and/or modified sequence from HRSV(Memphis-37)__AIY60640.1__F_DSCav1_mut5 (opt5)
gggagacccgugacccggaaguuguacggcuacgcgacuuucccucccacaaacccucgcgcccuuccuuuccuacuugggcccggcagaaagcuuaccauggagcugcccauccucaagaccaacgccauuacaacgauccuggcugccgugacccuuugcuucgcgagcucccagaauauuacagaagaguuuuaccaaucuaccuguagcgcugucuccaaaggcuaucugucugcccucagaacagggugguacaccagcguuaucacaauugaacuguccaacaucaaggagaauaaaugcaacggaaccgacgccaaggugaaacuuaucaagcaggaacuggauaaguauaaaaaugcugugacggagcuccagcugcugaugcagucuaccccugccgcuggcagcggguccgccauugcgagcggaaucgccgucuguaaggugcuccaccuggagggcgaaguuaacaaaauuaagaaugcccuucugucuacaaacaaagcuguggucucccucagcgggugcggagugucuguucugaccuucaaggugcuugaccugaagaauuacaucgauaaacaacuccugccgauucugaacaagcaguccuguagcaucucuaauauugagacagucaucgaauuucagcagaaaaacaaucggcuccuggagaucacccgcgaguucuccgugaacgcuggcgugacgacacccgucagcaccuauaugcuuacaaauuccgaacugcucucucugauuaacgacaugccuaucaccaacgaucaaaagaaacuuaugagcaauaacguucagauugugagacagcaguccuacagcaucaugugcauuaucaaggaggaagugcuggccuaugucgugcaacucccccuguacggcguuaucgacaccccuuguuggaaacugcauacaucuccccucugcacgaccaauacaaaggagggguccaacauuugucugacccggacagaucgcggaugguacugcgacaaugcgggcagcgugagcuuuuucccucaggccgaaaccuguaagguccagucuaacagaguguuuugcgauacgaugaacuccagaacacugccgucugagguuaaucucugcaauaucgacauuuucaaccccaaauaugauuguaagaucaugaccagcaaaaccgacguguccagcucugucauuacaucccugggggcuaucgugagcugcuacggaaagaccaaauguacagccucuaauaagugccggggcaucauuaagacguuuuccaacgggugugauuaugucagcaauaaaggaguggacaccguuuccgugggcaacacacuuuacuaugucaauaagcaagagggcaaaucucuguacgugaagggggaaccuaucauuaacuucuaugacccccucguuuuuccuagcgaugaguucgacgcuuccaucucucaggugaacgagaaaauuaaucagagccuggccuuuauccgcaaguccgaugaacugcuccacaacgucaaugugggaaagagcaccacaaacauuaugaucaccacgaucauuaucgugauuaucguuauucugcuucugcucaucgccgucggccuguuccuguacugcaaagcuagaucuacccccgugacacuuuccaaggaccagcucagcgggaucaauaacauugcguucucuaauugaggacuaguggaagcauuuuccuggcugauuaaaagaaauuacucagcuauggucaucuguuccuguuagaaggcuaugcagcauauuauauacuaugcgcauguuaugaaaugcauaauaaaaaauuuuaaaaaaucuaaaagaucuaaaaaaaaaaaaaaaaaaaaaaaaaaaaaaaaaaaaaaaaaaaaaaaaaaaaaaaaaaaaaaaaugcaucccccccccccccccccccccccccccccccaaaggcucuuuucagagccaccagaauu

SEQ ID NO: 17211 - RNA, 1985 nt, Artificial Sequence
  mRNA product Design h-3 comprising derived and/or modified sequence from HRSV(Memphis-37)__AIY60640.1__F_DSCav1_mut5 (opt6)
gggagacccgugacccggaaguuguacggcuacgcgacuuucccucccacaaacccucgcgcccuuccuuuccuacuugggcccggcagaaagcuuaccauggaacucccaaucuuaaaaacaaacgcaauaacuacaauacucgcagcaguaacacuaugcuucgcaucaucacaaaacauaaccgaagaauuuuaccaaaguacaugcucagcaguaucaaaagguuaccucucagcccuaagaaccggaugguacacaucaguaaucacuauagaacuauccaauauaaaagaaaacaaaugcaacggcacugacgcaaaaguuaaauuaauuaaacaagaacucgauaaauauaaaaaugcaguaacagaacuacaacuacuaaugcaaagcaccccagcugcaggaagcggaucagcaaucgcaucaggaauagcaguauguaaaguacuacaccuagaaggagaagucaacaaaaucaaaaaugcacuacuaaguacaaacaaagcuguaguaagccuaucagguugcggaguaucaguauuaacauuuaaaguccucgaccuaaaaaauuacauagauaaacaacucuuaccaauacucaauaaacaaaguugcagcaucagcaacauagaaacagucaucgaauuucaacaaaaaaauaauagacuccuagaaauaacacgugaauuuucaguaaaugcuggaguaacaacaccaguaucuacauauaugcuaacaaauagcgaacuacucucacuuauuaacgauaugcccauaacaaacgaccaaaaaaaacuuaugucaaacaauguucaaauaguuagacaacaauccuacagcauaaugugcauaaucaaagaagaaguucuagcuuacguaguacaacuaccacucuaugguguuaucgacacccccuguuggaaacuucacacaucaccacuaugcacaacaaacacaaaagaaggaucaaauauuugcuuaacaagaacagauagaggaugguauugcgauaaugccggaucaguaucauuuuuuccacaagcagaaacauguaaaguacaauccaaccgaguauuuugcgacaccaugaacuccagaacacuaccaucugaagucaaccuauguaauauagauauauuuaacccaaaauaugacuguaaaaucaugacaucaaaaacugauguaaguucuaguguaauaaccagcuuaggcgccauaguaagcuguuacgguaaaacaaaaugcacagcaagcaacaaaugccgcgguauaauaaaaacauucucaaacggaugcgauuauguaaguaacaaaggaguagauacagucuccguaggcaacacauuauacuacguaaacaaacaagaaggaaaaucacuauauguaaaaggagaaccaaucauaaauuucuacgacccacuuguauuccccagcgacgaauuugaugcuuccauuucacaagucaacgaaaaaauaaaccaaucauuagccuucauaagaaaaucagacgaauuauuacauaauguuaaugucggcaaauccacaacuaauauaaugauaacaacaaucauaauaguaauaaucguuauacuacuauuacucauagcaguaggacucuucuuauauuguaaagccagauccaccccaguaacacucucaaaagaccaauuaucaggaauuaauaacaucgcauuuucaaacuaaggacuaguggaagcauuuuccuggcugauuaaaagaaauuacucagcuauggucaucuguuccuguuagaaggcuaugcagcauauuauauacuaugcgcauguuaugaaaugcauaauaaaaaauuuuaaaaaaucuaaaagaucuaaaaaaaaaaaaaaaaaaaaaaaaaaaaaaaaaaaaaaaaaaaaaaaaaaaaaaaaaaaaaaaaugcaucccccccccccccccccccccccccccccccaaaggcucuuuucagagccaccagaauu

SEQ ID NO: 17212 - RNA, 1985 nt, Artificial Sequence
  mRNA product Design h-3 comprising derived and/or modified sequence from HRSV(Memphis-37)__AIY60640.1__F_DSCav1_mut5 (opt11)
gggagacccgugacccggaaguuguacggcuacgcgacuuucccucccacaaacccucgcgcccuuccuuuccuacuugggcccggcagaaagcuuaccauggaacuccccauccuuaaaaccaacgcaaucaccacaauacucgccgccgucacccucugcuuugcguccucccagaacaucaccgaagaguucuaccaaucgaccugcagcgccgucagcaagggcuaccucucagcccuccgaacaggcugguacacauccgucaucaccaucgaacucucaaacauaaaagaaaacaaguguaacggcaccgacgcgaaaguuaaacucaucaaacaagaacucgauaaauacaaaaacgcaguaaccgaacuacaacuccuaaugcaauccacacccgcagccggcagcggcuccgcaaucgccuccggcauagcagucugcaaaguccuccaccucgaaggagaagucaauaaaaucaaaaacgcccuccuauccaccaacaaagcgguugucucccuguccggaugcggaguuagcguccuaaccuucaaggugcucgaccucaaaaacuacauagacaaacaacuacuccccauacucaacaaacaaucaugcuccaucagcaacaucgagaccgucaucgaguuccaacagaaaaacaaccgccuccucgaaaucacacgagaguucuccguaaacgccggcgucacaacccccguuuccacuuacaugcucacaaacagcgaacuccucucccucaucaacgacaugccaaucaccaacgaccaaaagaaacucauguccaacaacguccaaaucguccgccaacaaagcuacagcauaaugugcaucauaaaagaagaaguacucgcguacguaguccaacuaccccuauacggcgucaucgacacccccugcuggaaacugcacacuucuccccucuguacaaccaacacuaaagaaggcucgaacaucugccucaccagaacagaccgaggaugguacugcgacaacgccggcuccgucagcuucuucccccaggccgaaacaugcaaaguacaaucaaaccgagucuucugcgacacaaugaacagcagaacucuacccuccgaaguuaaccuaugcaacaucgacaucuucaaccccaaauacgacugcaaaauaaugaccucaaaaacagacguguccagcuccguuaucaccucucucggagccaucguauccuguuauggaaaaaccaaaugcaccgccucaaacaaaugccgaggcauaaucaaaacauucucaaauggaugcgacuacguauccaacaaaggagucgacaccgucagcgugggcaauacccucuacuacgucaacaaacaggaagggaaaucccucuauguaaagggcgagcccauuauuaacuucuaugacccccucguguucccaagcgacgaguucgacgccuccauaucacaagucaaugagaaaaucaaccaaucacuagcuuucauucgcaaauccgacgaacuccuucacaacgucaacgucggcaaauccaccaccaacaucaugaucaccaccauaauuaucgucauuaucgucauacuacuccuacucaucgccgucggccucuuccucuauugcaaagcacgcucgacacccgucacccuuucaaaagaccaacuuuccggcauaaacaacauagccuucagcaacuagggacuaguggaagcauuuuccuggcugauuaaaagaaauuacucagcuauggucaucuguuccuguuagaaggcuaugcagcauauuauauacuaugcgcauguuaugaaaugcauaauaaaaaauuuuaaaaaaucuaaaagaucuaaaaaaaaaaaaaaaaaaaaaaaaaaaaaaaaaaaaaaaaaaaaaaaaaaaaaaaaaaaaaaaaugcaucccccccccccccccccccccccccccccccaaaggcucuuuucagagccaccagaauu

SEQ ID NO: 17213 - RNA, 2048 nt, Artificial Sequence
  mRNA product Design h-4 comprising derived and/or modified sequence from HRSV(Memphis-37)__AIY60640.1__F_DSCav1_mut5 (opt1)
gggagagggcgcuuggcuugcaaggacccugagcugcggcauugaagcacacccaacccaacucgacugaagucagccucacugaaccggaucugagaaucuucucucucugggcuugccagggcucuccgaaccuagcuagcauccucuucaauuccaacuagaaagcuuaccauggagcugcccauccucaagaccaacgccaucaccacgauccuggccgcggugacccugugcuucgccagcucccagaacaucaccgaggaguucuaccagagcacgugcuccgccgucagcaagggcuaccucuccgcccugcgcaccgggugguacaccagcgugaucaccaucgagcuguccaacaucaaggagaacaagugcaacggcaccgacgccaaggugaagcucaucaagcaggagcuggacaaguacaagaacgcggucacggagcugcagcuccugaugcagagcaccccggccgccggcuccgggagcgcgaucgccuccggcaucgccgucugcaaggugcugcaccucgagggcgaggugaacaagaucaagaacgcccugcuguccaccaacaaggccgucgugagccucuccggcugcggggugagcguccugaccuucaaggugcuggaccucaagaacuacaucgacaagcagcugcugcccauccugaacaagcagagcugcuccaucagcaacaucgagaccgucaucgaguuccagcagaagaacaaccgccuccuggagaucacgcgggaguucagcgugaacgcgggcgugaccacccccgucuccaccuacaugcugacgaacagcgagcuccugucccugaucaacgacaugccgaucaccaacgaccagaagaagcucaugagcaacaacgugcagaucgugcgccagcaguccuacagcaucaugugcaucaucaaggaggagguccuggccuacguggugcagcugccccucuacggggucaucgacacccccugcuggaagcugcacaccagcccccugugcacgaccaacaccaaggagggcuccaacaucugccucacccggacggaccgcgggugguacugcgacaacgccggcagcguguccuucuucccgcaggccgagaccugcaagguccagagcaaccggguguucugcgacaccaugaacucccggacccugcccagcgaggugaaccucugcaacaucgacaucuucaaccccaaguacgacugcaagaucaugacguccaagaccgacgucagcuccagcgugaucaccucccugggcgccaucgugagcugcuacgggaagaccaagugcacggcgagcaacaagugccgcggcaucaucaagaccuucuccaacgggugcgacuacgucagcaacaagggcguggacaccguguccgucggcaacacccuguacuacgugaacaagcaggagggcaagagccucuacgugaagggggagcccaucaucaacuucuacgacccgcuggucuuccccuccgacgaguucgacgccagcaucucccaggugaacgagaagaucaaccagagccuggccuucauccggaaguccgacgagcuccugcacaacgugaacgucggcaagagcaccacgaacaucaugaucaccaccaucaucaucgugaucaucgugauccugcugcuccugaucgccgucgggcuguuccucuacugcaaggcccgcuccacccccgugacgcugagcaaggaccagcuguccgggaucaacaacaucgcguucagcaacugaggacuaguaauaaggaaacuguaugaaugucugugggcaggaagugaagagauccuucuguaaagguuuuuggaauuaugucugcugaauaauaaacuuuuuugaaauaauaaaucugguagaaaaaugagaucuaaaaaaaaaaaaaaaaaaaaaaaaaaaaaaaaaaaaaaaaaaaaaaaaaaaaaaaaaaaaaaaaugcaucccccccccccccccccccccccccccccccaaaggcucuuuucagagccaccagaauu

SEQ ID NO: 17214 - RNA, 2048 nt, Artificial Sequence
  mRNA product Design h-4 comprising derived and/or modified sequence from HRSV(Memphis-37)__AIY60640.1__F_DSCav1_mut5 (opt1)
gggagagggcgcuuggcuugcaaggacccugagcugcggcauugaagcacacccaacccaacucgacugaagucagccucacugaaccggaucugagaaucuucucucucugggcuugccagggcucuccgaaccuagcuagcauccucuucaauuccaacuagaaagcuuaccauggagcugcccauccucaagaccaacgccaucaccacgauccuggccgcggugacccugugcuucgccagcucccagaacaucaccgaggaguucuaccagagcacgugcuccgccgucagcaagggcuaccucuccgcccugcgcaccgggugguacaccagcgugaucaccaucgagcuguccaacaucaaggagaacaagugcaacggcaccgacgccaaggugaagcucaucaagcaggagcuggacaaguacaagaacgcggucacggagcugcagcuccugaugcagagcaccccggccgccggguccggcagcgccaucgcguccgggaucgccgugugcaaggugcugcaccucgagggcgaggucaacaagaucaagaacgcccugcugagcaccaacaaggccguggugucccucagcggcugcggggucuccgugcugaccuucaaggugcuggaccucaagaacuacaucgacaagcagcugcugcccauccucaacaagcagagcugcuccaucagcaacaucgagacggucaucgaguuccagcagaagaacaaccggcugcuggagaucacccgcgaguucuccgugaacgccggcgugaccacccccgucagcacguacaugcucaccaacagcgagcugcugucccucaucaacgacaugcccaucaccaacgaccagaagaagcugaugagcaacaacgugcagaucgugcggcagcaguccuacagcaucaugugcaucaucaaggaggagguccuggcguacguggugcagcucccgcuguacggggucaucgacacccccugcuggaagcugcacacgagcccccucugcaccaccaacaccaaggagggcuccaacaucugccugacgcgcaccgaccgggggugguacugcgacaacgccggcuccgugagcuucuucccccaggccgagaccugcaaggugcaguccaaccgcgucuucugcgacaccaugaacagccggacgcucccguccgaggugaaccugugcaacaucgacaucuucaaccccaaguacgacugcaagaucaugaccagcaagaccgacgucuccagcuccgugaucaccagccugggcgccaucguguccugcuacgggaagacgaagugcaccgccagcaacaagugccggggcaucaucaagaccuucuccaacgggugcgacuacgucagcaacaagggcguggacaccgugagcgucggcaacacgcucuacuacgugaacaagcaggaggggaagucccuguacgugaagggcgagcccaucaucaacuucuacgacccccuggucuucccgagcgacgaguucgacgcguccaucagccaggugaacgagaagaucaaccagucccucgccuucauccgcaagagcgacgagcugcugcacaacgugaacgucgggaaguccaccaccaacaucaugaucaccaccaucaucaucgugaucaucgugauccuccugcugcucaucgccgucggccuguuccuguacugcaaggcccggagcacgcccgugacccuguccaaggaccagcucagcgggaucaacaacaucgccuucuccaacugaggacuaguaauaaggaaacuguaugaaugucugugggcaggaagugaagagauccuucuguaaagguuuuuggaauuaugucugcugaauaauaaacuuuuuugaaauaauaaaucugguagaaaaaugagaucuaaaaaaaaaaaaaaaaaaaaaaaaaaaaaaaaaaaaaaaaaaaaaaaaaaaaaaaaaaaaaaaaugcaucccccccccccccccccccccccccccccccaaaggcucuuuucagagccaccagaauu

SEQ ID NO: 17215 - RNA, 2048 nt, Artificial Sequence
  mRNA product Design h-4 comprising derived and/or modified sequence from HRSV(Memphis-37)__AIY60640.1__F_DSCav1_mut5 (opt2)
gggagagggcgcuuggcuugcaaggacccugagcugcggcauugaagcacacccaacccaacucgacugaagucagccucacugaaccggaucugagaaucuucucucucugggcuugccagggcucuccgaaccuagcuagcauccucuucaauuccaacuagaaagcuuaccauggagcuccccauccucaagaccaacgccaucaccaccauccucgccgccgucacccucugcuucgccuccucccagaacaucaccgaggaguucuaccaguccaccugcuccgccgucuccaagggcuaccucuccgcccuccgcaccggcugguacaccuccgucaucaccaucgagcucuccaacaucaaggagaacaagugcaacggcaccgacgccaaggucaagcucaucaagcaggagcucgacaaguacaagaacgccgucaccgagcuccagcuccucaugcaguccacccccgccgccggcuccggcuccgccaucgccuccggcaucgccgucugcaagguccuccaccucgagggcgaggucaacaagaucaagaacgcccuccucuccaccaacaaggccgucgucucccucuccggcugcggcgucuccguccucaccuucaagguccucgaccucaagaacuacaucgacaagcagcuccuccccauccucaacaagcaguccugcuccaucuccaacaucgagaccgucaucgaguuccagcagaagaacaaccgccuccucgagaucacccgcgaguucuccgucaacgccggcgucaccacccccgucuccaccuacaugcucaccaacuccgagcuccucucccucaucaacgacaugcccaucaccaacgaccagaagaagcucauguccaacaacguccagaucguccgccagcaguccuacuccaucaugugcaucaucaaggaggagguccucgccuacgucguccagcucccccucuacggcgucaucgacacccccugcuggaagcuccacaccuccccccucugcaccaccaacaccaaggagggcuccaacaucugccucacccgcaccgaccgcggcugguacugcgacaacgccggcuccgucuccuucuucccccaggccgagaccugcaagguccaguccaaccgcgucuucugcgacaccaugaacucccgcacccuccccuccgaggucaaccucugcaacaucgacaucuucaaccccaaguacgacugcaagaucaugaccuccaagaccgacgucuccuccuccgucaucaccucccucggcgccaucgucuccugcuacggcaagaccaagugcaccgccuccaacaagugccgcggcaucaucaagaccuucuccaacggcugcgacuacgucuccaacaagggcgucgacaccgucuccgucggcaacacccucuacuacgucaacaagcaggagggcaagucccucuacgucaagggcgagcccaucaucaacuucuacgacccccucgucuuccccuccgacgaguucgacgccuccaucucccaggucaacgagaagaucaaccagucccucgccuucauccgcaaguccgacgagcuccuccacaacgucaacgucggcaaguccaccaccaacaucaugaucaccaccaucaucaucgucaucaucgucauccuccuccuccucaucgccgucggccucuuccucuacugcaaggcccgcuccacccccgucacccucuccaaggaccagcucuccggcaucaacaacaucgccuucuccaacugaggacuaguaauaaggaaacuguaugaaugucugugggcaggaagugaagagauccuucuguaaagguuuuuggaauuaugucugcugaauaauaaacuuuuuugaaauaauaaaucugguagaaaaaugagaucuaaaaaaaaaaaaaaaaaaaaaaaaaaaaaaaaaaaaaaaaaaaaaaaaaaaaaaaaaaaaaaaaugcaucccccccccccccccccccccccccccccccaaaggcucuuuucagagccaccagaauu

SEQ ID NO: 17216 - RNA, 2048 nt, Artificial Sequence
  mRNA product Design h-4 comprising derived and/or modified sequence from HRSV(Memphis-37)__AIY60640.1__F_DSCav1_mut5 (opt3)
gggagagggcgcuuggcuugcaaggacccugagcugcggcauugaagcacacccaacccaacucgacugaagucagccucacugaaccggaucugagaaucuucucucucugggcuugccagggcucuccgaaccuagcuagcauccucuucaauuccaacuagaaagcuuaccauggagcugcccauccucaagaccaacgccauuacaacuauacuugcugcagugacgcugugcuucgccagcucccagaauaucaccgaagaguuuuaccaaucuacauguucagcggucaguaaaggcuauuugagcgcuuuaagaacugggugguacaccuccguuauuacaaucgaacugucuaacauuaaggagaauaaaugcaacggaaccgacgccaaggugaaacuaaucaagcaggaacucgauaaguauaaaaaugcaguaacugagcugcagcuucugaugcagucgaccccugccgcugguucaggcagcgcaauagccagugggaucgcuguguguaaggucuugcaccucgagggagaagugaacaaaauuaagaaugcccugcuguccacaaacaaagcgguugugucucucagcggcugcggugucuccguguuaacguucaagguacuggaccuuaagaauuacaucgauaaacaauugcugccaauucuaaacaagcagucauguaguaucagcaauauagagacuguuauugaauuucagcagaaaaacaauaggcuccuggagaucacccgggaguucucugugaacgcaggggucacaacuccgguguccaccuauaugcuuacaaauucagaacuguugagccucauuaacgacaugcccaucaccaacgaucaaaagaaacugaugaguaauaacgugcagaucguccgccagcagucuuacuccauuaugugcauaaucaaggaggaaguuuuagccuaugugguacaacugccucucuacggagugauugacacgccauguuggaaacuucauacuagcccccugugcacaaccaauacuaaggagggcucgaacaucuguuugacacgaaccgaucguggcugguacugcgacaaugcugggucugucuccuuuuucccucaggccgaaacguguaaggugcagucaaacagaguguuuugcgauaccaugaauaguagaacacugccaagcgaggugaaccucugcaauauagacauuuucaaccccaaauaugauuguaagaucaugacuuccaaaaccgacgucucuagcucagugaucacaagucugggagcaauuguauccugcuacgguaagacuaaauguaccgcuagcaauaagugcaggggcaucauuaagacauuuucuaacgggugugauuauguuucaaauaaaggaguggacaccgucagugugggcaacacucuuuacuaugucaauaagcaagaggguaaaagccuguacgugaagggggaaccuauaaucaacuucuaugacccauugguuuuuccguccgaugaguucgacgccucuauuucgcagguuaacgagaaaaucaaucagagccucgcguuuauccggaaguccgaugaacuguuacacaacguaaaugucggaaagucaacgacaaacauuaugauaaccacuaucauuaucgugauuaucguuauacugcuacuccugaucgccgugggccuuuucuuguacugcaaagcacgcaguacccccgucacacugucuaaggaccagcucagcggcauuaauaacaucgcuuucuccaauugaggacuaguaauaaggaaacuguaugaaugucugugggcaggaagugaagagauccuucuguaaagguuuuuggaauuaugucugcugaauaauaaacuuuuuugaaauaauaaaucugguagaaaaaugagaucuaaaaaaaaaaaaaaaaaaaaaaaaaaaaaaaaaaaaaaaaaaaaaaaaaaaaaaaaaaaaaaaaugcaucccccccccccccccccccccccccccccccaaaggcucuuuucagagccaccagaauu

SEQ ID NO: 17217 - RNA, 2048 nt, Artificial Sequence
  mRNA product Design h-4 comprising derived and/or modified sequence from HRSV(Memphis-37)__AIY60640.1__F_DSCav1_mut5 (opt4)
gggagagggcgcuuggcuugcaaggacccugagcugcggcauugaagcacacccaacccaacucgacugaagucagccucacugaaccggaucugagaaucuucucucucugggcuugccagggcucuccgaaccuagcuagcauccucuucaauuccaacuagaaagcuuaccauggagcugcccauccugaagaccaacgccaucaccaccauccuggccgccgugacccugugcuucgccagcagccagaacaucaccgaggaguucuaccagagcaccugcagcgccgugagcaagggcuaccugagcgcccugagaaccggcugguacaccagcgugaucaccaucgagcugagcaacaucaaggagaacaagugcaacggcaccgacgccaaggugaagcugaucaagcaggagcuggacaaguacaagaacgccgugaccgagcugcagcugcugaugcagagcacccccgccgccggcagcggcagcgccaucgccagcggcaucgccgugugcaaggugcugcaccuggagggcgaggugaacaagaucaagaacgcccugcugagcaccaacaaggccguggugagccugagcggcugcggcgugagcgugcugaccuucaaggugcuggaccugaagaacuacaucgacaagcagcugcugcccauccugaacaagcagagcugcagcaucagcaacaucgagaccgugaucgaguuccagcagaagaacaacagacugcuggagaucaccagagaguucagcgugaacgccggcgugaccacccccgugagcaccuacaugcugaccaacagcgagcugcugagccugaucaacgacaugcccaucaccaacgaccagaagaagcugaugagcaacaacgugcagaucgugagacagcagagcuacagcaucaugugcaucaucaaggaggaggugcuggccuacguggugcagcugccccuguacggcgugaucgacacccccugcuggaagcugcacaccagcccccugugcaccaccaacaccaaggagggcagcaacaucugccugaccagaaccgacagaggcugguacugcgacaacgccggcagcgugagcuucuucccccaggccgagaccugcaaggugcagagcaacagaguguucugcgacaccaugaacagcagaacccugcccagcgaggugaaccugugcaacaucgacaucuucaaccccaaguacgacugcaagaucaugaccagcaagaccgacgugagcagcagcgugaucaccagccugggcgccaucgugagcugcuacggcaagaccaagugcaccgccagcaacaagugcagaggcaucaucaagaccuucagcaacggcugcgacuacgugagcaacaagggcguggacaccgugagcgugggcaacacccuguacuacgugaacaagcaggagggcaagagccuguacgugaagggcgagcccaucaucaacuucuacgacccccugguguuccccagcgacgaguucgacgccagcaucagccaggugaacgagaagaucaaccagagccuggccuucaucagaaagagcgacgagcugcugcacaacgugaacgugggcaagagcaccaccaacaucaugaucaccaccaucaucaucgugaucaucgugauccugcugcugcugaucgccgugggccuguuccuguacugcaaggccagaagcacccccgugacccugagcaaggaccagcugagcggcaucaacaacaucgccuucagcaacugaggacuaguaauaaggaaacuguaugaaugucugugggcaggaagugaagagauccuucuguaaagguuuuuggaauuaugucugcugaauaauaaacuuuuuugaaauaauaaaucugguagaaaaaugagaucuaaaaaaaaaaaaaaaaaaaaaaaaaaaaaaaaaaaaaaaaaaaaaaaaaaaaaaaaaaaaaaaaugcaucccccccccccccccccccccccccccccccaaaggcucuuuucagagccaccagaauu

SEQ ID NO: 17218 - RNA, 2048 nt, Artificial Sequence
  mRNA product Design h-4 comprising derived and/or modified sequence from HRSV(Memphis-37)__AIY60640.1__F_DSCav1_mut5 (opt5)
gggagagggcgcuuggcuugcaaggacccugagcugcggcauugaagcacacccaacccaacucgacugaagucagccucacugaaccggaucugagaaucuucucucucugggcuugccagggcucuccgaaccuagcuagcauccucuucaauuccaacuagaaagcuuaccauggagcugcccauccucaagaccaacgccauuacaacgauccuggcugccgugacccuuugcuucgcgagcucccagaauauuacagaagaguuuuaccaaucuaccuguagcgcugucuccaaaggcuaucugucugcccucagaacagggugguacaccagcguuaucacaauugaacuguccaacaucaaggagaauaaaugcaacggaaccgacgccaaggugaaacuuaucaagcaggaacuggauaaguauaaaaaugcugugacggagcuccagcugcugaugcagucuaccccugccgcuggcagcggguccgccauugcgagcggaaucgccgucuguaaggugcuccaccuggagggcgaaguuaacaaaauuaagaaugcccuucugucuacaaacaaagcuguggucucccucagcgggugcggagugucuguucugaccuucaaggugcuugaccugaagaauuacaucgauaaacaacuccugccgauucugaacaagcaguccuguagcaucucuaauauugagacagucaucgaauuucagcagaaaaacaaucggcuccuggagaucacccgcgaguucuccgugaacgcuggcgugacgacacccgucagcaccuauaugcuuacaaauuccgaacugcucucucugauuaacgacaugccuaucaccaacgaucaaaagaaacuuaugagcaauaacguucagauugugagacagcaguccuacagcaucaugugcauuaucaaggaggaagugcuggccuaugucgugcaacucccccuguacggcguuaucgacaccccuuguuggaaacugcauacaucuccccucugcacgaccaauacaaaggagggguccaacauuugucugacccggacagaucgcggaugguacugcgacaaugcgggcagcgugagcuuuuucccucaggccgaaaccuguaagguccagucuaacagaguguuuugcgauacgaugaacuccagaacacugccgucugagguuaaucucugcaauaucgacauuuucaaccccaaauaugauuguaagaucaugaccagcaaaaccgacguguccagcucugucauuacaucccugggggcuaucgugagcugcuacggaaagaccaaauguacagccucuaauaagugccggggcaucauuaagacguuuuccaacgggugugauuaugucagcaauaaaggaguggacaccguuuccgugggcaacacacuuuacuaugucaauaagcaagagggcaaaucucuguacgugaagggggaaccuaucauuaacuucuaugacccccucguuuuuccuagcgaugaguucgacgcuuccaucucucaggugaacgagaaaauuaaucagagccuggccuuuauccgcaaguccgaugaacugcuccacaacgucaaugugggaaagagcaccacaaacauuaugaucaccacgaucauuaucgugauuaucguuauucugcuucugcucaucgccgucggccuguuccuguacugcaaagcuagaucuacccccgugacacuuuccaaggaccagcucagcgggaucaauaacauugcguucucuaauugaggacuaguaauaaggaaacuguaugaaugucugugggcaggaagugaagagauccuucuguaaagguuuuuggaauuaugucugcugaauaauaaacuuuuuugaaauaauaaaucugguagaaaaaugagaucuaaaaaaaaaaaaaaaaaaaaaaaaaaaaaaaaaaaaaaaaaaaaaaaaaaaaaaaaaaaaaaaaugcaucccccccccccccccccccccccccccccccaaaggcucuuuucagagccaccagaauu

SEQ ID NO: 17219 - RNA, 2048 nt, Artificial Sequence
  mRNA product Design h-4 comprising derived and/or modified sequence from HRSV(Memphis-37)__AIY60640.1__F_DSCav1_mut5 (opt6)
gggagagggcgcuuggcuugcaaggacccugagcugcggcauugaagcacacccaacccaacucgacugaagucagccucacugaaccggaucugagaaucuucucucucugggcuugccagggcucuccgaaccuagcuagcauccucuucaauuccaacuagaaagcuuaccauggaacucccaaucuuaaaaacaaacgcaauaacuacaauacucgcagcaguaacacuaugcuucgcaucaucacaaaacauaaccgaagaauuuuaccaaaguacaugcucagcaguaucaaaagguuaccucucagcccuaagaaccggaugguacacaucaguaaucacuauagaacuauccaauauaaaagaaaacaaaugcaacggcacugacgcaaaaguuaaauuaauuaaacaagaacucgauaaauauaaaaaugcaguaacagaacuacaacuacuaaugcaaagcaccccagcugcaggaagcggaucagcaaucgcaucaggaauagcaguauguaaaguacuacaccuagaaggagaagucaacaaaaucaaaaaugcacuacuaaguacaaacaaagcuguaguaagccuaucagguugcggaguaucaguauuaacauuuaaaguccucgaccuaaaaaauuacauagauaaacaacucuuaccaauacucaauaaacaaaguugcagcaucagcaacauagaaacagucaucgaauuucaacaaaaaaauaauagacuccuagaaauaacacgugaauuuucaguaaaugcuggaguaacaacaccaguaucuacauauaugcuaacaaauagcgaacuacucucacuuauuaacgauaugcccauaacaaacgaccaaaaaaaacuuaugucaaacaauguucaaauaguuagacaacaauccuacagcauaaugugcauaaucaaagaagaaguucuagcuuacguaguacaacuaccacucuaugguguuaucgacacccccuguuggaaacuucacacaucaccacuaugcacaacaaacacaaaagaaggaucaaauauuugcuuaacaagaacagauagaggaugguauugcgauaaugccggaucaguaucauuuuuuccacaagcagaaacauguaaaguacaauccaaccgaguauuuugcgacaccaugaacuccagaacacuaccaucugaagucaaccuauguaauauagauauauuuaacccaaaauaugacuguaaaaucaugacaucaaaaacugauguaaguucuaguguaauaaccagcuuaggcgccauaguaagcuguuacgguaaaacaaaaugcacagcaagcaacaaaugccgcgguauaauaaaaacauucucaaacggaugcgauuauguaaguaacaaaggaguagauacagucuccguaggcaacacauuauacuacguaaacaaacaagaaggaaaaucacuauauguaaaaggagaaccaaucauaaauuucuacgacccacuuguauuccccagcgacgaauuugaugcuuccauuucacaagucaacgaaaaaauaaaccaaucauuagccuucauaagaaaaucagacgaauuauuacauaauguuaaugucggcaaauccacaacuaauauaaugauaacaacaaucauaauaguaauaaucguuauacuacuauuacucauagcaguaggacucuucuuauauuguaaagccagauccaccccaguaacacucucaaaagaccaauuaucaggaauuaauaacaucgcauuuucaaacuaaggacuaguaauaaggaaacuguaugaaugucugugggcaggaagugaagagauccuucuguaaagguuuuuggaauuaugucugcugaauaauaaacuuuuuugaaauaauaaaucugguagaaaaaugagaucuaaaaaaaaaaaaaaaaaaaaaaaaaaaaaaaaaaaaaaaaaaaaaaaaaaaaaaaaaaaaaaaaugcaucccccccccccccccccccccccccccccccaaaggcucuuuucagagccaccagaauu

SEQ ID NO: 17220 - RNA, 2048 nt, Artificial Sequence
  mRNA product Design h-4 comprising derived and/or modified sequence from HRSV(Memphis-37)__AIY60640.1__F_DSCav1_mut5 (opt11)
gggagagggcgcuuggcuugcaaggacccugagcugcggcauugaagcacacccaacccaacucgacugaagucagccucacugaaccggaucugagaaucuucucucucugggcuugccagggcucuccgaaccuagcuagcauccucuucaauuccaacuagaaagcuuaccauggaacuccccauccuuaaaaccaacgcaaucaccacaauacucgccgccgucacccucugcuuugcguccucccagaacaucaccgaagaguucuaccaaucgaccugcagcgccgucagcaagggcuaccucucagcccuccgaacaggcugguacacauccgucaucaccaucgaacucucaaacauaaaagaaaacaaguguaacggcaccgacgcgaaaguuaaacucaucaaacaagaacucgauaaauacaaaaacgcaguaaccgaacuacaacuccuaaugcaauccacacccgcagccggcagcggcuccgcaaucgccuccggcauagcagucugcaaaguccuccaccucgaaggagaagucaauaaaaucaaaaacgcccuccuauccaccaacaaagcgguugucucccuguccggaugcggaguuagcguccuaaccuucaaggugcucgaccucaaaaacuacauagacaaacaacuacuccccauacucaacaaacaaucaugcuccaucagcaacaucgagaccgucaucgaguuccaacagaaaaacaaccgccuccucgaaaucacacgagaguucuccguaaacgccggcgucacaacccccguuuccacuuacaugcucacaaacagcgaacuccucucccucaucaacgacaugccaaucaccaacgaccaaaagaaacucauguccaacaacguccaaaucguccgccaacaaagcuacagcauaaugugcaucauaaaagaagaaguacucgcguacguaguccaacuaccccuauacggcgucaucgacacccccugcuggaaacugcacacuucuccccucuguacaaccaacacuaaagaaggcucgaacaucugccucaccagaacagaccgaggaugguacugcgacaacgccggcuccgucagcuucuucccccaggccgaaacaugcaaaguacaaucaaaccgagucuucugcgacacaaugaacagcagaacucuacccuccgaaguuaaccuaugcaacaucgacaucuucaaccccaaauacgacugcaaaauaaugaccucaaaaacagacguguccagcuccguuaucaccucucucggagccaucguauccuguuauggaaaaaccaaaugcaccgccucaaacaaaugccgaggcauaaucaaaacauucucaaauggaugcgacuacguauccaacaaaggagucgacaccgucagcgugggcaauacccucuacuacgucaacaaacaggaagggaaaucccucuauguaaagggcgagcccauuauuaacuucuaugacccccucguguucccaagcgacgaguucgacgccuccauaucacaagucaaugagaaaaucaaccaaucacuagcuuucauucgcaaauccgacgaacuccuucacaacgucaacgucggcaaauccaccaccaacaucaugaucaccaccauaauuaucgucauuaucgucauacuacuccuacucaucgccgucggccucuuccucuauugcaaagcacgcucgacacccgucacccuuucaaaagaccaacuuuccggcauaaacaacauagccuucagcaacuagggacuaguaauaaggaaacuguaugaaugucugugggcaggaagugaagagauccuucuguaaagguuuuuggaauuaugucugcugaauaauaaacuuuuuugaaauaauaaaucugguagaaaaaugagaucuaaaaaaaaaaaaaaaaaaaaaaaaaaaaaaaaaaaaaaaaaaaaaaaaaaaaaaaaaaaaaaaaugcaucccccccccccccccccccccccccccccccaaaggcucuuuucagagccaccagaauu

SEQ ID NO: 17221 - RNA, 2064 nt, Artificial Sequence
  mRNA product Design h-5 comprising derived and/or modified sequence from HRSV(Memphis-37)__AIY60640.1__F_DSCav1_mut5 (opt1)
gggagagggcgcuuggcuugcaaggacccugagcugcggcauugaagcacacccaacccaacucgacugaagucagccucacugaaccggaucugagaaucuucucucucugggcuugccagggcucuccgaaccuagcuagcauccucuucaauuccaacuagaaagcuuaccauggagcugcccauccucaagaccaacgccaucaccacgauccuggccgcggugacccugugcuucgccagcucccagaacaucaccgaggaguucuaccagagcacgugcuccgccgucagcaagggcuaccucuccgcccugcgcaccgggugguacaccagcgugaucaccaucgagcuguccaacaucaaggagaacaagugcaacggcaccgacgccaaggugaagcucaucaagcaggagcuggacaaguacaagaacgcggucacggagcugcagcuccugaugcagagcaccccggccgccggcuccgggagcgcgaucgccuccggcaucgccgucugcaaggugcugcaccucgagggcgaggugaacaagaucaagaacgcccugcuguccaccaacaaggccgucgugagccucuccggcugcggggugagcguccugaccuucaaggugcuggaccucaagaacuacaucgacaagcagcugcugcccauccugaacaagcagagcugcuccaucagcaacaucgagaccgucaucgaguuccagcagaagaacaaccgccuccuggagaucacgcgggaguucagcgugaacgcgggcgugaccacccccgucuccaccuacaugcugacgaacagcgagcuccugucccugaucaacgacaugccgaucaccaacgaccagaagaagcucaugagcaacaacgugcagaucgugcgccagcaguccuacagcaucaugugcaucaucaaggaggagguccuggccuacguggugcagcugccccucuacggggucaucgacacccccugcuggaagcugcacaccagcccccugugcacgaccaacaccaaggagggcuccaacaucugccucacccggacggaccgcgggugguacugcgacaacgccggcagcguguccuucuucccgcaggccgagaccugcaagguccagagcaaccggguguucugcgacaccaugaacucccggacccugcccagcgaggugaaccucugcaacaucgacaucuucaaccccaaguacgacugcaagaucaugacguccaagaccgacgucagcuccagcgugaucaccucccugggcgccaucgugagcugcuacgggaagaccaagugcacggcgagcaacaagugccgcggcaucaucaagaccuucuccaacgggugcgacuacgucagcaacaagggcguggacaccguguccgucggcaacacccuguacuacgugaacaagcaggagggcaagagccucuacgugaagggggagcccaucaucaacuucuacgacccgcuggucuuccccuccgacgaguucgacgccagcaucucccaggugaacgagaagaucaaccagagccuggccuucauccggaaguccgacgagcuccugcacaacgugaacgucggcaagagcaccacgaacaucaugaucaccaccaucaucaucgugaucaucgugauccugcugcuccugaucgccgucgggcuguuccucuacugcaaggcccgcuccacccccgugacgcugagcaaggaccagcuguccgggaucaacaacaucgcguucagcaacugaggacuaguacuggcugcaucucccuuuccucuguccuccauccuucucccaggauggugaagggggaccugguacccagugauccccaccccaggauccuaaaucaugacuuaccugcuaauaaaaacucauuggaaaagugagaagaucuaaaaaaaaaaaaaaaaaaaaaaaaaaaaaaaaaaaaaaaaaaaaaaaaaaaaaaaaaaaaaaaaugcaucccccccccccccccccccccccccccccccaaaggcucuuuucagagccaccagaauu

SEQ ID NO: 17222 - RNA, 2064 nt, Artificial Sequence
  mRNA product Design h-5 comprising derived and/or modified sequence from HRSV(Memphis-37)__AIY60640.1__F_DSCav1_mut5 (opt1)
gggagagggcgcuuggcuugcaaggacccugagcugcggcauugaagcacacccaacccaacucgacugaagucagccucacugaaccggaucugagaaucuucucucucugggcuugccagggcucuccgaaccuagcuagcauccucuucaauuccaacuagaaagcuuaccauggagcugcccauccucaagaccaacgccaucaccacgauccuggccgcggugacccugugcuucgccagcucccagaacaucaccgaggaguucuaccagagcacgugcuccgccgucagcaagggcuaccucuccgcccugcgcaccgggugguacaccagcgugaucaccaucgagcuguccaacaucaaggagaacaagugcaacggcaccgacgccaaggugaagcucaucaagcaggagcuggacaaguacaagaacgcggucacggagcugcagcuccugaugcagagcaccccggccgccggguccggcagcgccaucgcguccgggaucgccgugugcaaggugcugcaccucgagggcgaggucaacaagaucaagaacgcccugcugagcaccaacaaggccguggugucccucagcggcugcggggucuccgugcugaccuucaaggugcuggaccucaagaacuacaucgacaagcagcugcugcccauccucaacaagcagagcugcuccaucagcaacaucgagacggucaucgaguuccagcagaagaacaaccggcugcuggagaucacccgcgaguucuccgugaacgccggcgugaccacccccgucagcacguacaugcucaccaacagcgagcugcugucccucaucaacgacaugcccaucaccaacgaccagaagaagcugaugagcaacaacgugcagaucgugcggcagcaguccuacagcaucaugugcaucaucaaggaggagguccuggcguacguggugcagcucccgcuguacggggucaucgacacccccugcuggaagcugcacacgagcccccucugcaccaccaacaccaaggagggcuccaacaucugccugacgcgcaccgaccgggggugguacugcgacaacgccggcuccgugagcuucuucccccaggccgagaccugcaaggugcaguccaaccgcgucuucugcgacaccaugaacagccggacgcucccguccgaggugaaccugugcaacaucgacaucuucaaccccaaguacgacugcaagaucaugaccagcaagaccgacgucuccagcuccgugaucaccagccugggcgccaucguguccugcuacgggaagacgaagugcaccgccagcaacaagugccggggcaucaucaagaccuucuccaacgggugcgacuacgucagcaacaagggcguggacaccgugagcgucggcaacacgcucuacuacgugaacaagcaggaggggaagucccuguacgugaagggcgagcccaucaucaacuucuacgacccccuggucuucccgagcgacgaguucgacgcguccaucagccaggugaacgagaagaucaaccagucccucgccuucauccgcaagagcgacgagcugcugcacaacgugaacgucgggaaguccaccaccaacaucaugaucaccaccaucaucaucgugaucaucgugauccuccugcugcucaucgccgucggccuguuccuguacugcaaggcccggagcacgcccgugacccuguccaaggaccagcucagcgggaucaacaacaucgccuucuccaacugaggacuaguacuggcugcaucucccuuuccucuguccuccauccuucucccaggauggugaagggggaccugguacccagugauccccaccccaggauccuaaaucaugacuuaccugcuaauaaaaacucauuggaaaagugagaagaucuaaaaaaaaaaaaaaaaaaaaaaaaaaaaaaaaaaaaaaaaaaaaaaaaaaaaaaaaaaaaaaaaugcaucccccccccccccccccccccccccccccccaaaggcucuuuucagagccaccagaauu

SEQ ID NO: 17223 - RNA, 2064 nt, Artificial Sequence
  mRNA product Design h-5 comprising derived and/or modified sequence from HRSV(Memphis-37)__AIY60640.1__F_DSCav1_mut5 (opt2)
gggagagggcgcuuggcuugcaaggacccugagcugcggcauugaagcacacccaacccaacucgacugaagucagccucacugaaccggaucugagaaucuucucucucugggcuugccagggcucuccgaaccuagcuagcauccucuucaauuccaacuagaaagcuuaccauggagcuccccauccucaagaccaacgccaucaccaccauccucgccgccgucacccucugcuucgccuccucccagaacaucaccgaggaguucuaccaguccaccugcuccgccgucuccaagggcuaccucuccgcccuccgcaccggcugguacaccuccgucaucaccaucgagcucuccaacaucaaggagaacaagugcaacggcaccgacgccaaggucaagcucaucaagcaggagcucgacaaguacaagaacgccgucaccgagcuccagcuccucaugcaguccacccccgccgccggcuccggcuccgccaucgccuccggcaucgccgucugcaagguccuccaccucgagggcgaggucaacaagaucaagaacgcccuccucuccaccaacaaggccgucgucucccucuccggcugcggcgucuccguccucaccuucaagguccucgaccucaagaacuacaucgacaagcagcuccuccccauccucaacaagcaguccugcuccaucuccaacaucgagaccgucaucgaguuccagcagaagaacaaccgccuccucgagaucacccgcgaguucuccgucaacgccggcgucaccacccccgucuccaccuacaugcucaccaacuccgagcuccucucccucaucaacgacaugcccaucaccaacgaccagaagaagcucauguccaacaacguccagaucguccgccagcaguccuacuccaucaugugcaucaucaaggaggagguccucgccuacgucguccagcucccccucuacggcgucaucgacacccccugcuggaagcuccacaccuccccccucugcaccaccaacaccaaggagggcuccaacaucugccucacccgcaccgaccgcggcugguacugcgacaacgccggcuccgucuccuucuucccccaggccgagaccugcaagguccaguccaaccgcgucuucugcgacaccaugaacucccgcacccuccccuccgaggucaaccucugcaacaucgacaucuucaaccccaaguacgacugcaagaucaugaccuccaagaccgacgucuccuccuccgucaucaccucccucggcgccaucgucuccugcuacggcaagaccaagugcaccgccuccaacaagugccgcggcaucaucaagaccuucuccaacggcugcgacuacgucuccaacaagggcgucgacaccgucuccgucggcaacacccucuacuacgucaacaagcaggagggcaagucccucuacgucaagggcgagcccaucaucaacuucuacgacccccucgucuuccccuccgacgaguucgacgccuccaucucccaggucaacgagaagaucaaccagucccucgccuucauccgcaaguccgacgagcuccuccacaacgucaacgucggcaaguccaccaccaacaucaugaucaccaccaucaucaucgucaucaucgucauccuccuccuccucaucgccgucggccucuuccucuacugcaaggcccgcuccacccccgucacccucuccaaggaccagcucuccggcaucaacaacaucgccuucuccaacugaggacuaguacuggcugcaucucccuuuccucuguccuccauccuucucccaggauggugaagggggaccugguacccagugauccccaccccaggauccuaaaucaugacuuaccugcuaauaaaaacucauuggaaaagugagaagaucuaaaaaaaaaaaaaaaaaaaaaaaaaaaaaaaaaaaaaaaaaaaaaaaaaaaaaaaaaaaaaaaaugcaucccccccccccccccccccccccccccccccaaaggcucuuuucagagccaccagaauu

SEQ ID NO: 17224 - RNA, 2064 nt, Artificial Sequence
  mRNA product Design h-5 comprising derived and/or modified sequence from HRSV(Memphis-37)__AIY60640.1__F_DSCav1_mut5 (opt3)
gggagagggcgcuuggcuugcaaggacccugagcugcggcauugaagcacacccaacccaacucgacugaagucagccucacugaaccggaucugagaaucuucucucucugggcuugccagggcucuccgaaccuagcuagcauccucuucaauuccaacuagaaagcuuaccauggagcugcccauccucaagaccaacgccauuacaacuauacuugcugcagugacgcugugcuucgccagcucccagaauaucaccgaagaguuuuaccaaucuacauguucagcggucaguaaaggcuauuugagcgcuuuaagaacugggugguacaccuccguuauuacaaucgaacugucuaacauuaaggagaauaaaugcaacggaaccgacgccaaggugaaacuaaucaagcaggaacucgauaaguauaaaaaugcaguaacugagcugcagcuucugaugcagucgaccccugccgcugguucaggcagcgcaauagccagugggaucgcuguguguaaggucuugcaccucgagggagaagugaacaaaauuaagaaugcccugcuguccacaaacaaagcgguugugucucucagcggcugcggugucuccguguuaacguucaagguacuggaccuuaagaauuacaucgauaaacaauugcugccaauucuaaacaagcagucauguaguaucagcaauauagagacuguuauugaauuucagcagaaaaacaauaggcuccuggagaucacccgggaguucucugugaacgcaggggucacaacuccgguguccaccuauaugcuuacaaauucagaacuguugagccucauuaacgacaugcccaucaccaacgaucaaaagaaacugaugaguaauaacgugcagaucguccgccagcagucuuacuccauuaugugcauaaucaaggaggaaguuuuagccuaugugguacaacugccucucuacggagugauugacacgccauguuggaaacuucauacuagcccccugugcacaaccaauacuaaggagggcucgaacaucuguuugacacgaaccgaucguggcugguacugcgacaaugcugggucugucuccuuuuucccucaggccgaaacguguaaggugcagucaaacagaguguuuugcgauaccaugaauaguagaacacugccaagcgaggugaaccucugcaauauagacauuuucaaccccaaauaugauuguaagaucaugacuuccaaaaccgacgucucuagcucagugaucacaagucugggagcaauuguauccugcuacgguaagacuaaauguaccgcuagcaauaagugcaggggcaucauuaagacauuuucuaacgggugugauuauguuucaaauaaaggaguggacaccgucagugugggcaacacucuuuacuaugucaauaagcaagaggguaaaagccuguacgugaagggggaaccuauaaucaacuucuaugacccauugguuuuuccguccgaugaguucgacgccucuauuucgcagguuaacgagaaaaucaaucagagccucgcguuuauccggaaguccgaugaacuguuacacaacguaaaugucggaaagucaacgacaaacauuaugauaaccacuaucauuaucgugauuaucguuauacugcuacuccugaucgccgugggccuuuucuuguacugcaaagcacgcaguacccccgucacacugucuaaggaccagcucagcggcauuaauaacaucgcuuucuccaauugaggacuaguacuggcugcaucucccuuuccucuguccuccauccuucucccaggauggugaagggggaccugguacccagugauccccaccccaggauccuaaaucaugacuuaccugcuaauaaaaacucauuggaaaagugagaagaucuaaaaaaaaaaaaaaaaaaaaaaaaaaaaaaaaaaaaaaaaaaaaaaaaaaaaaaaaaaaaaaaaugcaucccccccccccccccccccccccccccccccaaaggcucuuuucagagccaccagaauu

SEQ ID NO: 17225 - RNA, 2064 nt, Artificial Sequence
  mRNA product Design h-5 comprising derived and/or modified sequence from HRSV(Memphis-37)__AIY60640.1__F_DSCav1_mut5 (opt4)
gggagagggcgcuuggcuugcaaggacccugagcugcggcauugaagcacacccaacccaacucgacugaagucagccucacugaaccggaucugagaaucuucucucucugggcuugccagggcucuccgaaccuagcuagcauccucuucaauuccaacuagaaagcuuaccauggagcugcccauccugaagaccaacgccaucaccaccauccuggccgccgugacccugugcuucgccagcagccagaacaucaccgaggaguucuaccagagcaccugcagcgccgugagcaagggcuaccugagcgcccugagaaccggcugguacaccagcgugaucaccaucgagcugagcaacaucaaggagaacaagugcaacggcaccgacgccaaggugaagcugaucaagcaggagcuggacaaguacaagaacgccgugaccgagcugcagcugcugaugcagagcacccccgccgccggcagcggcagcgccaucgccagcggcaucgccgugugcaaggugcugcaccuggagggcgaggugaacaagaucaagaacgcccugcugagcaccaacaaggccguggugagccugagcggcugcggcgugagcgugcugaccuucaaggugcuggaccugaagaacuacaucgacaagcagcugcugcccauccugaacaagcagagcugcagcaucagcaacaucgagaccgugaucgaguuccagcagaagaacaacagacugcuggagaucaccagagaguucagcgugaacgccggcgugaccacccccgugagcaccuacaugcugaccaacagcgagcugcugagccugaucaacgacaugcccaucaccaacgaccagaagaagcugaugagcaacaacgugcagaucgugagacagcagagcuacagcaucaugugcaucaucaaggaggaggugcuggccuacguggugcagcugccccuguacggcgugaucgacacccccugcuggaagcugcacaccagcccccugugcaccaccaacaccaaggagggcagcaacaucugccugaccagaaccgacagaggcugguacugcgacaacgccggcagcgugagcuucuucccccaggccgagaccugcaaggugcagagcaacagaguguucugcgacaccaugaacagcagaacccugcccagcgaggugaaccugugcaacaucgacaucuucaaccccaaguacgacugcaagaucaugaccagcaagaccgacgugagcagcagcgugaucaccagccugggcgccaucgugagcugcuacggcaagaccaagugcaccgccagcaacaagugcagaggcaucaucaagaccuucagcaacggcugcgacuacgugagcaacaagggcguggacaccgugagcgugggcaacacccuguacuacgugaacaagcaggagggcaagagccuguacgugaagggcgagcccaucaucaacuucuacgacccccugguguuccccagcgacgaguucgacgccagcaucagccaggugaacgagaagaucaaccagagccuggccuucaucagaaagagcgacgagcugcugcacaacgugaacgugggcaagagcaccaccaacaucaugaucaccaccaucaucaucgugaucaucgugauccugcugcugcugaucgccgugggccuguuccuguacugcaaggccagaagcacccccgugacccugagcaaggaccagcugagcggcaucaacaacaucgccuucagcaacugaggacuaguacuggcugcaucucccuuuccucuguccuccauccuucucccaggauggugaagggggaccugguacccagugauccccaccccaggauccuaaaucaugacuuaccugcuaauaaaaacucauuggaaaagugagaagaucuaaaaaaaaaaaaaaaaaaaaaaaaaaaaaaaaaaaaaaaaaaaaaaaaaaaaaaaaaaaaaaaaugcaucccccccccccccccccccccccccccccccaaaggcucuuuucagagccaccagaauu

SEQ ID NO: 17226 - RNA, 2064 nt, Artificial Sequence
  mRNA product Design h-5 comprising derived and/or modified sequence from HRSV(Memphis-37)__AIY60640.1__F_DSCav1_mut5 (opt5)
gggagagggcgcuuggcuugcaaggacccugagcugcggcauugaagcacacccaacccaacucgacugaagucagccucacugaaccggaucugagaaucuucucucucugggcuugccagggcucuccgaaccuagcuagcauccucuucaauuccaacuagaaagcuuaccauggagcugcccauccucaagaccaacgccauuacaacgauccuggcugccgugacccuuugcuucgcgagcucccagaauauuacagaagaguuuuaccaaucuaccuguagcgcugucuccaaaggcuaucugucugcccucagaacagggugguacaccagcguuaucacaauugaacuguccaacaucaaggagaauaaaugcaacggaaccgacgccaaggugaaacuuaucaagcaggaacuggauaaguauaaaaaugcugugacggagcuccagcugcugaugcagucuaccccugccgcuggcagcggguccgccauugcgagcggaaucgccgucuguaaggugcuccaccuggagggcgaaguuaacaaaauuaagaaugcccuucugucuacaaacaaagcuguggucucccucagcgggugcggagugucuguucugaccuucaaggugcuugaccugaagaauuacaucgauaaacaacuccugccgauucugaacaagcaguccuguagcaucucuaauauugagacagucaucgaauuucagcagaaaaacaaucggcuccuggagaucacccgcgaguucuccgugaacgcuggcgugacgacacccgucagcaccuauaugcuuacaaauuccgaacugcucucucugauuaacgacaugccuaucaccaacgaucaaaagaaacuuaugagcaauaacguucagauugugagacagcaguccuacagcaucaugugcauuaucaaggaggaagugcuggccuaugucgugcaacucccccuguacggcguuaucgacaccccuuguuggaaacugcauacaucuccccucugcacgaccaauacaaaggagggguccaacauuugucugacccggacagaucgcggaugguacugcgacaaugcgggcagcgugagcuuuuucccucaggccgaaaccuguaagguccagucuaacagaguguuuugcgauacgaugaacuccagaacacugccgucugagguuaaucucugcaauaucgacauuuucaaccccaaauaugauuguaagaucaugaccagcaaaaccgacguguccagcucugucauuacaucccugggggcuaucgugagcugcuacggaaagaccaaauguacagccucuaauaagugccggggcaucauuaagacguuuuccaacgggugugauuaugucagcaauaaaggaguggacaccguuuccgugggcaacacacuuuacuaugucaauaagcaagagggcaaaucucuguacgugaagggggaaccuaucauuaacuucuaugacccccucguuuuuccuagcgaugaguucgacgcuuccaucucucaggugaacgagaaaauuaaucagagccuggccuuuauccgcaaguccgaugaacugcuccacaacgucaaugugggaaagagcaccacaaacauuaugaucaccacgaucauuaucgugauuaucguuauucugcuucugcucaucgccgucggccuguuccuguacugcaaagcuagaucuacccccgugacacuuuccaaggaccagcucagcgggaucaauaacauugcguucucuaauugaggacuaguacuggcugcaucucccuuuccucuguccuccauccuucucccaggauggugaagggggaccugguacccagugauccccaccccaggauccuaaaucaugacuuaccugcuaauaaaaacucauuggaaaagugagaagaucuaaaaaaaaaaaaaaaaaaaaaaaaaaaaaaaaaaaaaaaaaaaaaaaaaaaaaaaaaaaaaaaaugcaucccccccccccccccccccccccccccccccaaaggcucuuuucagagccaccagaauu

SEQ ID NO: 17227 - RNA, 2064 nt, Artificial Sequence
  mRNA product Design h-5 comprising derived and/or modified sequence from HRSV(Memphis-37)__AIY60640.1__F_DSCav1_mut5 (opt6)
gggagagggcgcuuggcuugcaaggacccugagcugcggcauugaagcacacccaacccaacucgacugaagucagccucacugaaccggaucugagaaucuucucucucugggcuugccagggcucuccgaaccuagcuagcauccucuucaauuccaacuagaaagcuuaccauggaacucccaaucuuaaaaacaaacgcaauaacuacaauacucgcagcaguaacacuaugcuucgcaucaucacaaaacauaaccgaagaauuuuaccaaaguacaugcucagcaguaucaaaagguuaccucucagcccuaagaaccggaugguacacaucaguaaucacuauagaacuauccaauauaaaagaaaacaaaugcaacggcacugacgcaaaaguuaaauuaauuaaacaagaacucgauaaauauaaaaaugcaguaacagaacuacaacuacuaaugcaaagcaccccagcugcaggaagcggaucagcaaucgcaucaggaauagcaguauguaaaguacuacaccuagaaggagaagucaacaaaaucaaaaaugcacuacuaaguacaaacaaagcuguaguaagccuaucagguugcggaguaucaguauuaacauuuaaaguccucgaccuaaaaaauuacauagauaaacaacucuuaccaauacucaauaaacaaaguugcagcaucagcaacauagaaacagucaucgaauuucaacaaaaaaauaauagacuccuagaaauaacacgugaauuuucaguaaaugcuggaguaacaacaccaguaucuacauauaugcuaacaaauagcgaacuacucucacuuauuaacgauaugcccauaacaaacgaccaaaaaaaacuuaugucaaacaauguucaaauaguuagacaacaauccuacagcauaaugugcauaaucaaagaagaaguucuagcuuacguaguacaacuaccacucuaugguguuaucgacacccccuguuggaaacuucacacaucaccacuaugcacaacaaacacaaaagaaggaucaaauauuugcuuaacaagaacagauagaggaugguauugcgauaaugccggaucaguaucauuuuuuccacaagcagaaacauguaaaguacaauccaaccgaguauuuugcgacaccaugaacuccagaacacuaccaucugaagucaaccuauguaauauagauauauuuaacccaaaauaugacuguaaaaucaugacaucaaaaacugauguaaguucuaguguaauaaccagcuuaggcgccauaguaagcuguuacgguaaaacaaaaugcacagcaagcaacaaaugccgcgguauaauaaaaacauucucaaacggaugcgauuauguaaguaacaaaggaguagauacagucuccguaggcaacacauuauacuacguaaacaaacaagaaggaaaaucacuauauguaaaaggagaaccaaucauaaauuucuacgacccacuuguauuccccagcgacgaauuugaugcuuccauuucacaagucaacgaaaaaauaaaccaaucauuagccuucauaagaaaaucagacgaauuauuacauaauguuaaugucggcaaauccacaacuaauauaaugauaacaacaaucauaauaguaauaaucguuauacuacuauuacucauagcaguaggacucuucuuauauuguaaagccagauccaccccaguaacacucucaaaagaccaauuaucaggaauuaauaacaucgcauuuucaaacuaaggacuaguacuggcugcaucucccuuuccucuguccuccauccuucucccaggauggugaagggggaccugguacccagugauccccaccccaggauccuaaaucaugacuuaccugcuaauaaaaacucauuggaaaagugagaagaucuaaaaaaaaaaaaaaaaaaaaaaaaaaaaaaaaaaaaaaaaaaaaaaaaaaaaaaaaaaaaaaaaugcaucccccccccccccccccccccccccccccccaaaggcucuuuucagagccaccagaauu

SEQ ID NO: 17228 - RNA, 2064 nt, Artificial Sequence
  mRNA product Design h-5 comprising derived and/or modified sequence from HRSV(Memphis-37)__AIY60640.1__F_DSCav1_mut5 (opt11)
gggagagggcgcuuggcuugcaaggacccugagcugcggcauugaagcacacccaacccaacucgacugaagucagccucacugaaccggaucugagaaucuucucucucugggcuugccagggcucuccgaaccuagcuagcauccucuucaauuccaacuagaaagcuuaccauggaacuccccauccuuaaaaccaacgcaaucaccacaauacucgccgccgucacccucugcuuugcguccucccagaacaucaccgaagaguucuaccaaucgaccugcagcgccgucagcaagggcuaccucucagcccuccgaacaggcugguacacauccgucaucaccaucgaacucucaaacauaaaagaaaacaaguguaacggcaccgacgcgaaaguuaaacucaucaaacaagaacucgauaaauacaaaaacgcaguaaccgaacuacaacuccuaaugcaauccacacccgcagccggcagcggcuccgcaaucgccuccggcauagcagucugcaaaguccuccaccucgaaggagaagucaauaaaaucaaaaacgcccuccuauccaccaacaaagcgguugucucccuguccggaugcggaguuagcguccuaaccuucaaggugcucgaccucaaaaacuacauagacaaacaacuacuccccauacucaacaaacaaucaugcuccaucagcaacaucgagaccgucaucgaguuccaacagaaaaacaaccgccuccucgaaaucacacgagaguucuccguaaacgccggcgucacaacccccguuuccacuuacaugcucacaaacagcgaacuccucucccucaucaacgacaugccaaucaccaacgaccaaaagaaacucauguccaacaacguccaaaucguccgccaacaaagcuacagcauaaugugcaucauaaaagaagaaguacucgcguacguaguccaacuaccccuauacggcgucaucgacacccccugcuggaaacugcacacuucuccccucuguacaaccaacacuaaagaaggcucgaacaucugccucaccagaacagaccgaggaugguacugcgacaacgccggcuccgucagcuucuucccccaggccgaaacaugcaaaguacaaucaaaccgagucuucugcgacacaaugaacagcagaacucuacccuccgaaguuaaccuaugcaacaucgacaucuucaaccccaaauacgacugcaaaauaaugaccucaaaaacagacguguccagcuccguuaucaccucucucggagccaucguauccuguuauggaaaaaccaaaugcaccgccucaaacaaaugccgaggcauaaucaaaacauucucaaauggaugcgacuacguauccaacaaaggagucgacaccgucagcgugggcaauacccucuacuacgucaacaaacaggaagggaaaucccucuauguaaagggcgagcccauuauuaacuucuaugacccccucguguucccaagcgacgaguucgacgccuccauaucacaagucaaugagaaaaucaaccaaucacuagcuuucauucgcaaauccgacgaacuccuucacaacgucaacgucggcaaauccaccaccaacaucaugaucaccaccauaauuaucgucauuaucgucauacuacuccuacucaucgccgucggccucuuccucuauugcaaagcacgcucgacacccgucacccuuucaaaagaccaacuuuccggcauaaacaacauagccuucagcaacuagggacuaguacuggcugcaucucccuuuccucuguccuccauccuucucccaggauggugaagggggaccugguacccagugauccccaccccaggauccuaaaucaugacuuaccugcuaauaaaaacucauuggaaaagugagaagaucuaaaaaaaaaaaaaaaaaaaaaaaaaaaaaaaaaaaaaaaaaaaaaaaaaaaaaaaaaaaaaaaaugcaucccccccccccccccccccccccccccccccaaaggcucuuuucagagccaccagaauu

SEQ ID NO: 17229 - RNA, 1997 nt, Artificial Sequence
  mRNA product Design i-1 comprising derived and/or modified sequence from HRSV(Memphis-37)__AIY60640.1__F_DSCav1_mut5 (opt1)
gggagagggcgcuuggcuugcaaggacccugagcugcggcauugaagcacacccaacccaacucgacugaagucagccucacugaaccggaucugagaaucuucucucucugggcuugccagggcucuccgaaccuagcuagcauccucuucaauuccaacuagaaagcuuaccauggagcugcccauccucaagaccaacgccaucaccacgauccuggccgcggugacccugugcuucgccagcucccagaacaucaccgaggaguucuaccagagcacgugcuccgccgucagcaagggcuaccucuccgcccugcgcaccgggugguacaccagcgugaucaccaucgagcuguccaacaucaaggagaacaagugcaacggcaccgacgccaaggugaagcucaucaagcaggagcuggacaaguacaagaacgcggucacggagcugcagcuccugaugcagagcaccccggccgccggcuccgggagcgcgaucgccuccggcaucgccgucugcaaggugcugcaccucgagggcgaggugaacaagaucaagaacgcccugcuguccaccaacaaggccgucgugagccucuccggcugcggggugagcguccugaccuucaaggugcuggaccucaagaacuacaucgacaagcagcugcugcccauccugaacaagcagagcugcuccaucagcaacaucgagaccgucaucgaguuccagcagaagaacaaccgccuccuggagaucacgcgggaguucagcgugaacgcgggcgugaccacccccgucuccaccuacaugcugacgaacagcgagcuccugucccugaucaacgacaugccgaucaccaacgaccagaagaagcucaugagcaacaacgugcagaucgugcgccagcaguccuacagcaucaugugcaucaucaaggaggagguccuggccuacguggugcagcugccccucuacggggucaucgacacccccugcuggaagcugcacaccagcccccugugcacgaccaacaccaaggagggcuccaacaucugccucacccggacggaccgcgggugguacugcgacaacgccggcagcguguccuucuucccgcaggccgagaccugcaagguccagagcaaccggguguucugcgacaccaugaacucccggacccugcccagcgaggugaaccucugcaacaucgacaucuucaaccccaaguacgacugcaagaucaugacguccaagaccgacgucagcuccagcgugaucaccucccugggcgccaucgugagcugcuacgggaagaccaagugcacggcgagcaacaagugccgcggcaucaucaagaccuucuccaacgggugcgacuacgucagcaacaagggcguggacaccguguccgucggcaacacccuguacuacgugaacaagcaggagggcaagagccucuacgugaagggggagcccaucaucaacuucuacgacccgcuggucuuccccuccgacgaguucgacgccagcaucucccaggugaacgagaagaucaaccagagccuggccuucauccggaaguccgacgagcuccugcacaacgugaacgucggcaagagcaccacgaacaucaugaucaccaccaucaucaucgugaucaucgugauccugcugcuccugaucgccgucgggcuguuccucuacugcaaggcccgcuccacccccgugacgcugagcaaggaccagcuguccgggaucaacaacaucgcguucagcaacugaggacuaguguccaccugucccuccugggcugcuggauugucucguuuuccugccaaauaaacaggaucagcgcuuuacagaucuaaaaaaaaaaaaaaaaaaaaaaaaaaaaaaaaaaaaaaaaaaaaaaaaaaaaaaaaaaaaaaaaugcaucccccccccccccccccccccccccccccccaaaggcucuuuucagagccaccagaauu

SEQ ID NO: 17230 - RNA, 1997 nt, Artificial Sequence
  mRNA product Design i-1 comprising derived and/or modified sequence from HRSV(Memphis-37)__AIY60640.1__F_DSCav1_mut5 (opt1)
gggagagggcgcuuggcuugcaaggacccugagcugcggcauugaagcacacccaacccaacucgacugaagucagccucacugaaccggaucugagaaucuucucucucugggcuugccagggcucuccgaaccuagcuagcauccucuucaauuccaacuagaaagcuuaccauggagcugcccauccucaagaccaacgccaucaccacgauccuggccgcggugacccugugcuucgccagcucccagaacaucaccgaggaguucuaccagagcacgugcuccgccgucagcaagggcuaccucuccgcccugcgcaccgggugguacaccagcgugaucaccaucgagcuguccaacaucaaggagaacaagugcaacggcaccgacgccaaggugaagcucaucaagcaggagcuggacaaguacaagaacgcggucacggagcugcagcuccugaugcagagcaccccggccgccggguccggcagcgccaucgcguccgggaucgccgugugcaaggugcugcaccucgagggcgaggucaacaagaucaagaacgcccugcugagcaccaacaaggccguggugucccucagcggcugcggggucuccgugcugaccuucaaggugcuggaccucaagaacuacaucgacaagcagcugcugcccauccucaacaagcagagcugcuccaucagcaacaucgagacggucaucgaguuccagcagaagaacaaccggcugcuggagaucacccgcgaguucuccgugaacgccggcgugaccacccccgucagcacguacaugcucaccaacagcgagcugcugucccucaucaacgacaugcccaucaccaacgaccagaagaagcugaugagcaacaacgugcagaucgugcggcagcaguccuacagcaucaugugcaucaucaaggaggagguccuggcguacguggugcagcucccgcuguacggggucaucgacacccccugcuggaagcugcacacgagcccccucugcaccaccaacaccaaggagggcuccaacaucugccugacgcgcaccgaccgggggugguacugcgacaacgccggcuccgugagcuucuucccccaggccgagaccugcaaggugcaguccaaccgcgucuucugcgacaccaugaacagccggacgcucccguccgaggugaaccugugcaacaucgacaucuucaaccccaaguacgacugcaagaucaugaccagcaagaccgacgucuccagcuccgugaucaccagccugggcgccaucguguccugcuacgggaagacgaagugcaccgccagcaacaagugccggggcaucaucaagaccuucuccaacgggugcgacuacgucagcaacaagggcguggacaccgugagcgucggcaacacgcucuacuacgugaacaagcaggaggggaagucccuguacgugaagggcgagcccaucaucaacuucuacgacccccuggucuucccgagcgacgaguucgacgcguccaucagccaggugaacgagaagaucaaccagucccucgccuucauccgcaagagcgacgagcugcugcacaacgugaacgucgggaaguccaccaccaacaucaugaucaccaccaucaucaucgugaucaucgugauccuccugcugcucaucgccgucggccuguuccuguacugcaaggcccggagcacgcccgugacccuguccaaggaccagcucagcgggaucaacaacaucgccuucuccaacugaggacuaguguccaccugucccuccugggcugcuggauugucucguuuuccugccaaauaaacaggaucagcgcuuuacagaucuaaaaaaaaaaaaaaaaaaaaaaaaaaaaaaaaaaaaaaaaaaaaaaaaaaaaaaaaaaaaaaaaugcaucccccccccccccccccccccccccccccccaaaggcucuuuucagagccaccagaauu

SEQ ID NO: 17231 - RNA, 1997 nt, Artificial Sequence
  mRNA product Design i-1 comprising derived and/or modified sequence from HRSV(Memphis-37)__AIY60640.1__F_DSCav1_mut5 (opt2)
gggagagggcgcuuggcuugcaaggacccugagcugcggcauugaagcacacccaacccaacucgacugaagucagccucacugaaccggaucugagaaucuucucucucugggcuugccagggcucuccgaaccuagcuagcauccucuucaauuccaacuagaaagcuuaccauggagcuccccauccucaagaccaacgccaucaccaccauccucgccgccgucacccucugcuucgccuccucccagaacaucaccgaggaguucuaccaguccaccugcuccgccgucuccaagggcuaccucuccgcccuccgcaccggcugguacaccuccgucaucaccaucgagcucuccaacaucaaggagaacaagugcaacggcaccgacgccaaggucaagcucaucaagcaggagcucgacaaguacaagaacgccgucaccgagcuccagcuccucaugcaguccacccccgccgccggcuccggcuccgccaucgccuccggcaucgccgucugcaagguccuccaccucgagggcgaggucaacaagaucaagaacgcccuccucuccaccaacaaggccgucgucucccucuccggcugcggcgucuccguccucaccuucaagguccucgaccucaagaacuacaucgacaagcagcuccuccccauccucaacaagcaguccugcuccaucuccaacaucgagaccgucaucgaguuccagcagaagaacaaccgccuccucgagaucacccgcgaguucuccgucaacgccggcgucaccacccccgucuccaccuacaugcucaccaacuccgagcuccucucccucaucaacgacaugcccaucaccaacgaccagaagaagcucauguccaacaacguccagaucguccgccagcaguccuacuccaucaugugcaucaucaaggaggagguccucgccuacgucguccagcucccccucuacggcgucaucgacacccccugcuggaagcuccacaccuccccccucugcaccaccaacaccaaggagggcuccaacaucugccucacccgcaccgaccgcggcugguacugcgacaacgccggcuccgucuccuucuucccccaggccgagaccugcaagguccaguccaaccgcgucuucugcgacaccaugaacucccgcacccuccccuccgaggucaaccucugcaacaucgacaucuucaaccccaaguacgacugcaagaucaugaccuccaagaccgacgucuccuccuccgucaucaccucccucggcgccaucgucuccugcuacggcaagaccaagugcaccgccuccaacaagugccgcggcaucaucaagaccuucuccaacggcugcgacuacgucuccaacaagggcgucgacaccgucuccgucggcaacacccucuacuacgucaacaagcaggagggcaagucccucuacgucaagggcgagcccaucaucaacuucuacgacccccucgucuuccccuccgacgaguucgacgccuccaucucccaggucaacgagaagaucaaccagucccucgccuucauccgcaaguccgacgagcuccuccacaacgucaacgucggcaaguccaccaccaacaucaugaucaccaccaucaucaucgucaucaucgucauccuccuccuccucaucgccgucggccucuuccucuacugcaaggcccgcuccacccccgucacccucuccaaggaccagcucuccggcaucaacaacaucgccuucuccaacugaggacuaguguccaccugucccuccugggcugcuggauugucucguuuuccugccaaauaaacaggaucagcgcuuuacagaucuaaaaaaaaaaaaaaaaaaaaaaaaaaaaaaaaaaaaaaaaaaaaaaaaaaaaaaaaaaaaaaaaugcaucccccccccccccccccccccccccccccccaaaggcucuuuucagagccaccagaauu

SEQ ID NO: 17232 - RNA, 1997 nt, Artificial Sequence
  mRNA product Design i-1 comprising derived and/or modified sequence from HRSV(Memphis-37)__AIY60640.1__F_DSCav1_mut5 (opt3)
gggagagggcgcuuggcuugcaaggacccugagcugcggcauugaagcacacccaacccaacucgacugaagucagccucacugaaccggaucugagaaucuucucucucugggcuugccagggcucuccgaaccuagcuagcauccucuucaauuccaacuagaaagcuuaccauggagcugcccauccucaagaccaacgccauuacaacuauacuugcugcagugacgcugugcuucgccagcucccagaauaucaccgaagaguuuuaccaaucuacauguucagcggucaguaaaggcuauuugagcgcuuuaagaacugggugguacaccuccguuauuacaaucgaacugucuaacauuaaggagaauaaaugcaacggaaccgacgccaaggugaaacuaaucaagcaggaacucgauaaguauaaaaaugcaguaacugagcugcagcuucugaugcagucgaccccugccgcugguucaggcagcgcaauagccagugggaucgcuguguguaaggucuugcaccucgagggagaagugaacaaaauuaagaaugcccugcuguccacaaacaaagcgguugugucucucagcggcugcggugucuccguguuaacguucaagguacuggaccuuaagaauuacaucgauaaacaauugcugccaauucuaaacaagcagucauguaguaucagcaauauagagacuguuauugaauuucagcagaaaaacaauaggcuccuggagaucacccgggaguucucugugaacgcaggggucacaacuccgguguccaccuauaugcuuacaaauucagaacuguugagccucauuaacgacaugcccaucaccaacgaucaaaagaaacugaugaguaauaacgugcagaucguccgccagcagucuuacuccauuaugugcauaaucaaggaggaaguuuuagccuaugugguacaacugccucucuacggagugauugacacgccauguuggaaacuucauacuagcccccugugcacaaccaauacuaaggagggcucgaacaucuguuugacacgaaccgaucguggcugguacugcgacaaugcugggucugucuccuuuuucccucaggccgaaacguguaaggugcagucaaacagaguguuuugcgauaccaugaauaguagaacacugccaagcgaggugaaccucugcaauauagacauuuucaaccccaaauaugauuguaagaucaugacuuccaaaaccgacgucucuagcucagugaucacaagucugggagcaauuguauccugcuacgguaagacuaaauguaccgcuagcaauaagugcaggggcaucauuaagacauuuucuaacgggugugauuauguuucaaauaaaggaguggacaccgucagugugggcaacacucuuuacuaugucaauaagcaagaggguaaaagccuguacgugaagggggaaccuauaaucaacuucuaugacccauugguuuuuccguccgaugaguucgacgccucuauuucgcagguuaacgagaaaaucaaucagagccucgcguuuauccggaaguccgaugaacuguuacacaacguaaaugucggaaagucaacgacaaacauuaugauaaccacuaucauuaucgugauuaucguuauacugcuacuccugaucgccgugggccuuuucuuguacugcaaagcacgcaguacccccgucacacugucuaaggaccagcucagcggcauuaauaacaucgcuuucuccaauugaggacuaguguccaccugucccuccugggcugcuggauugucucguuuuccugccaaauaaacaggaucagcgcuuuacagaucuaaaaaaaaaaaaaaaaaaaaaaaaaaaaaaaaaaaaaaaaaaaaaaaaaaaaaaaaaaaaaaaaugcaucccccccccccccccccccccccccccccccaaaggcucuuuucagagccaccagaauu

SEQ ID NO: 17233 - RNA, 1997 nt, Artificial Sequence
  mRNA product Design i-1 comprising derived and/or modified sequence from HRSV(Memphis-37)__AIY60640.1__F_DSCav1_mut5 (opt4)
gggagagggcgcuuggcuugcaaggacccugagcugcggcauugaagcacacccaacccaacucgacugaagucagccucacugaaccggaucugagaaucuucucucucugggcuugccagggcucuccgaaccuagcuagcauccucuucaauuccaacuagaaagcuuaccauggagcugcccauccugaagaccaacgccaucaccaccauccuggccgccgugacccugugcuucgccagcagccagaacaucaccgaggaguucuaccagagcaccugcagcgccgugagcaagggcuaccugagcgcccugagaaccggcugguacaccagcgugaucaccaucgagcugagcaacaucaaggagaacaagugcaacggcaccgacgccaaggugaagcugaucaagcaggagcuggacaaguacaagaacgccgugaccgagcugcagcugcugaugcagagcacccccgccgccggcagcggcagcgccaucgccagcggcaucgccgugugcaaggugcugcaccuggagggcgaggugaacaagaucaagaacgcccugcugagcaccaacaaggccguggugagccugagcggcugcggcgugagcgugcugaccuucaaggugcuggaccugaagaacuacaucgacaagcagcugcugcccauccugaacaagcagagcugcagcaucagcaacaucgagaccgugaucgaguuccagcagaagaacaacagacugcuggagaucaccagagaguucagcgugaacgccggcgugaccacccccgugagcaccuacaugcugaccaacagcgagcugcugagccugaucaacgacaugcccaucaccaacgaccagaagaagcugaugagcaacaacgugcagaucgugagacagcagagcuacagcaucaugugcaucaucaaggaggaggugcuggccuacguggugcagcugccccuguacggcgugaucgacacccccugcuggaagcugcacaccagcccccugugcaccaccaacaccaaggagggcagcaacaucugccugaccagaaccgacagaggcugguacugcgacaacgccggcagcgugagcuucuucccccaggccgagaccugcaaggugcagagcaacagaguguucugcgacaccaugaacagcagaacccugcccagcgaggugaaccugugcaacaucgacaucuucaaccccaaguacgacugcaagaucaugaccagcaagaccgacgugagcagcagcgugaucaccagccugggcgccaucgugagcugcuacggcaagaccaagugcaccgccagcaacaagugcagaggcaucaucaagaccuucagcaacggcugcgacuacgugagcaacaagggcguggacaccgugagcgugggcaacacccuguacuacgugaacaagcaggagggcaagagccuguacgugaagggcgagcccaucaucaacuucuacgacccccugguguuccccagcgacgaguucgacgccagcaucagccaggugaacgagaagaucaaccagagccuggccuucaucagaaagagcgacgagcugcugcacaacgugaacgugggcaagagcaccaccaacaucaugaucaccaccaucaucaucgugaucaucgugauccugcugcugcugaucgccgugggccuguuccuguacugcaaggccagaagcacccccgugacccugagcaaggaccagcugagcggcaucaacaacaucgccuucagcaacugaggacuaguguccaccugucccuccugggcugcuggauugucucguuuuccugccaaauaaacaggaucagcgcuuuacagaucuaaaaaaaaaaaaaaaaaaaaaaaaaaaaaaaaaaaaaaaaaaaaaaaaaaaaaaaaaaaaaaaaugcaucccccccccccccccccccccccccccccccaaaggcucuuuucagagccaccagaauu

SEQ ID NO: 17234 - RNA, 1997 nt, Artificial Sequence
  mRNA product Design i-1 comprising derived and/or modified sequence from HRSV(Memphis-37)__AIY60640.1__F_DSCav1_mut5 (opt5)
gggagagggcgcuuggcuugcaaggacccugagcugcggcauugaagcacacccaacccaacucgacugaagucagccucacugaaccggaucugagaaucuucucucucugggcuugccagggcucuccgaaccuagcuagcauccucuucaauuccaacuagaaagcuuaccauggagcugcccauccucaagaccaacgccauuacaacgauccuggcugccgugacccuuugcuucgcgagcucccagaauauuacagaagaguuuuaccaaucuaccuguagcgcugucuccaaaggcuaucugucugcccucagaacagggugguacaccagcguuaucacaauugaacuguccaacaucaaggagaauaaaugcaacggaaccgacgccaaggugaaacuuaucaagcaggaacuggauaaguauaaaaaugcugugacggagcuccagcugcugaugcagucuaccccugccgcuggcagcggguccgccauugcgagcggaaucgccgucuguaaggugcuccaccuggagggcgaaguuaacaaaauuaagaaugcccuucugucuacaaacaaagcuguggucucccucagcgggugcggagugucuguucugaccuucaaggugcuugaccugaagaauuacaucgauaaacaacuccugccgauucugaacaagcaguccuguagcaucucuaauauugagacagucaucgaauuucagcagaaaaacaaucggcuccuggagaucacccgcgaguucuccgugaacgcuggcgugacgacacccgucagcaccuauaugcuuacaaauuccgaacugcucucucugauuaacgacaugccuaucaccaacgaucaaaagaaacuuaugagcaauaacguucagauugugagacagcaguccuacagcaucaugugcauuaucaaggaggaagugcuggccuaugucgugcaacucccccuguacggcguuaucgacaccccuuguuggaaacugcauacaucuccccucugcacgaccaauacaaaggagggguccaacauuugucugacccggacagaucgcggaugguacugcgacaaugcgggcagcgugagcuuuuucccucaggccgaaaccuguaagguccagucuaacagaguguuuugcgauacgaugaacuccagaacacugccgucugagguuaaucucugcaauaucgacauuuucaaccccaaauaugauuguaagaucaugaccagcaaaaccgacguguccagcucugucauuacaucccugggggcuaucgugagcugcuacggaaagaccaaauguacagccucuaauaagugccggggcaucauuaagacguuuuccaacgggugugauuaugucagcaauaaaggaguggacaccguuuccgugggcaacacacuuuacuaugucaauaagcaagagggcaaaucucuguacgugaagggggaaccuaucauuaacuucuaugacccccucguuuuuccuagcgaugaguucgacgcuuccaucucucaggugaacgagaaaauuaaucagagccuggccuuuauccgcaaguccgaugaacugcuccacaacgucaaugugggaaagagcaccacaaacauuaugaucaccacgaucauuaucgugauuaucguuauucugcuucugcucaucgccgucggccuguuccuguacugcaaagcuagaucuacccccgugacacuuuccaaggaccagcucagcgggaucaauaacauugcguucucuaauugaggacuaguguccaccugucccuccugggcugcuggauugucucguuuuccugccaaauaaacaggaucagcgcuuuacagaucuaaaaaaaaaaaaaaaaaaaaaaaaaaaaaaaaaaaaaaaaaaaaaaaaaaaaaaaaaaaaaaaaugcaucccccccccccccccccccccccccccccccaaaggcucuuuucagagccaccagaauu

SEQ ID NO: 17235 - RNA, 1997 nt, Artificial Sequence
  mRNA product Design i-1 comprising derived and/or modified sequence from HRSV(Memphis-37)__AIY60640.1__F_DSCav1_mut5 (opt6)
gggagagggcgcuuggcuugcaaggacccugagcugcggcauugaagcacacccaacccaacucgacugaagucagccucacugaaccggaucugagaaucuucucucucugggcuugccagggcucuccgaaccuagcuagcauccucuucaauuccaacuagaaagcuuaccauggaacucccaaucuuaaaaacaaacgcaauaacuacaauacucgcagcaguaacacuaugcuucgcaucaucacaaaacauaaccgaagaauuuuaccaaaguacaugcucagcaguaucaaaagguuaccucucagcccuaagaaccggaugguacacaucaguaaucacuauagaacuauccaauauaaaagaaaacaaaugcaacggcacugacgcaaaaguuaaauuaauuaaacaagaacucgauaaauauaaaaaugcaguaacagaacuacaacuacuaaugcaaagcaccccagcugcaggaagcggaucagcaaucgcaucaggaauagcaguauguaaaguacuacaccuagaaggagaagucaacaaaaucaaaaaugcacuacuaaguacaaacaaagcuguaguaagccuaucagguugcggaguaucaguauuaacauuuaaaguccucgaccuaaaaaauuacauagauaaacaacucuuaccaauacucaauaaacaaaguugcagcaucagcaacauagaaacagucaucgaauuucaacaaaaaaauaauagacuccuagaaauaacacgugaauuuucaguaaaugcuggaguaacaacaccaguaucuacauauaugcuaacaaauagcgaacuacucucacuuauuaacgauaugcccauaacaaacgaccaaaaaaaacuuaugucaaacaauguucaaauaguuagacaacaauccuacagcauaaugugcauaaucaaagaagaaguucuagcuuacguaguacaacuaccacucuaugguguuaucgacacccccuguuggaaacuucacacaucaccacuaugcacaacaaacacaaaagaaggaucaaauauuugcuuaacaagaacagauagaggaugguauugcgauaaugccggaucaguaucauuuuuuccacaagcagaaacauguaaaguacaauccaaccgaguauuuugcgacaccaugaacuccagaacacuaccaucugaagucaaccuauguaauauagauauauuuaacccaaaauaugacuguaaaaucaugacaucaaaaacugauguaaguucuaguguaauaaccagcuuaggcgccauaguaagcuguuacgguaaaacaaaaugcacagcaagcaacaaaugccgcgguauaauaaaaacauucucaaacggaugcgauuauguaaguaacaaaggaguagauacagucuccguaggcaacacauuauacuacguaaacaaacaagaaggaaaaucacuauauguaaaaggagaaccaaucauaaauuucuacgacccacuuguauuccccagcgacgaauuugaugcuuccauuucacaagucaacgaaaaaauaaaccaaucauuagccuucauaagaaaaucagacgaauuauuacauaauguuaaugucggcaaauccacaacuaauauaaugauaacaacaaucauaauaguaauaaucguuauacuacuauuacucauagcaguaggacucuucuuauauuguaaagccagauccaccccaguaacacucucaaaagaccaauuaucaggaauuaauaacaucgcauuuucaaacuaaggacuaguguccaccugucccuccugggcugcuggauugucucguuuuccugccaaauaaacaggaucagcgcuuuacagaucuaaaaaaaaaaaaaaaaaaaaaaaaaaaaaaaaaaaaaaaaaaaaaaaaaaaaaaaaaaaaaaaaugcaucccccccccccccccccccccccccccccccaaaggcucuuuucagagccaccagaauu

SEQ ID NO: 17236 - RNA, 1997 nt, Artificial Sequence
  mRNA product Design i-1 comprising derived and/or modified sequence from HRSV(Memphis-37)__AIY60640.1__F_DSCav1_mut5 (opt11)
gggagagggcgcuuggcuugcaaggacccugagcugcggcauugaagcacacccaacccaacucgacugaagucagccucacugaaccggaucugagaaucuucucucucugggcuugccagggcucuccgaaccuagcuagcauccucuucaauuccaacuagaaagcuuaccauggaacuccccauccuuaaaaccaacgcaaucaccacaauacucgccgccgucacccucugcuuugcguccucccagaacaucaccgaagaguucuaccaaucgaccugcagcgccgucagcaagggcuaccucucagcccuccgaacaggcugguacacauccgucaucaccaucgaacucucaaacauaaaagaaaacaaguguaacggcaccgacgcgaaaguuaaacucaucaaacaagaacucgauaaauacaaaaacgcaguaaccgaacuacaacuccuaaugcaauccacacccgcagccggcagcggcuccgcaaucgccuccggcauagcagucugcaaaguccuccaccucgaaggagaagucaauaaaaucaaaaacgcccuccuauccaccaacaaagcgguugucucccuguccggaugcggaguuagcguccuaaccuucaaggugcucgaccucaaaaacuacauagacaaacaacuacuccccauacucaacaaacaaucaugcuccaucagcaacaucgagaccgucaucgaguuccaacagaaaaacaaccgccuccucgaaaucacacgagaguucuccguaaacgccggcgucacaacccccguuuccacuuacaugcucacaaacagcgaacuccucucccucaucaacgacaugccaaucaccaacgaccaaaagaaacucauguccaacaacguccaaaucguccgccaacaaagcuacagcauaaugugcaucauaaaagaagaaguacucgcguacguaguccaacuaccccuauacggcgucaucgacacccccugcuggaaacugcacacuucuccccucuguacaaccaacacuaaagaaggcucgaacaucugccucaccagaacagaccgaggaugguacugcgacaacgccggcuccgucagcuucuucccccaggccgaaacaugcaaaguacaaucaaaccgagucuucugcgacacaaugaacagcagaacucuacccuccgaaguuaaccuaugcaacaucgacaucuucaaccccaaauacgacugcaaaauaaugaccucaaaaacagacguguccagcuccguuaucaccucucucggagccaucguauccuguuauggaaaaaccaaaugcaccgccucaaacaaaugccgaggcauaaucaaaacauucucaaauggaugcgacuacguauccaacaaaggagucgacaccgucagcgugggcaauacccucuacuacgucaacaaacaggaagggaaaucccucuauguaaagggcgagcccauuauuaacuucuaugacccccucguguucccaagcgacgaguucgacgccuccauaucacaagucaaugagaaaaucaaccaaucacuagcuuucauucgcaaauccgacgaacuccuucacaacgucaacgucggcaaauccaccaccaacaucaugaucaccaccauaauuaucgucauuaucgucauacuacuccuacucaucgccgucggccucuuccucuauugcaaagcacgcucgacacccgucacccuuucaaaagaccaacuuuccggcauaaacaacauagccuucagcaacuagggacuaguguccaccugucccuccugggcugcuggauugucucguuuuccugccaaauaaacaggaucagcgcuuuacagaucuaaaaaaaaaaaaaaaaaaaaaaaaaaaaaaaaaaaaaaaaaaaaaaaaaaaaaaaaaaaaaaaaugcaucccccccccccccccccccccccccccccccaaaggcucuuuucagagccaccagaauu

SEQ ID NO: 17237 - RNA, 1997 nt, Artificial Sequence
  mRNA product Design i-2 comprising derived and/or modified sequence from HRSV(Memphis-37)__AIY60640.1__F_DSCav1_mut5 (opt1)
gggagaggcgcugccuacggagguggcagccaucuccuucucggcaucaagcuuaccauggagcugcccauccucaagaccaacgccaucaccacgauccuggccgcggugacccugugcuucgccagcucccagaacaucaccgaggaguucuaccagagcacgugcuccgccgucagcaagggcuaccucuccgcccugcgcaccgggugguacaccagcgugaucaccaucgagcuguccaacaucaaggagaacaagugcaacggcaccgacgccaaggugaagcucaucaagcaggagcuggacaaguacaagaacgcggucacggagcugcagcuccugaugcagagcaccccggccgccggcuccgggagcgcgaucgccuccggcaucgccgucugcaaggugcugcaccucgagggcgaggugaacaagaucaagaacgcccugcuguccaccaacaaggccgucgugagccucuccggcugcggggugagcguccugaccuucaaggugcuggaccucaagaacuacaucgacaagcagcugcugcccauccugaacaagcagagcugcuccaucagcaacaucgagaccgucaucgaguuccagcagaagaacaaccgccuccuggagaucacgcgggaguucagcgugaacgcgggcgugaccacccccgucuccaccuacaugcugacgaacagcgagcuccugucccugaucaacgacaugccgaucaccaacgaccagaagaagcucaugagcaacaacgugcagaucgugcgccagcaguccuacagcaucaugugcaucaucaaggaggagguccuggccuacguggugcagcugccccucuacggggucaucgacacccccugcuggaagcugcacaccagcccccugugcacgaccaacaccaaggagggcuccaacaucugccucacccggacggaccgcgggugguacugcgacaacgccggcagcguguccuucuucccgcaggccgagaccugcaagguccagagcaaccggguguucugcgacaccaugaacucccggacccugcccagcgaggugaaccucugcaacaucgacaucuucaaccccaaguacgacugcaagaucaugacguccaagaccgacgucagcuccagcgugaucaccucccugggcgccaucgugagcugcuacgggaagaccaagugcacggcgagcaacaagugccgcggcaucaucaagaccuucuccaacgggugcgacuacgucagcaacaagggcguggacaccguguccgucggcaacacccuguacuacgugaacaagcaggagggcaagagccucuacgugaagggggagcccaucaucaacuucuacgacccgcuggucuuccccuccgacgaguucgacgccagcaucucccaggugaacgagaagaucaaccagagccuggccuucauccggaaguccgacgagcuccugcacaacgugaacgucggcaagagcaccacgaacaucaugaucaccaccaucaucaucgugaucaucgugauccugcugcuccugaucgccgucgggcuguuccucuacugcaaggcccgcuccacccccgugacgcugagcaaggaccagcuguccgggaucaacaacaucgcguucagcaacugaggacuagugcaucacauuuaaaagcaucucagccuaccaugagaauaagagaaagaaaaugaagaucaauagcuuauucaucucuuuuucuuuuucguugguguaaagccaacacccugucuaaaaaacauaaauuucuuuaaucauuuugccucuuuucucugugcuucaauuaauaaaaaauggaaagaaccuagaucuaaaaaaaaaaaaaaaaaaaaaaaaaaaaaaaaaaaaaaaaaaaaaaaaaaaaaaaaaaaaaaaaugcaucccccccccccccccccccccccccccccccaaaggcucuuuucagagccaccagaauu

SEQ ID NO: 17238 - RNA, 1997 nt, Artificial Sequence
  mRNA product Design i-2 comprising derived and/or modified sequence from HRSV(Memphis-37)__AIY60640.1__F_DSCav1_mut5 (opt1)
gggagaggcgcugccuacggagguggcagccaucuccuucucggcaucaagcuuaccauggagcugcccauccucaagaccaacgccaucaccacgauccuggccgcggugacccugugcuucgccagcucccagaacaucaccgaggaguucuaccagagcacgugcuccgccgucagcaagggcuaccucuccgcccugcgcaccgggugguacaccagcgugaucaccaucgagcuguccaacaucaaggagaacaagugcaacggcaccgacgccaaggugaagcucaucaagcaggagcuggacaaguacaagaacgcggucacggagcugcagcuccugaugcagagcaccccggccgccggguccggcagcgccaucgcguccgggaucgccgugugcaaggugcugcaccucgagggcgaggucaacaagaucaagaacgcccugcugagcaccaacaaggccguggugucccucagcggcugcggggucuccgugcugaccuucaaggugcuggaccucaagaacuacaucgacaagcagcugcugcccauccucaacaagcagagcugcuccaucagcaacaucgagacggucaucgaguuccagcagaagaacaaccggcugcuggagaucacccgcgaguucuccgugaacgccggcgugaccacccccgucagcacguacaugcucaccaacagcgagcugcugucccucaucaacgacaugcccaucaccaacgaccagaagaagcugaugagcaacaacgugcagaucgugcggcagcaguccuacagcaucaugugcaucaucaaggaggagguccuggcguacguggugcagcucccgcuguacggggucaucgacacccccugcuggaagcugcacacgagcccccucugcaccaccaacaccaaggagggcuccaacaucugccugacgcgcaccgaccgggggugguacugcgacaacgccggcuccgugagcuucuucccccaggccgagaccugcaaggugcaguccaaccgcgucuucugcgacaccaugaacagccggacgcucccguccgaggugaaccugugcaacaucgacaucuucaaccccaaguacgacugcaagaucaugaccagcaagaccgacgucuccagcuccgugaucaccagccugggcgccaucguguccugcuacgggaagacgaagugcaccgccagcaacaagugccggggcaucaucaagaccuucuccaacgggugcgacuacgucagcaacaagggcguggacaccgugagcgucggcaacacgcucuacuacgugaacaagcaggaggggaagucccuguacgugaagggcgagcccaucaucaacuucuacgacccccuggucuucccgagcgacgaguucgacgcguccaucagccaggugaacgagaagaucaaccagucccucgccuucauccgcaagagcgacgagcugcugcacaacgugaacgucgggaaguccaccaccaacaucaugaucaccaccaucaucaucgugaucaucgugauccuccugcugcucaucgccgucggccuguuccuguacugcaaggcccggagcacgcccgugacccuguccaaggaccagcucagcgggaucaacaacaucgccuucuccaacugaggacuagugcaucacauuuaaaagcaucucagccuaccaugagaauaagagaaagaaaaugaagaucaauagcuuauucaucucuuuuucuuuuucguugguguaaagccaacacccugucuaaaaaacauaaauuucuuuaaucauuuugccucuuuucucugugcuucaauuaauaaaaaauggaaagaaccuagaucuaaaaaaaaaaaaaaaaaaaaaaaaaaaaaaaaaaaaaaaaaaaaaaaaaaaaaaaaaaaaaaaaugcaucccccccccccccccccccccccccccccccaaaggcucuuuucagagccaccagaauu

SEQ ID NO: 17239 - RNA, 1997 nt, Artificial Sequence
  mRNA product Design i-2 comprising derived and/or modified sequence from HRSV(Memphis-37)__AIY60640.1__F_DSCav1_mut5 (opt2)
gggagaggcgcugccuacggagguggcagccaucuccuucucggcaucaagcuuaccauggagcuccccauccucaagaccaacgccaucaccaccauccucgccgccgucacccucugcuucgccuccucccagaacaucaccgaggaguucuaccaguccaccugcuccgccgucuccaagggcuaccucuccgcccuccgcaccggcugguacaccuccgucaucaccaucgagcucuccaacaucaaggagaacaagugcaacggcaccgacgccaaggucaagcucaucaagcaggagcucgacaaguacaagaacgccgucaccgagcuccagcuccucaugcaguccacccccgccgccggcuccggcuccgccaucgccuccggcaucgccgucugcaagguccuccaccucgagggcgaggucaacaagaucaagaacgcccuccucuccaccaacaaggccgucgucucccucuccggcugcggcgucuccguccucaccuucaagguccucgaccucaagaacuacaucgacaagcagcuccuccccauccucaacaagcaguccugcuccaucuccaacaucgagaccgucaucgaguuccagcagaagaacaaccgccuccucgagaucacccgcgaguucuccgucaacgccggcgucaccacccccgucuccaccuacaugcucaccaacuccgagcuccucucccucaucaacgacaugcccaucaccaacgaccagaagaagcucauguccaacaacguccagaucguccgccagcaguccuacuccaucaugugcaucaucaaggaggagguccucgccuacgucguccagcucccccucuacggcgucaucgacacccccugcuggaagcuccacaccuccccccucugcaccaccaacaccaaggagggcuccaacaucugccucacccgcaccgaccgcggcugguacugcgacaacgccggcuccgucuccuucuucccccaggccgagaccugcaagguccaguccaaccgcgucuucugcgacaccaugaacucccgcacccuccccuccgaggucaaccucugcaacaucgacaucuucaaccccaaguacgacugcaagaucaugaccuccaagaccgacgucuccuccuccgucaucaccucccucggcgccaucgucuccugcuacggcaagaccaagugcaccgccuccaacaagugccgcggcaucaucaagaccuucuccaacggcugcgacuacgucuccaacaagggcgucgacaccgucuccgucggcaacacccucuacuacgucaacaagcaggagggcaagucccucuacgucaagggcgagcccaucaucaacuucuacgacccccucgucuuccccuccgacgaguucgacgccuccaucucccaggucaacgagaagaucaaccagucccucgccuucauccgcaaguccgacgagcuccuccacaacgucaacgucggcaaguccaccaccaacaucaugaucaccaccaucaucaucgucaucaucgucauccuccuccuccucaucgccgucggccucuuccucuacugcaaggcccgcuccacccccgucacccucuccaaggaccagcucuccggcaucaacaacaucgccuucuccaacugaggacuagugcaucacauuuaaaagcaucucagccuaccaugagaauaagagaaagaaaaugaagaucaauagcuuauucaucucuuuuucuuuuucguugguguaaagccaacacccugucuaaaaaacauaaauuucuuuaaucauuuugccucuuuucucugugcuucaauuaauaaaaaauggaaagaaccuagaucuaaaaaaaaaaaaaaaaaaaaaaaaaaaaaaaaaaaaaaaaaaaaaaaaaaaaaaaaaaaaaaaaugcaucccccccccccccccccccccccccccccccaaaggcucuuuucagagccaccagaauu

SEQ ID NO: 17240 - RNA, 1997 nt, Artificial Sequence
  mRNA product Design i-2 comprising derived and/or modified sequence from HRSV(Memphis-37)__AIY60640.1__F_DSCav1_mut5 (opt3)
gggagaggcgcugccuacggagguggcagccaucuccuucucggcaucaagcuuaccauggagcugcccauccucaagaccaacgccauuacaacuauacuugcugcagugacgcugugcuucgccagcucccagaauaucaccgaagaguuuuaccaaucuacauguucagcggucaguaaaggcuauuugagcgcuuuaagaacugggugguacaccuccguuauuacaaucgaacugucuaacauuaaggagaauaaaugcaacggaaccgacgccaaggugaaacuaaucaagcaggaacucgauaaguauaaaaaugcaguaacugagcugcagcuucugaugcagucgaccccugccgcugguucaggcagcgcaauagccagugggaucgcuguguguaaggucuugcaccucgagggagaagugaacaaaauuaagaaugcccugcuguccacaaacaaagcgguugugucucucagcggcugcggugucuccguguuaacguucaagguacuggaccuuaagaauuacaucgauaaacaauugcugccaauucuaaacaagcagucauguaguaucagcaauauagagacuguuauugaauuucagcagaaaaacaauaggcuccuggagaucacccgggaguucucugugaacgcaggggucacaacuccgguguccaccuauaugcuuacaaauucagaacuguugagccucauuaacgacaugcccaucaccaacgaucaaaagaaacugaugaguaauaacgugcagaucguccgccagcagucuuacuccauuaugugcauaaucaaggaggaaguuuuagccuaugugguacaacugccucucuacggagugauugacacgccauguuggaaacuucauacuagcccccugugcacaaccaauacuaaggagggcucgaacaucuguuugacacgaaccgaucguggcugguacugcgacaaugcugggucugucuccuuuuucccucaggccgaaacguguaaggugcagucaaacagaguguuuugcgauaccaugaauaguagaacacugccaagcgaggugaaccucugcaauauagacauuuucaaccccaaauaugauuguaagaucaugacuuccaaaaccgacgucucuagcucagugaucacaagucugggagcaauuguauccugcuacgguaagacuaaauguaccgcuagcaauaagugcaggggcaucauuaagacauuuucuaacgggugugauuauguuucaaauaaaggaguggacaccgucagugugggcaacacucuuuacuaugucaauaagcaagaggguaaaagccuguacgugaagggggaaccuauaaucaacuucuaugacccauugguuuuuccguccgaugaguucgacgccucuauuucgcagguuaacgagaaaaucaaucagagccucgcguuuauccggaaguccgaugaacuguuacacaacguaaaugucggaaagucaacgacaaacauuaugauaaccacuaucauuaucgugauuaucguuauacugcuacuccugaucgccgugggccuuuucuuguacugcaaagcacgcaguacccccgucacacugucuaaggaccagcucagcggcauuaauaacaucgcuuucuccaauugaggacuagugcaucacauuuaaaagcaucucagccuaccaugagaauaagagaaagaaaaugaagaucaauagcuuauucaucucuuuuucuuuuucguugguguaaagccaacacccugucuaaaaaacauaaauuucuuuaaucauuuugccucuuuucucugugcuucaauuaauaaaaaauggaaagaaccuagaucuaaaaaaaaaaaaaaaaaaaaaaaaaaaaaaaaaaaaaaaaaaaaaaaaaaaaaaaaaaaaaaaaugcaucccccccccccccccccccccccccccccccaaaggcucuuuucagagccaccagaauu

SEQ ID NO: 17241 - RNA, 1997 nt, Artificial Sequence
  mRNA product Design i-2 comprising derived and/or modified sequence from HRSV(Memphis-37)__AIY60640.1__F_DSCav1_mut5 (opt4)
gggagaggcgcugccuacggagguggcagccaucuccuucucggcaucaagcuuaccauggagcugcccauccugaagaccaacgccaucaccaccauccuggccgccgugacccugugcuucgccagcagccagaacaucaccgaggaguucuaccagagcaccugcagcgccgugagcaagggcuaccugagcgcccugagaaccggcugguacaccagcgugaucaccaucgagcugagcaacaucaaggagaacaagugcaacggcaccgacgccaaggugaagcugaucaagcaggagcuggacaaguacaagaacgccgugaccgagcugcagcugcugaugcagagcacccccgccgccggcagcggcagcgccaucgccagcggcaucgccgugugcaaggugcugcaccuggagggcgaggugaacaagaucaagaacgcccugcugagcaccaacaaggccguggugagccugagcggcugcggcgugagcgugcugaccuucaaggugcuggaccugaagaacuacaucgacaagcagcugcugcccauccugaacaagcagagcugcagcaucagcaacaucgagaccgugaucgaguuccagcagaagaacaacagacugcuggagaucaccagagaguucagcgugaacgccggcgugaccacccccgugagcaccuacaugcugaccaacagcgagcugcugagccugaucaacgacaugcccaucaccaacgaccagaagaagcugaugagcaacaacgugcagaucgugagacagcagagcuacagcaucaugugcaucaucaaggaggaggugcuggccuacguggugcagcugccccuguacggcgugaucgacacccccugcuggaagcugcacaccagcccccugugcaccaccaacaccaaggagggcagcaacaucugccugaccagaaccgacagaggcugguacugcgacaacgccggcagcgugagcuucuucccccaggccgagaccugcaaggugcagagcaacagaguguucugcgacaccaugaacagcagaacccugcccagcgaggugaaccugugcaacaucgacaucuucaaccccaaguacgacugcaagaucaugaccagcaagaccgacgugagcagcagcgugaucaccagccugggcgccaucgugagcugcuacggcaagaccaagugcaccgccagcaacaagugcagaggcaucaucaagaccuucagcaacggcugcgacuacgugagcaacaagggcguggacaccgugagcgugggcaacacccuguacuacgugaacaagcaggagggcaagagccuguacgugaagggcgagcccaucaucaacuucuacgacccccugguguuccccagcgacgaguucgacgccagcaucagccaggugaacgagaagaucaaccagagccuggccuucaucagaaagagcgacgagcugcugcacaacgugaacgugggcaagagcaccaccaacaucaugaucaccaccaucaucaucgugaucaucgugauccugcugcugcugaucgccgugggccuguuccuguacugcaaggccagaagcacccccgugacccugagcaaggaccagcugagcggcaucaacaacaucgccuucagcaacugaggacuagugcaucacauuuaaaagcaucucagccuaccaugagaauaagagaaagaaaaugaagaucaauagcuuauucaucucuuuuucuuuuucguugguguaaagccaacacccugucuaaaaaacauaaauuucuuuaaucauuuugccucuuuucucugugcuucaauuaauaaaaaauggaaagaaccuagaucuaaaaaaaaaaaaaaaaaaaaaaaaaaaaaaaaaaaaaaaaaaaaaaaaaaaaaaaaaaaaaaaaugcaucccccccccccccccccccccccccccccccaaaggcucuuuucagagccaccagaauu

SEQ ID NO: 17242 - RNA, 1997 nt, Artificial Sequence
  mRNA product Design i-2 comprising derived and/or modified sequence from HRSV(Memphis-37)__AIY60640.1__F_DSCav1_mut5 (opt5)
gggagaggcgcugccuacggagguggcagccaucuccuucucggcaucaagcuuaccauggagcugcccauccucaagaccaacgccauuacaacgauccuggcugccgugacccuuugcuucgcgagcucccagaauauuacagaagaguuuuaccaaucuaccuguagcgcugucuccaaaggcuaucugucugcccucagaacagggugguacaccagcguuaucacaauugaacuguccaacaucaaggagaauaaaugcaacggaaccgacgccaaggugaaacuuaucaagcaggaacuggauaaguauaaaaaugcugugacggagcuccagcugcugaugcagucuaccccugccgcuggcagcggguccgccauugcgagcggaaucgccgucuguaaggugcuccaccuggagggcgaaguuaacaaaauuaagaaugcccuucugucuacaaacaaagcuguggucucccucagcgggugcggagugucuguucugaccuucaaggugcuugaccugaagaauuacaucgauaaacaacuccugccgauucugaacaagcaguccuguagcaucucuaauauugagacagucaucgaauuucagcagaaaaacaaucggcuccuggagaucacccgcgaguucuccgugaacgcuggcgugacgacacccgucagcaccuauaugcuuacaaauuccgaacugcucucucugauuaacgacaugccuaucaccaacgaucaaaagaaacuuaugagcaauaacguucagauugugagacagcaguccuacagcaucaugugcauuaucaaggaggaagugcuggccuaugucgugcaacucccccuguacggcguuaucgacaccccuuguuggaaacugcauacaucuccccucugcacgaccaauacaaaggagggguccaacauuugucugacccggacagaucgcggaugguacugcgacaaugcgggcagcgugagcuuuuucccucaggccgaaaccuguaagguccagucuaacagaguguuuugcgauacgaugaacuccagaacacugccgucugagguuaaucucugcaauaucgacauuuucaaccccaaauaugauuguaagaucaugaccagcaaaaccgacguguccagcucugucauuacaucccugggggcuaucgugagcugcuacggaaagaccaaauguacagccucuaauaagugccggggcaucauuaagacguuuuccaacgggugugauuaugucagcaauaaaggaguggacaccguuuccgugggcaacacacuuuacuaugucaauaagcaagagggcaaaucucuguacgugaagggggaaccuaucauuaacuucuaugacccccucguuuuuccuagcgaugaguucgacgcuuccaucucucaggugaacgagaaaauuaaucagagccuggccuuuauccgcaaguccgaugaacugcuccacaacgucaaugugggaaagagcaccacaaacauuaugaucaccacgaucauuaucgugauuaucguuauucugcuucugcucaucgccgucggccuguuccuguacugcaaagcuagaucuacccccgugacacuuuccaaggaccagcucagcgggaucaauaacauugcguucucuaauugaggacuagugcaucacauuuaaaagcaucucagccuaccaugagaauaagagaaagaaaaugaagaucaauagcuuauucaucucuuuuucuuuuucguugguguaaagccaacacccugucuaaaaaacauaaauuucuuuaaucauuuugccucuuuucucugugcuucaauuaauaaaaaauggaaagaaccuagaucuaaaaaaaaaaaaaaaaaaaaaaaaaaaaaaaaaaaaaaaaaaaaaaaaaaaaaaaaaaaaaaaaugcaucccccccccccccccccccccccccccccccaaaggcucuuuucagagccaccagaauu

SEQ ID NO: 17243 - RNA, 1997 nt, Artificial Sequence
  mRNA product Design i-2 comprising derived and/or modified sequence from HRSV(Memphis-37)__AIY60640.1__F_DSCav1_mut5 (opt6)
gggagaggcgcugccuacggagguggcagccaucuccuucucggcaucaagcuuaccauggaacucccaaucuuaaaaacaaacgcaauaacuacaauacucgcagcaguaacacuaugcuucgcaucaucacaaaacauaaccgaagaauuuuaccaaaguacaugcucagcaguaucaaaagguuaccucucagcccuaagaaccggaugguacacaucaguaaucacuauagaacuauccaauauaaaagaaaacaaaugcaacggcacugacgcaaaaguuaaauuaauuaaacaagaacucgauaaauauaaaaaugcaguaacagaacuacaacuacuaaugcaaagcaccccagcugcaggaagcggaucagcaaucgcaucaggaauagcaguauguaaaguacuacaccuagaaggagaagucaacaaaaucaaaaaugcacuacuaaguacaaacaaagcuguaguaagccuaucagguugcggaguaucaguauuaacauuuaaaguccucgaccuaaaaaauuacauagauaaacaacucuuaccaauacucaauaaacaaaguugcagcaucagcaacauagaaacagucaucgaauuucaacaaaaaaauaauagacuccuagaaauaacacgugaauuuucaguaaaugcuggaguaacaacaccaguaucuacauauaugcuaacaaauagcgaacuacucucacuuauuaacgauaugcccauaacaaacgaccaaaaaaaacuuaugucaaacaauguucaaauaguuagacaacaauccuacagcauaaugugcauaaucaaagaagaaguucuagcuuacguaguacaacuaccacucuaugguguuaucgacacccccuguuggaaacuucacacaucaccacuaugcacaacaaacacaaaagaaggaucaaauauuugcuuaacaagaacagauagaggaugguauugcgauaaugccggaucaguaucauuuuuuccacaagcagaaacauguaaaguacaauccaaccgaguauuuugcgacaccaugaacuccagaacacuaccaucugaagucaaccuauguaauauagauauauuuaacccaaaauaugacuguaaaaucaugacaucaaaaacugauguaaguucuaguguaauaaccagcuuaggcgccauaguaagcuguuacgguaaaacaaaaugcacagcaagcaacaaaugccgcgguauaauaaaaacauucucaaacggaugcgauuauguaaguaacaaaggaguagauacagucuccguaggcaacacauuauacuacguaaacaaacaagaaggaaaaucacuauauguaaaaggagaaccaaucauaaauuucuacgacccacuuguauuccccagcgacgaauuugaugcuuccauuucacaagucaacgaaaaaauaaaccaaucauuagccuucauaagaaaaucagacgaauuauuacauaauguuaaugucggcaaauccacaacuaauauaaugauaacaacaaucauaauaguaauaaucguuauacuacuauuacucauagcaguaggacucuucuuauauuguaaagccagauccaccccaguaacacucucaaaagaccaauuaucaggaauuaauaacaucgcauuuucaaacuaaggacuagugcaucacauuuaaaagcaucucagccuaccaugagaauaagagaaagaaaaugaagaucaauagcuuauucaucucuuuuucuuuuucguugguguaaagccaacacccugucuaaaaaacauaaauuucuuuaaucauuuugccucuuuucucugugcuucaauuaauaaaaaauggaaagaaccuagaucuaaaaaaaaaaaaaaaaaaaaaaaaaaaaaaaaaaaaaaaaaaaaaaaaaaaaaaaaaaaaaaaaugcaucccccccccccccccccccccccccccccccaaaggcucuuuucagagccaccagaauu

SEQ ID NO: 17244 - RNA, 1997 nt, Artificial Sequence
  mRNA product Design i-2 comprising derived and/or modified sequence from HRSV(Memphis-37)__AIY60640.1__F_DSCav1_mut5 (opt11)
gggagaggcgcugccuacggagguggcagccaucuccuucucggcaucaagcuuaccauggaacuccccauccuuaaaaccaacgcaaucaccacaauacucgccgccgucacccucugcuuugcguccucccagaacaucaccgaagaguucuaccaaucgaccugcagcgccgucagcaagggcuaccucucagcccuccgaacaggcugguacacauccgucaucaccaucgaacucucaaacauaaaagaaaacaaguguaacggcaccgacgcgaaaguuaaacucaucaaacaagaacucgauaaauacaaaaacgcaguaaccgaacuacaacuccuaaugcaauccacacccgcagccggcagcggcuccgcaaucgccuccggcauagcagucugcaaaguccuccaccucgaaggagaagucaauaaaaucaaaaacgcccuccuauccaccaacaaagcgguugucucccuguccggaugcggaguuagcguccuaaccuucaaggugcucgaccucaaaaacuacauagacaaacaacuacuccccauacucaacaaacaaucaugcuccaucagcaacaucgagaccgucaucgaguuccaacagaaaaacaaccgccuccucgaaaucacacgagaguucuccguaaacgccggcgucacaacccccguuuccacuuacaugcucacaaacagcgaacuccucucccucaucaacgacaugccaaucaccaacgaccaaaagaaacucauguccaacaacguccaaaucguccgccaacaaagcuacagcauaaugugcaucauaaaagaagaaguacucgcguacguaguccaacuaccccuauacggcgucaucgacacccccugcuggaaacugcacacuucuccccucuguacaaccaacacuaaagaaggcucgaacaucugccucaccagaacagaccgaggaugguacugcgacaacgccggcuccgucagcuucuucccccaggccgaaacaugcaaaguacaaucaaaccgagucuucugcgacacaaugaacagcagaacucuacccuccgaaguuaaccuaugcaacaucgacaucuucaaccccaaauacgacugcaaaauaaugaccucaaaaacagacguguccagcuccguuaucaccucucucggagccaucguauccuguuauggaaaaaccaaaugcaccgccucaaacaaaugccgaggcauaaucaaaacauucucaaauggaugcgacuacguauccaacaaaggagucgacaccgucagcgugggcaauacccucuacuacgucaacaaacaggaagggaaaucccucuauguaaagggcgagcccauuauuaacuucuaugacccccucguguucccaagcgacgaguucgacgccuccauaucacaagucaaugagaaaaucaaccaaucacuagcuuucauucgcaaauccgacgaacuccuucacaacgucaacgucggcaaauccaccaccaacaucaugaucaccaccauaauuaucgucauuaucgucauacuacuccuacucaucgccgucggccucuuccucuauugcaaagcacgcucgacacccgucacccuuucaaaagaccaacuuuccggcauaaacaacauagccuucagcaacuagggacuagugcaucacauuuaaaagcaucucagccuaccaugagaauaagagaaagaaaaugaagaucaauagcuuauucaucucuuuuucuuuuucguugguguaaagccaacacccugucuaaaaaacauaaauuucuuuaaucauuuugccucuuuucucugugcuucaauuaauaaaaaauggaaagaaccuagaucuaaaaaaaaaaaaaaaaaaaaaaaaaaaaaaaaaaaaaaaaaaaaaaaaaaaaaaaaaaaaaaaaugcaucccccccccccccccccccccccccccccccaaaggcucuuuucagagccaccagaauu

SEQ ID NO: 17245 - RNA, 1993 nt, Artificial Sequence
  mRNA product Design i-2 comprising derived and/or modified sequence from HRSV(Memphis-37)__AIY60640.1__F_DSCav1_mut5 (opt1)
ggggcgcugccuacggagguggcagccaucuccuucucggcaucaagcuuaccauggagcugcccauccucaagaccaacgccaucaccacgauccuggccgcggugacccugugcuucgccagcucccagaacaucaccgaggaguucuaccagagcacgugcuccgccgucagcaagggcuaccucuccgcccugcgcaccgggugguacaccagcgugaucaccaucgagcuguccaacaucaaggagaacaagugcaacggcaccgacgccaaggugaagcucaucaagcaggagcuggacaaguacaagaacgcggucacggagcugcagcuccugaugcagagcaccccggccgccggcuccgggagcgcgaucgccuccggcaucgccgucugcaaggugcugcaccucgagggcgaggugaacaagaucaagaacgcccugcuguccaccaacaaggccgucgugagccucuccggcugcggggugagcguccugaccuucaaggugcuggaccucaagaacuacaucgacaagcagcugcugcccauccugaacaagcagagcugcuccaucagcaacaucgagaccgucaucgaguuccagcagaagaacaaccgccuccuggagaucacgcgggaguucagcgugaacgcgggcgugaccacccccgucuccaccuacaugcugacgaacagcgagcuccugucccugaucaacgacaugccgaucaccaacgaccagaagaagcucaugagcaacaacgugcagaucgugcgccagcaguccuacagcaucaugugcaucaucaaggaggagguccuggccuacguggugcagcugccccucuacggggucaucgacacccccugcuggaagcugcacaccagcccccugugcacgaccaacaccaaggagggcuccaacaucugccucacccggacggaccgcgggugguacugcgacaacgccggcagcguguccuucuucccgcaggccgagaccugcaagguccagagcaaccggguguucugcgacaccaugaacucccggacccugcccagcgaggugaaccucugcaacaucgacaucuucaaccccaaguacgacugcaagaucaugacguccaagaccgacgucagcuccagcgugaucaccucccugggcgccaucgugagcugcuacgggaagaccaagugcacggcgagcaacaagugccgcggcaucaucaagaccuucuccaacgggugcgacuacgucagcaacaagggcguggacaccguguccgucggcaacacccuguacuacgugaacaagcaggagggcaagagccucuacgugaagggggagcccaucaucaacuucuacgacccgcuggucuuccccuccgacgaguucgacgccagcaucucccaggugaacgagaagaucaaccagagccuggccuucauccggaaguccgacgagcuccugcacaacgugaacgucggcaagagcaccacgaacaucaugaucaccaccaucaucaucgugaucaucgugauccugcugcuccugaucgccgucgggcuguuccucuacugcaaggcccgcuccacccccgugacgcugagcaaggaccagcuguccgggaucaacaacaucgcguucagcaacugaggacuagugcaucacauuuaaaagcaucucagccuaccaugagaauaagagaaagaaaaugaagaucaauagcuuauucaucucuuuuucuuuuucguugguguaaagccaacacccugucuaaaaaacauaaauuucuuuaaucauuuugccucuuuucucugugcuucaauuaauaaaaaauggaaagaaccuagaucuaaaaaaaaaaaaaaaaaaaaaaaaaaaaaaaaaaaaaaaaaaaaaaaaaaaaaaaaaaaaaaaaugcaucccccccccccccccccccccccccccccccaaaggcucuuuucagagccaccagaauu

SEQ ID NO: 17246 - RNA, 1993 nt, Artificial Sequence
  mRNA product Design i-2 comprising derived and/or modified sequence from HRSV(Memphis-37)__AIY60640.1__F_DSCav1_mut5 (opt1)
ggggcgcugccuacggagguggcagccaucuccuucucggcaucaagcuuaccauggagcugcccauccucaagaccaacgccaucaccacgauccuggccgcggugacccugugcuucgccagcucccagaacaucaccgaggaguucuaccagagcacgugcuccgccgucagcaagggcuaccucuccgcccugcgcaccgggugguacaccagcgugaucaccaucgagcuguccaacaucaaggagaacaagugcaacggcaccgacgccaaggugaagcucaucaagcaggagcuggacaaguacaagaacgcggucacggagcugcagcuccugaugcagagcaccccggccgccggguccggcagcgccaucgcguccgggaucgccgugugcaaggugcugcaccucgagggcgaggucaacaagaucaagaacgcccugcugagcaccaacaaggccguggugucccucagcggcugcggggucuccgugcugaccuucaaggugcuggaccucaagaacuacaucgacaagcagcugcugcccauccucaacaagcagagcugcuccaucagcaacaucgagacggucaucgaguuccagcagaagaacaaccggcugcuggagaucacccgcgaguucuccgugaacgccggcgugaccacccccgucagcacguacaugcucaccaacagcgagcugcugucccucaucaacgacaugcccaucaccaacgaccagaagaagcugaugagcaacaacgugcagaucgugcggcagcaguccuacagcaucaugugcaucaucaaggaggagguccuggcguacguggugcagcucccgcuguacggggucaucgacacccccugcuggaagcugcacacgagcccccucugcaccaccaacaccaaggagggcuccaacaucugccugacgcgcaccgaccgggggugguacugcgacaacgccggcuccgugagcuucuucccccaggccgagaccugcaaggugcaguccaaccgcgucuucugcgacaccaugaacagccggacgcucccguccgaggugaaccugugcaacaucgacaucuucaaccccaaguacgacugcaagaucaugaccagcaagaccgacgucuccagcuccgugaucaccagccugggcgccaucguguccugcuacgggaagacgaagugcaccgccagcaacaagugccggggcaucaucaagaccuucuccaacgggugcgacuacgucagcaacaagggcguggacaccgugagcgucggcaacacgcucuacuacgugaacaagcaggaggggaagucccuguacgugaagggcgagcccaucaucaacuucuacgacccccuggucuucccgagcgacgaguucgacgcguccaucagccaggugaacgagaagaucaaccagucccucgccuucauccgcaagagcgacgagcugcugcacaacgugaacgucgggaaguccaccaccaacaucaugaucaccaccaucaucaucgugaucaucgugauccuccugcugcucaucgccgucggccuguuccuguacugcaaggcccggagcacgcccgugacccuguccaaggaccagcucagcgggaucaacaacaucgccuucuccaacugaggacuagugcaucacauuuaaaagcaucucagccuaccaugagaauaagagaaagaaaaugaagaucaauagcuuauucaucucuuuuucuuuuucguugguguaaagccaacacccugucuaaaaaacauaaauuucuuuaaucauuuugccucuuuucucugugcuucaauuaauaaaaaauggaaagaaccuagaucuaaaaaaaaaaaaaaaaaaaaaaaaaaaaaaaaaaaaaaaaaaaaaaaaaaaaaaaaaaaaaaaaugcaucccccccccccccccccccccccccccccccaaaggcucuuuucagagccaccagaauu

SEQ ID NO: 17247 - RNA, 1993 nt, Artificial Sequence
  mRNA product Design i-2 comprising derived and/or modified sequence from HRSV(Memphis-37)__AIY60640.1__F_DSCav1_mut5 (opt2)
ggggcgcugccuacggagguggcagccaucuccuucucggcaucaagcuuaccauggagcuccccauccucaagaccaacgccaucaccaccauccucgccgccgucacccucugcuucgccuccucccagaacaucaccgaggaguucuaccaguccaccugcuccgccgucuccaagggcuaccucuccgcccuccgcaccggcugguacaccuccgucaucaccaucgagcucuccaacaucaaggagaacaagugcaacggcaccgacgccaaggucaagcucaucaagcaggagcucgacaaguacaagaacgccgucaccgagcuccagcuccucaugcaguccacccccgccgccggcuccggcuccgccaucgccuccggcaucgccgucugcaagguccuccaccucgagggcgaggucaacaagaucaagaacgcccuccucuccaccaacaaggccgucgucucccucuccggcugcggcgucuccguccucaccuucaagguccucgaccucaagaacuacaucgacaagcagcuccuccccauccucaacaagcaguccugcuccaucuccaacaucgagaccgucaucgaguuccagcagaagaacaaccgccuccucgagaucacccgcgaguucuccgucaacgccggcgucaccacccccgucuccaccuacaugcucaccaacuccgagcuccucucccucaucaacgacaugcccaucaccaacgaccagaagaagcucauguccaacaacguccagaucguccgccagcaguccuacuccaucaugugcaucaucaaggaggagguccucgccuacgucguccagcucccccucuacggcgucaucgacacccccugcuggaagcuccacaccuccccccucugcaccaccaacaccaaggagggcuccaacaucugccucacccgcaccgaccgcggcugguacugcgacaacgccggcuccgucuccuucuucccccaggccgagaccugcaagguccaguccaaccgcgucuucugcgacaccaugaacucccgcacccuccccuccgaggucaaccucugcaacaucgacaucuucaaccccaaguacgacugcaagaucaugaccuccaagaccgacgucuccuccuccgucaucaccucccucggcgccaucgucuccugcuacggcaagaccaagugcaccgccuccaacaagugccgcggcaucaucaagaccuucuccaacggcugcgacuacgucuccaacaagggcgucgacaccgucuccgucggcaacacccucuacuacgucaacaagcaggagggcaagucccucuacgucaagggcgagcccaucaucaacuucuacgacccccucgucuuccccuccgacgaguucgacgccuccaucucccaggucaacgagaagaucaaccagucccucgccuucauccgcaaguccgacgagcuccuccacaacgucaacgucggcaaguccaccaccaacaucaugaucaccaccaucaucaucgucaucaucgucauccuccuccuccucaucgccgucggccucuuccucuacugcaaggcccgcuccacccccgucacccucuccaaggaccagcucuccggcaucaacaacaucgccuucuccaacugaggacuagugcaucacauuuaaaagcaucucagccuaccaugagaauaagagaaagaaaaugaagaucaauagcuuauucaucucuuuuucuuuuucguugguguaaagccaacacccugucuaaaaaacauaaauuucuuuaaucauuuugccucuuuucucugugcuucaauuaauaaaaaauggaaagaaccuagaucuaaaaaaaaaaaaaaaaaaaaaaaaaaaaaaaaaaaaaaaaaaaaaaaaaaaaaaaaaaaaaaaaugcaucccccccccccccccccccccccccccccccaaaggcucuuuucagagccaccagaauu

SEQ ID NO: 17248 - RNA, 1993 nt, Artificial Sequence
  mRNA product Design i-2 comprising derived and/or modified sequence from HRSV(Memphis-37)__AIY60640.1__F_DSCav1_mut5 (opt3)
ggggcgcugccuacggagguggcagccaucuccuucucggcaucaagcuuaccauggagcugcccauccucaagaccaacgccauuacaacuauacuugcugcagugacgcugugcuucgccagcucccagaauaucaccgaagaguuuuaccaaucuacauguucagcggucaguaaaggcuauuugagcgcuuuaagaacugggugguacaccuccguuauuacaaucgaacugucuaacauuaaggagaauaaaugcaacggaaccgacgccaaggugaaacuaaucaagcaggaacucgauaaguauaaaaaugcaguaacugagcugcagcuucugaugcagucgaccccugccgcugguucaggcagcgcaauagccagugggaucgcuguguguaaggucuugcaccucgagggagaagugaacaaaauuaagaaugcccugcuguccacaaacaaagcgguugugucucucagcggcugcggugucuccguguuaacguucaagguacuggaccuuaagaauuacaucgauaaacaauugcugccaauucuaaacaagcagucauguaguaucagcaauauagagacuguuauugaauuucagcagaaaaacaauaggcuccuggagaucacccgggaguucucugugaacgcaggggucacaacuccgguguccaccuauaugcuuacaaauucagaacuguugagccucauuaacgacaugcccaucaccaacgaucaaaagaaacugaugaguaauaacgugcagaucguccgccagcagucuuacuccauuaugugcauaaucaaggaggaaguuuuagccuaugugguacaacugccucucuacggagugauugacacgccauguuggaaacuucauacuagcccccugugcacaaccaauacuaaggagggcucgaacaucuguuugacacgaaccgaucguggcugguacugcgacaaugcugggucugucuccuuuuucccucaggccgaaacguguaaggugcagucaaacagaguguuuugcgauaccaugaauaguagaacacugccaagcgaggugaaccucugcaauauagacauuuucaaccccaaauaugauuguaagaucaugacuuccaaaaccgacgucucuagcucagugaucacaagucugggagcaauuguauccugcuacgguaagacuaaauguaccgcuagcaauaagugcaggggcaucauuaagacauuuucuaacgggugugauuauguuucaaauaaaggaguggacaccgucagugugggcaacacucuuuacuaugucaauaagcaagaggguaaaagccuguacgugaagggggaaccuauaaucaacuucuaugacccauugguuuuuccguccgaugaguucgacgccucuauuucgcagguuaacgagaaaaucaaucagagccucgcguuuauccggaaguccgaugaacuguuacacaacguaaaugucggaaagucaacgacaaacauuaugauaaccacuaucauuaucgugauuaucguuauacugcuacuccugaucgccgugggccuuuucuuguacugcaaagcacgcaguacccccgucacacugucuaaggaccagcucagcggcauuaauaacaucgcuuucuccaauugaggacuagugcaucacauuuaaaagcaucucagccuaccaugagaauaagagaaagaaaaugaagaucaauagcuuauucaucucuuuuucuuuuucguugguguaaagccaacacccugucuaaaaaacauaaauuucuuuaaucauuuugccucuuuucucugugcuucaauuaauaaaaaauggaaagaaccuagaucuaaaaaaaaaaaaaaaaaaaaaaaaaaaaaaaaaaaaaaaaaaaaaaaaaaaaaaaaaaaaaaaaugcaucccccccccccccccccccccccccccccccaaaggcucuuuucagagccaccagaauu

SEQ ID NO: 17249 - RNA, 1993 nt, Artificial Sequence
  mRNA product Design i-2 comprising derived and/or modified sequence from HRSV(Memphis-37)__AIY60640.1__F_DSCav1_mut5 (opt4)
ggggcgcugccuacggagguggcagccaucuccuucucggcaucaagcuuaccauggagcugcccauccugaagaccaacgccaucaccaccauccuggccgccgugacccugugcuucgccagcagccagaacaucaccgaggaguucuaccagagcaccugcagcgccgugagcaagggcuaccugagcgcccugagaaccggcugguacaccagcgugaucaccaucgagcugagcaacaucaaggagaacaagugcaacggcaccgacgccaaggugaagcugaucaagcaggagcuggacaaguacaagaacgccgugaccgagcugcagcugcugaugcagagcacccccgccgccggcagcggcagcgccaucgccagcggcaucgccgugugcaaggugcugcaccuggagggcgaggugaacaagaucaagaacgcccugcugagcaccaacaaggccguggugagccugagcggcugcggcgugagcgugcugaccuucaaggugcuggaccugaagaacuacaucgacaagcagcugcugcccauccugaacaagcagagcugcagcaucagcaacaucgagaccgugaucgaguuccagcagaagaacaacagacugcuggagaucaccagagaguucagcgugaacgccggcgugaccacccccgugagcaccuacaugcugaccaacagcgagcugcugagccugaucaacgacaugcccaucaccaacgaccagaagaagcugaugagcaacaacgugcagaucgugagacagcagagcuacagcaucaugugcaucaucaaggaggaggugcuggccuacguggugcagcugccccuguacggcgugaucgacacccccugcuggaagcugcacaccagcccccugugcaccaccaacaccaaggagggcagcaacaucugccugaccagaaccgacagaggcugguacugcgacaacgccggcagcgugagcuucuucccccaggccgagaccugcaaggugcagagcaacagaguguucugcgacaccaugaacagcagaacccugcccagcgaggugaaccugugcaacaucgacaucuucaaccccaaguacgacugcaagaucaugaccagcaagaccgacgugagcagcagcgugaucaccagccugggcgccaucgugagcugcuacggcaagaccaagugcaccgccagcaacaagugcagaggcaucaucaagaccuucagcaacggcugcgacuacgugagcaacaagggcguggacaccgugagcgugggcaacacccuguacuacgugaacaagcaggagggcaagagccuguacgugaagggcgagcccaucaucaacuucuacgacccccugguguuccccagcgacgaguucgacgccagcaucagccaggugaacgagaagaucaaccagagccuggccuucaucagaaagagcgacgagcugcugcacaacgugaacgugggcaagagcaccaccaacaucaugaucaccaccaucaucaucgugaucaucgugauccugcugcugcugaucgccgugggccuguuccuguacugcaaggccagaagcacccccgugacccugagcaaggaccagcugagcggcaucaacaacaucgccuucagcaacugaggacuagugcaucacauuuaaaagcaucucagccuaccaugagaauaagagaaagaaaaugaagaucaauagcuuauucaucucuuuuucuuuuucguugguguaaagccaacacccugucuaaaaaacauaaauuucuuuaaucauuuugccucuuuucucugugcuucaauuaauaaaaaauggaaagaaccuagaucuaaaaaaaaaaaaaaaaaaaaaaaaaaaaaaaaaaaaaaaaaaaaaaaaaaaaaaaaaaaaaaaaugcaucccccccccccccccccccccccccccccccaaaggcucuuuucagagccaccagaauu

SEQ ID NO: 17250 - RNA, 1993 nt, Artificial Sequence
  mRNA product Design i-2 comprising derived and/or modified sequence from HRSV(Memphis-37)__AIY60640.1__F_DSCav1_mut5 (opt5)
ggggcgcugccuacggagguggcagccaucuccuucucggcaucaagcuuaccauggagcugcccauccucaagaccaacgccauuacaacgauccuggcugccgugacccuuugcuucgcgagcucccagaauauuacagaagaguuuuaccaaucuaccuguagcgcugucuccaaaggcuaucugucugcccucagaacagggugguacaccagcguuaucacaauugaacuguccaacaucaaggagaauaaaugcaacggaaccgacgccaaggugaaacuuaucaagcaggaacuggauaaguauaaaaaugcugugacggagcuccagcugcugaugcagucuaccccugccgcuggcagcggguccgccauugcgagcggaaucgccgucuguaaggugcuccaccuggagggcgaaguuaacaaaauuaagaaugcccuucugucuacaaacaaagcuguggucucccucagcgggugcggagugucuguucugaccuucaaggugcuugaccugaagaauuacaucgauaaacaacuccugccgauucugaacaagcaguccuguagcaucucuaauauugagacagucaucgaauuucagcagaaaaacaaucggcuccuggagaucacccgcgaguucuccgugaacgcuggcgugacgacacccgucagcaccuauaugcuuacaaauuccgaacugcucucucugauuaacgacaugccuaucaccaacgaucaaaagaaacuuaugagcaauaacguucagauugugagacagcaguccuacagcaucaugugcauuaucaaggaggaagugcuggccuaugucgugcaacucccccuguacggcguuaucgacaccccuuguuggaaacugcauacaucuccccucugcacgaccaauacaaaggagggguccaacauuugucugacccggacagaucgcggaugguacugcgacaaugcgggcagcgugagcuuuuucccucaggccgaaaccuguaagguccagucuaacagaguguuuugcgauacgaugaacuccagaacacugccgucugagguuaaucucugcaauaucgacauuuucaaccccaaauaugauuguaagaucaugaccagcaaaaccgacguguccagcucugucauuacaucccugggggcuaucgugagcugcuacggaaagaccaaauguacagccucuaauaagugccggggcaucauuaagacguuuuccaacgggugugauuaugucagcaauaaaggaguggacaccguuuccgugggcaacacacuuuacuaugucaauaagcaagagggcaaaucucuguacgugaagggggaaccuaucauuaacuucuaugacccccucguuuuuccuagcgaugaguucgacgcuuccaucucucaggugaacgagaaaauuaaucagagccuggccuuuauccgcaaguccgaugaacugcuccacaacgucaaugugggaaagagcaccacaaacauuaugaucaccacgaucauuaucgugauuaucguuauucugcuucugcucaucgccgucggccuguuccuguacugcaaagcuagaucuacccccgugacacuuuccaaggaccagcucagcgggaucaauaacauugcguucucuaauugaggacuagugcaucacauuuaaaagcaucucagccuaccaugagaauaagagaaagaaaaugaagaucaauagcuuauucaucucuuuuucuuuuucguugguguaaagccaacacccugucuaaaaaacauaaauuucuuuaaucauuuugccucuuuucucugugcuucaauuaauaaaaaauggaaagaaccuagaucuaaaaaaaaaaaaaaaaaaaaaaaaaaaaaaaaaaaaaaaaaaaaaaaaaaaaaaaaaaaaaaaaugcaucccccccccccccccccccccccccccccccaaaggcucuuuucagagccaccagaauu

SEQ ID NO: 17251 - RNA, 1993 nt, Artificial Sequence
  mRNA product Design i-2 comprising derived and/or modified sequence from HRSV(Memphis-37)__AIY60640.1__F_DSCav1_mut5 (opt6)
ggggcgcugccuacggagguggcagccaucuccuucucggcaucaagcuuaccauggaacucccaaucuuaaaaacaaacgcaauaacuacaauacucgcagcaguaacacuaugcuucgcaucaucacaaaacauaaccgaagaauuuuaccaaaguacaugcucagcaguaucaaaagguuaccucucagcccuaagaaccggaugguacacaucaguaaucacuauagaacuauccaauauaaaagaaaacaaaugcaacggcacugacgcaaaaguuaaauuaauuaaacaagaacucgauaaauauaaaaaugcaguaacagaacuacaacuacuaaugcaaagcaccccagcugcaggaagcggaucagcaaucgcaucaggaauagcaguauguaaaguacuacaccuagaaggagaagucaacaaaaucaaaaaugcacuacuaaguacaaacaaagcuguaguaagccuaucagguugcggaguaucaguauuaacauuuaaaguccucgaccuaaaaaauuacauagauaaacaacucuuaccaauacucaauaaacaaaguugcagcaucagcaacauagaaacagucaucgaauuucaacaaaaaaauaauagacuccuagaaauaacacgugaauuuucaguaaaugcuggaguaacaacaccaguaucuacauauaugcuaacaaauagcgaacuacucucacuuauuaacgauaugcccauaacaaacgaccaaaaaaaacuuaugucaaacaauguucaaauaguuagacaacaauccuacagcauaaugugcauaaucaaagaagaaguucuagcuuacguaguacaacuaccacucuaugguguuaucgacacccccuguuggaaacuucacacaucaccacuaugcacaacaaacacaaaagaaggaucaaauauuugcuuaacaagaacagauagaggaugguauugcgauaaugccggaucaguaucauuuuuuccacaagcagaaacauguaaaguacaauccaaccgaguauuuugcgacaccaugaacuccagaacacuaccaucugaagucaaccuauguaauauagauauauuuaacccaaaauaugacuguaaaaucaugacaucaaaaacugauguaaguucuaguguaauaaccagcuuaggcgccauaguaagcuguuacgguaaaacaaaaugcacagcaagcaacaaaugccgcgguauaauaaaaacauucucaaacggaugcgauuauguaaguaacaaaggaguagauacagucuccguaggcaacacauuauacuacguaaacaaacaagaaggaaaaucacuauauguaaaaggagaaccaaucauaaauuucuacgacccacuuguauuccccagcgacgaauuugaugcuuccauuucacaagucaacgaaaaaauaaaccaaucauuagccuucauaagaaaaucagacgaauuauuacauaauguuaaugucggcaaauccacaacuaauauaaugauaacaacaaucauaauaguaauaaucguuauacuacuauuacucauagcaguaggacucuucuuauauuguaaagccagauccaccccaguaacacucucaaaagaccaauuaucaggaauuaauaacaucgcauuuucaaacuaaggacuagugcaucacauuuaaaagcaucucagccuaccaugagaauaagagaaagaaaaugaagaucaauagcuuauucaucucuuuuucuuuuucguugguguaaagccaacacccugucuaaaaaacauaaauuucuuuaaucauuuugccucuuuucucugugcuucaauuaauaaaaaauggaaagaaccuagaucuaaaaaaaaaaaaaaaaaaaaaaaaaaaaaaaaaaaaaaaaaaaaaaaaaaaaaaaaaaaaaaaaugcaucccccccccccccccccccccccccccccccaaaggcucuuuucagagccaccagaauu

SEQ ID NO: 17252 - RNA, 1993 nt, Artificial Sequence
  mRNA product Design i-2 comprising derived and/or modified sequence from HRSV(Memphis-37)__AIY60640.1__F_DSCav1_mut5 (opt11)
ggggcgcugccuacggagguggcagccaucuccuucucggcaucaagcuuaccauggaacuccccauccuuaaaaccaacgcaaucaccacaauacucgccgccgucacccucugcuuugcguccucccagaacaucaccgaagaguucuaccaaucgaccugcagcgccgucagcaagggcuaccucucagcccuccgaacaggcugguacacauccgucaucaccaucgaacucucaaacauaaaagaaaacaaguguaacggcaccgacgcgaaaguuaaacucaucaaacaagaacucgauaaauacaaaaacgcaguaaccgaacuacaacuccuaaugcaauccacacccgcagccggcagcggcuccgcaaucgccuccggcauagcagucugcaaaguccuccaccucgaaggagaagucaauaaaaucaaaaacgcccuccuauccaccaacaaagcgguugucucccuguccggaugcggaguuagcguccuaaccuucaaggugcucgaccucaaaaacuacauagacaaacaacuacuccccauacucaacaaacaaucaugcuccaucagcaacaucgagaccgucaucgaguuccaacagaaaaacaaccgccuccucgaaaucacacgagaguucuccguaaacgccggcgucacaacccccguuuccacuuacaugcucacaaacagcgaacuccucucccucaucaacgacaugccaaucaccaacgaccaaaagaaacucauguccaacaacguccaaaucguccgccaacaaagcuacagcauaaugugcaucauaaaagaagaaguacucgcguacguaguccaacuaccccuauacggcgucaucgacacccccugcuggaaacugcacacuucuccccucuguacaaccaacacuaaagaaggcucgaacaucugccucaccagaacagaccgaggaugguacugcgacaacgccggcuccgucagcuucuucccccaggccgaaacaugcaaaguacaaucaaaccgagucuucugcgacacaaugaacagcagaacucuacccuccgaaguuaaccuaugcaacaucgacaucuucaaccccaaauacgacugcaaaauaaugaccucaaaaacagacguguccagcuccguuaucaccucucucggagccaucguauccuguuauggaaaaaccaaaugcaccgccucaaacaaaugccgaggcauaaucaaaacauucucaaauggaugcgacuacguauccaacaaaggagucgacaccgucagcgugggcaauacccucuacuacgucaacaaacaggaagggaaaucccucuauguaaagggcgagcccauuauuaacuucuaugacccccucguguucccaagcgacgaguucgacgccuccauaucacaagucaaugagaaaaucaaccaaucacuagcuuucauucgcaaauccgacgaacuccuucacaacgucaacgucggcaaauccaccaccaacaucaugaucaccaccauaauuaucgucauuaucgucauacuacuccuacucaucgccgucggccucuuccucuauugcaaagcacgcucgacacccgucacccuuucaaaagaccaacuuuccggcauaaacaacauagccuucagcaacuagggacuagugcaucacauuuaaaagcaucucagccuaccaugagaauaagagaaagaaaaugaagaucaauagcuuauucaucucuuuuucuuuuucguugguguaaagccaacacccugucuaaaaaacauaaauuucuuuaaucauuuugccucuuuucucugugcuucaauuaauaaaaaauggaaagaaccuagaucuaaaaaaaaaaaaaaaaaaaaaaaaaaaaaaaaaaaaaaaaaaaaaaaaaaaaaaaaaaaaaaaaugcaucccccccccccccccccccccccccccccccaaaggcucuuuucagagccaccagaauu

SEQ ID NO: 17253 - RNA, 1828 nt, Artificial Sequence
  mRNA product Design i-3 comprising derived and/or modified sequence from HRSV(Memphis-37)__AIY60640.1__F_DSCav1_mut5 (opt1)
gggagaaagcuuaccauggagcugcccauccucaagaccaacgccaucaccacgauccuggccgcggugacccugugcuucgccagcucccagaacaucaccgaggaguucuaccagagcacgugcuccgccgucagcaagggcuaccucuccgcccugcgcaccgggugguacaccagcgugaucaccaucgagcuguccaacaucaaggagaacaagugcaacggcaccgacgccaaggugaagcucaucaagcaggagcuggacaaguacaagaacgcggucacggagcugcagcuccugaugcagagcaccccggccgccggcuccgggagcgcgaucgccuccggcaucgccgucugcaaggugcugcaccucgagggcgaggugaacaagaucaagaacgcccugcuguccaccaacaaggccgucgugagccucuccggcugcggggugagcguccugaccuucaaggugcuggaccucaagaacuacaucgacaagcagcugcugcccauccugaacaagcagagcugcuccaucagcaacaucgagaccgucaucgaguuccagcagaagaacaaccgccuccuggagaucacgcgggaguucagcgugaacgcgggcgugaccacccccgucuccaccuacaugcugacgaacagcgagcuccugucccugaucaacgacaugccgaucaccaacgaccagaagaagcucaugagcaacaacgugcagaucgugcgccagcaguccuacagcaucaugugcaucaucaaggaggagguccuggccuacguggugcagcugccccucuacggggucaucgacacccccugcuggaagcugcacaccagcccccugugcacgaccaacaccaaggagggcuccaacaucugccucacccggacggaccgcgggugguacugcgacaacgccggcagcguguccuucuucccgcaggccgagaccugcaagguccagagcaaccggguguucugcgacaccaugaacucccggacccugcccagcgaggugaaccucugcaacaucgacaucuucaaccccaaguacgacugcaagaucaugacguccaagaccgacgucagcuccagcgugaucaccucccugggcgccaucgugagcugcuacgggaagaccaagugcacggcgagcaacaagugccgcggcaucaucaagaccuucuccaacgggugcgacuacgucagcaacaagggcguggacaccguguccgucggcaacacccuguacuacgugaacaagcaggagggcaagagccucuacgugaagggggagcccaucaucaacuucuacgacccgcuggucuuccccuccgacgaguucgacgccagcaucucccaggugaacgagaagaucaaccagagccuggccuucauccggaaguccgacgagcuccugcacaacgugaacgucggcaagagcaccacgaacaucaugaucaccaccaucaucaucgugaucaucgugauccugcugcuccugaucgccgucgggcuguuccucuacugcaaggcccgcuccacccccgugacgcugagcaaggaccagcuguccgggaucaacaacaucgcguucagcaacugaggacuaguuauaagacugacuagcccgaugggccucccaacgggcccuccuccccuccuugcaccgagauuaauaaaaaaaaaaaaaaaaaaaaaaaaaaaaaaaaaaaaaaaaaaaaaaaaaaaaaaaaaaaaaaaaugcaucccccccccccccccccccccccccccccccaaaggcucuuuucagagccaccagaauu

SEQ ID NO: 17254 - RNA, 1828 nt, Artificial Sequence
  mRNA product Design i-3 comprising derived and/or modified sequence from HRSV(Memphis-37)__AIY60640.1__F_DSCav1_mut5 (opt1)
gggagaaagcuuaccauggagcugcccauccucaagaccaacgccaucaccacgauccuggccgcggugacccugugcuucgccagcucccagaacaucaccgaggaguucuaccagagcacgugcuccgccgucagcaagggcuaccucuccgcccugcgcaccgggugguacaccagcgugaucaccaucgagcuguccaacaucaaggagaacaagugcaacggcaccgacgccaaggugaagcucaucaagcaggagcuggacaaguacaagaacgcggucacggagcugcagcuccugaugcagagcaccccggccgccggguccggcagcgccaucgcguccgggaucgccgugugcaaggugcugcaccucgagggcgaggucaacaagaucaagaacgcccugcugagcaccaacaaggccguggugucccucagcggcugcggggucuccgugcugaccuucaaggugcuggaccucaagaacuacaucgacaagcagcugcugcccauccucaacaagcagagcugcuccaucagcaacaucgagacggucaucgaguuccagcagaagaacaaccggcugcuggagaucacccgcgaguucuccgugaacgccggcgugaccacccccgucagcacguacaugcucaccaacagcgagcugcugucccucaucaacgacaugcccaucaccaacgaccagaagaagcugaugagcaacaacgugcagaucgugcggcagcaguccuacagcaucaugugcaucaucaaggaggagguccuggcguacguggugcagcucccgcuguacggggucaucgacacccccugcuggaagcugcacacgagcccccucugcaccaccaacaccaaggagggcuccaacaucugccugacgcgcaccgaccgggggugguacugcgacaacgccggcuccgugagcuucuucccccaggccgagaccugcaaggugcaguccaaccgcgucuucugcgacaccaugaacagccggacgcucccguccgaggugaaccugugcaacaucgacaucuucaaccccaaguacgacugcaagaucaugaccagcaagaccgacgucuccagcuccgugaucaccagccugggcgccaucguguccugcuacgggaagacgaagugcaccgccagcaacaagugccggggcaucaucaagaccuucuccaacgggugcgacuacgucagcaacaagggcguggacaccgugagcgucggcaacacgcucuacuacgugaacaagcaggaggggaagucccuguacgugaagggcgagcccaucaucaacuucuacgacccccuggucuucccgagcgacgaguucgacgcguccaucagccaggugaacgagaagaucaaccagucccucgccuucauccgcaagagcgacgagcugcugcacaacgugaacgucgggaaguccaccaccaacaucaugaucaccaccaucaucaucgugaucaucgugauccuccugcugcucaucgccgucggccuguuccuguacugcaaggcccggagcacgcccgugacccuguccaaggaccagcucagcgggaucaacaacaucgccuucuccaacugaggacuaguuauaagacugacuagcccgaugggccucccaacgggcccuccuccccuccuugcaccgagauuaauaaaaaaaaaaaaaaaaaaaaaaaaaaaaaaaaaaaaaaaaaaaaaaaaaaaaaaaaaaaaaaaaugcaucccccccccccccccccccccccccccccccaaaggcucuuuucagagccaccagaauu

SEQ ID NO: 17255 - RNA, 1828 nt, Artificial Sequence
  mRNA product Design i-3 comprising derived and/or modified sequence from HRSV(Memphis-37)__AIY60640.1__F_DSCav1_mut5 (opt2)
gggagaaagcuuaccauggagcuccccauccucaagaccaacgccaucaccaccauccucgccgccgucacccucugcuucgccuccucccagaacaucaccgaggaguucuaccaguccaccugcuccgccgucuccaagggcuaccucuccgcccuccgcaccggcugguacaccuccgucaucaccaucgagcucuccaacaucaaggagaacaagugcaacggcaccgacgccaaggucaagcucaucaagcaggagcucgacaaguacaagaacgccgucaccgagcuccagcuccucaugcaguccacccccgccgccggcuccggcuccgccaucgccuccggcaucgccgucugcaagguccuccaccucgagggcgaggucaacaagaucaagaacgcccuccucuccaccaacaaggccgucgucucccucuccggcugcggcgucuccguccucaccuucaagguccucgaccucaagaacuacaucgacaagcagcuccuccccauccucaacaagcaguccugcuccaucuccaacaucgagaccgucaucgaguuccagcagaagaacaaccgccuccucgagaucacccgcgaguucuccgucaacgccggcgucaccacccccgucuccaccuacaugcucaccaacuccgagcuccucucccucaucaacgacaugcccaucaccaacgaccagaagaagcucauguccaacaacguccagaucguccgccagcaguccuacuccaucaugugcaucaucaaggaggagguccucgccuacgucguccagcucccccucuacggcgucaucgacacccccugcuggaagcuccacaccuccccccucugcaccaccaacaccaaggagggcuccaacaucugccucacccgcaccgaccgcggcugguacugcgacaacgccggcuccgucuccuucuucccccaggccgagaccugcaagguccaguccaaccgcgucuucugcgacaccaugaacucccgcacccuccccuccgaggucaaccucugcaacaucgacaucuucaaccccaaguacgacugcaagaucaugaccuccaagaccgacgucuccuccuccgucaucaccucccucggcgccaucgucuccugcuacggcaagaccaagugcaccgccuccaacaagugccgcggcaucaucaagaccuucuccaacggcugcgacuacgucuccaacaagggcgucgacaccgucuccgucggcaacacccucuacuacgucaacaagcaggagggcaagucccucuacgucaagggcgagcccaucaucaacuucuacgacccccucgucuuccccuccgacgaguucgacgccuccaucucccaggucaacgagaagaucaaccagucccucgccuucauccgcaaguccgacgagcuccuccacaacgucaacgucggcaaguccaccaccaacaucaugaucaccaccaucaucaucgucaucaucgucauccuccuccuccucaucgccgucggccucuuccucuacugcaaggcccgcuccacccccgucacccucuccaaggaccagcucuccggcaucaacaacaucgccuucuccaacugaggacuaguuauaagacugacuagcccgaugggccucccaacgggcccuccuccccuccuugcaccgagauuaauaaaaaaaaaaaaaaaaaaaaaaaaaaaaaaaaaaaaaaaaaaaaaaaaaaaaaaaaaaaaaaaaugcaucccccccccccccccccccccccccccccccaaaggcucuuuucagagccaccagaauu

SEQ ID NO: 17256 - RNA, 1828 nt, Artificial Sequence
  mRNA product Design i-3 comprising derived and/or modified sequence from HRSV(Memphis-37)__AIY60640.1__F_DSCav1_mut5 (opt3)
gggagaaagcuuaccauggagcugcccauccucaagaccaacgccauuacaacuauacuugcugcagugacgcugugcuucgccagcucccagaauaucaccgaagaguuuuaccaaucuacauguucagcggucaguaaaggcuauuugagcgcuuuaagaacugggugguacaccuccguuauuacaaucgaacugucuaacauuaaggagaauaaaugcaacggaaccgacgccaaggugaaacuaaucaagcaggaacucgauaaguauaaaaaugcaguaacugagcugcagcuucugaugcagucgaccccugccgcugguucaggcagcgcaauagccagugggaucgcuguguguaaggucuugcaccucgagggagaagugaacaaaauuaagaaugcccugcuguccacaaacaaagcgguugugucucucagcggcugcggugucuccguguuaacguucaagguacuggaccuuaagaauuacaucgauaaacaauugcugccaauucuaaacaagcagucauguaguaucagcaauauagagacuguuauugaauuucagcagaaaaacaauaggcuccuggagaucacccgggaguucucugugaacgcaggggucacaacuccgguguccaccuauaugcuuacaaauucagaacuguugagccucauuaacgacaugcccaucaccaacgaucaaaagaaacugaugaguaauaacgugcagaucguccgccagcagucuuacuccauuaugugcauaaucaaggaggaaguuuuagccuaugugguacaacugccucucuacggagugauugacacgccauguuggaaacuucauacuagcccccugugcacaaccaauacuaaggagggcucgaacaucuguuugacacgaaccgaucguggcugguacugcgacaaugcugggucugucuccuuuuucccucaggccgaaacguguaaggugcagucaaacagaguguuuugcgauaccaugaauaguagaacacugccaagcgaggugaaccucugcaauauagacauuuucaaccccaaauaugauuguaagaucaugacuuccaaaaccgacgucucuagcucagugaucacaagucugggagcaauuguauccugcuacgguaagacuaaauguaccgcuagcaauaagugcaggggcaucauuaagacauuuucuaacgggugugauuauguuucaaauaaaggaguggacaccgucagugugggcaacacucuuuacuaugucaauaagcaagaggguaaaagccuguacgugaagggggaaccuauaaucaacuucuaugacccauugguuuuuccguccgaugaguucgacgccucuauuucgcagguuaacgagaaaaucaaucagagccucgcguuuauccggaaguccgaugaacuguuacacaacguaaaugucggaaagucaacgacaaacauuaugauaaccacuaucauuaucgugauuaucguuauacugcuacuccugaucgccgugggccuuuucuuguacugcaaagcacgcaguacccccgucacacugucuaaggaccagcucagcggcauuaauaacaucgcuuucuccaauugaggacuaguuauaagacugacuagcccgaugggccucccaacgggcccuccuccccuccuugcaccgagauuaauaaaaaaaaaaaaaaaaaaaaaaaaaaaaaaaaaaaaaaaaaaaaaaaaaaaaaaaaaaaaaaaaugcaucccccccccccccccccccccccccccccccaaaggcucuuuucagagccaccagaauu

SEQ ID NO: 17257 - RNA, 1828 nt, Artificial Sequence
  mRNA product Design i-3 comprising derived and/or modified sequence from HRSV(Memphis-37)__AIY60640.1__F_DSCav1_mut5 (opt4)
gggagaaagcuuaccauggagcugcccauccugaagaccaacgccaucaccaccauccuggccgccgugacccugugcuucgccagcagccagaacaucaccgaggaguucuaccagagcaccugcagcgccgugagcaagggcuaccugagcgcccugagaaccggcugguacaccagcgugaucaccaucgagcugagcaacaucaaggagaacaagugcaacggcaccgacgccaaggugaagcugaucaagcaggagcuggacaaguacaagaacgccgugaccgagcugcagcugcugaugcagagcacccccgccgccggcagcggcagcgccaucgccagcggcaucgccgugugcaaggugcugcaccuggagggcgaggugaacaagaucaagaacgcccugcugagcaccaacaaggccguggugagccugagcggcugcggcgugagcgugcugaccuucaaggugcuggaccugaagaacuacaucgacaagcagcugcugcccauccugaacaagcagagcugcagcaucagcaacaucgagaccgugaucgaguuccagcagaagaacaacagacugcuggagaucaccagagaguucagcgugaacgccggcgugaccacccccgugagcaccuacaugcugaccaacagcgagcugcugagccugaucaacgacaugcccaucaccaacgaccagaagaagcugaugagcaacaacgugcagaucgugagacagcagagcuacagcaucaugugcaucaucaaggaggaggugcuggccuacguggugcagcugccccuguacggcgugaucgacacccccugcuggaagcugcacaccagcccccugugcaccaccaacaccaaggagggcagcaacaucugccugaccagaaccgacagaggcugguacugcgacaacgccggcagcgugagcuucuucccccaggccgagaccugcaaggugcagagcaacagaguguucugcgacaccaugaacagcagaacccugcccagcgaggugaaccugugcaacaucgacaucuucaaccccaaguacgacugcaagaucaugaccagcaagaccgacgugagcagcagcgugaucaccagccugggcgccaucgugagcugcuacggcaagaccaagugcaccgccagcaacaagugcagaggcaucaucaagaccuucagcaacggcugcgacuacgugagcaacaagggcguggacaccgugagcgugggcaacacccuguacuacgugaacaagcaggagggcaagagccuguacgugaagggcgagcccaucaucaacuucuacgacccccugguguuccccagcgacgaguucgacgccagcaucagccaggugaacgagaagaucaaccagagccuggccuucaucagaaagagcgacgagcugcugcacaacgugaacgugggcaagagcaccaccaacaucaugaucaccaccaucaucaucgugaucaucgugauccugcugcugcugaucgccgugggccuguuccuguacugcaaggccagaagcacccccgugacccugagcaaggaccagcugagcggcaucaacaacaucgccuucagcaacugaggacuaguuauaagacugacuagcccgaugggccucccaacgggcccuccuccccuccuugcaccgagauuaauaaaaaaaaaaaaaaaaaaaaaaaaaaaaaaaaaaaaaaaaaaaaaaaaaaaaaaaaaaaaaaaaugcaucccccccccccccccccccccccccccccccaaaggcucuuuucagagccaccagaauu

SEQ ID NO: 17258 - RNA, 1828 nt, Artificial Sequence
  mRNA product Design i-3 comprising derived and/or modified sequence from HRSV(Memphis-37)__AIY60640.1__F_DSCav1_mut5 (opt5)
gggagaaagcuuaccauggagcugcccauccucaagaccaacgccauuacaacgauccuggcugccgugacccuuugcuucgcgagcucccagaauauuacagaagaguuuuaccaaucuaccuguagcgcugucuccaaaggcuaucugucugcccucagaacagggugguacaccagcguuaucacaauugaacuguccaacaucaaggagaauaaaugcaacggaaccgacgccaaggugaaacuuaucaagcaggaacuggauaaguauaaaaaugcugugacggagcuccagcugcugaugcagucuaccccugccgcuggcagcggguccgccauugcgagcggaaucgccgucuguaaggugcuccaccuggagggcgaaguuaacaaaauuaagaaugcccuucugucuacaaacaaagcuguggucucccucagcgggugcggagugucuguucugaccuucaaggugcuugaccugaagaauuacaucgauaaacaacuccugccgauucugaacaagcaguccuguagcaucucuaauauugagacagucaucgaauuucagcagaaaaacaaucggcuccuggagaucacccgcgaguucuccgugaacgcuggcgugacgacacccgucagcaccuauaugcuuacaaauuccgaacugcucucucugauuaacgacaugccuaucaccaacgaucaaaagaaacuuaugagcaauaacguucagauugugagacagcaguccuacagcaucaugugcauuaucaaggaggaagugcuggccuaugucgugcaacucccccuguacggcguuaucgacaccccuuguuggaaacugcauacaucuccccucugcacgaccaauacaaaggagggguccaacauuugucugacccggacagaucgcggaugguacugcgacaaugcgggcagcgugagcuuuuucccucaggccgaaaccuguaagguccagucuaacagaguguuuugcgauacgaugaacuccagaacacugccgucugagguuaaucucugcaauaucgacauuuucaaccccaaauaugauuguaagaucaugaccagcaaaaccgacguguccagcucugucauuacaucccugggggcuaucgugagcugcuacggaaagaccaaauguacagccucuaauaagugccggggcaucauuaagacguuuuccaacgggugugauuaugucagcaauaaaggaguggacaccguuuccgugggcaacacacuuuacuaugucaauaagcaagagggcaaaucucuguacgugaagggggaaccuaucauuaacuucuaugacccccucguuuuuccuagcgaugaguucgacgcuuccaucucucaggugaacgagaaaauuaaucagagccuggccuuuauccgcaaguccgaugaacugcuccacaacgucaaugugggaaagagcaccacaaacauuaugaucaccacgaucauuaucgugauuaucguuauucugcuucugcucaucgccgucggccuguuccuguacugcaaagcuagaucuacccccgugacacuuuccaaggaccagcucagcgggaucaauaacauugcguucucuaauugaggacuaguuauaagacugacuagcccgaugggccucccaacgggcccuccuccccuccuugcaccgagauuaauaaaaaaaaaaaaaaaaaaaaaaaaaaaaaaaaaaaaaaaaaaaaaaaaaaaaaaaaaaaaaaaaugcaucccccccccccccccccccccccccccccccaaaggcucuuuucagagccaccagaauu

SEQ ID NO: 17259 - RNA, 1828 nt, Artificial Sequence
  mRNA product Design i-3 comprising derived and/or modified sequence from HRSV(Memphis-37)__AIY60640.1__F_DSCav1_mut5 (opt6)
gggagaaagcuuaccauggaacucccaaucuuaaaaacaaacgcaauaacuacaauacucgcagcaguaacacuaugcuucgcaucaucacaaaacauaaccgaagaauuuuaccaaaguacaugcucagcaguaucaaaagguuaccucucagcccuaagaaccggaugguacacaucaguaaucacuauagaacuauccaauauaaaagaaaacaaaugcaacggcacugacgcaaaaguuaaauuaauuaaacaagaacucgauaaauauaaaaaugcaguaacagaacuacaacuacuaaugcaaagcaccccagcugcaggaagcggaucagcaaucgcaucaggaauagcaguauguaaaguacuacaccuagaaggagaagucaacaaaaucaaaaaugcacuacuaaguacaaacaaagcuguaguaagccuaucagguugcggaguaucaguauuaacauuuaaaguccucgaccuaaaaaauuacauagauaaacaacucuuaccaauacucaauaaacaaaguugcagcaucagcaacauagaaacagucaucgaauuucaacaaaaaaauaauagacuccuagaaauaacacgugaauuuucaguaaaugcuggaguaacaacaccaguaucuacauauaugcuaacaaauagcgaacuacucucacuuauuaacgauaugcccauaacaaacgaccaaaaaaaacuuaugucaaacaauguucaaauaguuagacaacaauccuacagcauaaugugcauaaucaaagaagaaguucuagcuuacguaguacaacuaccacucuaugguguuaucgacacccccuguuggaaacuucacacaucaccacuaugcacaacaaacacaaaagaaggaucaaauauuugcuuaacaagaacagauagaggaugguauugcgauaaugccggaucaguaucauuuuuuccacaagcagaaacauguaaaguacaauccaaccgaguauuuugcgacaccaugaacuccagaacacuaccaucugaagucaaccuauguaauauagauauauuuaacccaaaauaugacuguaaaaucaugacaucaaaaacugauguaaguucuaguguaauaaccagcuuaggcgccauaguaagcuguuacgguaaaacaaaaugcacagcaagcaacaaaugccgcgguauaauaaaaacauucucaaacggaugcgauuauguaaguaacaaaggaguagauacagucuccguaggcaacacauuauacuacguaaacaaacaagaaggaaaaucacuauauguaaaaggagaaccaaucauaaauuucuacgacccacuuguauuccccagcgacgaauuugaugcuuccauuucacaagucaacgaaaaaauaaaccaaucauuagccuucauaagaaaaucagacgaauuauuacauaauguuaaugucggcaaauccacaacuaauauaaugauaacaacaaucauaauaguaauaaucguuauacuacuauuacucauagcaguaggacucuucuuauauuguaaagccagauccaccccaguaacacucucaaaagaccaauuaucaggaauuaauaacaucgcauuuucaaacuaaggacuaguuauaagacugacuagcccgaugggccucccaacgggcccuccuccccuccuugcaccgagauuaauaaaaaaaaaaaaaaaaaaaaaaaaaaaaaaaaaaaaaaaaaaaaaaaaaaaaaaaaaaaaaaaaugcaucccccccccccccccccccccccccccccccaaaggcucuuuucagagccaccagaauu

SEQ ID NO: 17260 - RNA, 1828 nt, Artificial Sequence
  mRNA product Design i-3 comprising derived and/or modified sequence from HRSV(Memphis-37)__AIY60640.1__F_DSCav1_mut5 (opt11)
gggagaaagcuuaccauggaacuccccauccuuaaaaccaacgcaaucaccacaauacucgccgccgucacccucugcuuugcguccucccagaacaucaccgaagaguucuaccaaucgaccugcagcgccgucagcaagggcuaccucucagcccuccgaacaggcugguacacauccgucaucaccaucgaacucucaaacauaaaagaaaacaaguguaacggcaccgacgcgaaaguuaaacucaucaaacaagaacucgauaaauacaaaaacgcaguaaccgaacuacaacuccuaaugcaauccacacccgcagccggcagcggcuccgcaaucgccuccggcauagcagucugcaaaguccuccaccucgaaggagaagucaauaaaaucaaaaacgcccuccuauccaccaacaaagcgguugucucccuguccggaugcggaguuagcguccuaaccuucaaggugcucgaccucaaaaacuacauagacaaacaacuacuccccauacucaacaaacaaucaugcuccaucagcaacaucgagaccgucaucgaguuccaacagaaaaacaaccgccuccucgaaaucacacgagaguucuccguaaacgccggcgucacaacccccguuuccacuuacaugcucacaaacagcgaacuccucucccucaucaacgacaugccaaucaccaacgaccaaaagaaacucauguccaacaacguccaaaucguccgccaacaaagcuacagcauaaugugcaucauaaaagaagaaguacucgcguacguaguccaacuaccccuauacggcgucaucgacacccccugcuggaaacugcacacuucuccccucuguacaaccaacacuaaagaaggcucgaacaucugccucaccagaacagaccgaggaugguacugcgacaacgccggcuccgucagcuucuucccccaggccgaaacaugcaaaguacaaucaaaccgagucuucugcgacacaaugaacagcagaacucuacccuccgaaguuaaccuaugcaacaucgacaucuucaaccccaaauacgacugcaaaauaaugaccucaaaaacagacguguccagcuccguuaucaccucucucggagccaucguauccuguuauggaaaaaccaaaugcaccgccucaaacaaaugccgaggcauaaucaaaacauucucaaauggaugcgacuacguauccaacaaaggagucgacaccgucagcgugggcaauacccucuacuacgucaacaaacaggaagggaaaucccucuauguaaagggcgagcccauuauuaacuucuaugacccccucguguucccaagcgacgaguucgacgccuccauaucacaagucaaugagaaaaucaaccaaucacuagcuuucauucgcaaauccgacgaacuccuucacaacgucaacgucggcaaauccaccaccaacaucaugaucaccaccauaauuaucgucauuaucgucauacuacuccuacucaucgccgucggccucuuccucuauugcaaagcacgcucgacacccgucacccuuucaaaagaccaacuuuccggcauaaacaacauagccuucagcaacuagggacuaguuauaagacugacuagcccgaugggccucccaacgggcccuccuccccuccuugcaccgagauuaauaaaaaaaaaaaaaaaaaaaaaaaaaaaaaaaaaaaaaaaaaaaaaaaaaaaaaaaaaaaaaaaaugcaucccccccccccccccccccccccccccccccaaaggcucuuuucagagccaccagaauu

SEQ ID NO: 17261 - protein, 515 aa, Artificial Sequence
  derived and/or modified protein sequence (artificial) from HRSV(Memphis-37)__AIY60640.1__F-del_DSCav1_mut5
MELPILKTNAITTILAAVTLCFASSQNITEEFYQSTCSAVSKGYLSALRTGWYTSVITIELSNIKENKCNGTDAKVKLIKQELDKYKNAVTELQLLMQSTPAAGSGSAIASGIAVCKVLHLEGEVNKIKNALLSTNKAVVSLSGCGVSVLTFKVLDLKNYIDKQLLPILNKQSCSISNIETVIEFQQKNNRLLEITREFSVNAGVTTPVSTYMLTNSELLSLINDMPITNDQKKLMSNNVQIVRQQSYSIMCIIKEEVLAYVVQLPLYGVIDTPCWKLHTSPLCTTNTKEGSNICLTRTDRGWYCDNAGSVSFFPQAETCKVQSNRVFCDTMNSRTLPSEVNLCNIDIFNPKYDCKIMTSKTDVSSSVITSLGAIVSCYGKTKCTASNKCRGIIKTFSNGCDYVSNKGVDTVSVGNTLYYVNKQEGKSLYVKGEPIINFYDPLVFPSDEFDASISQVNEKINQSLAFIRKSDELLHNVNVGKSTTNIMITTIIIVIIVILLLLIAVGLFLYCKAR

SEQ ID NO: 17262 - RNA, 1548 nt, Artificial Sequence
  derived and/or modified CDS sequence (opt1) from HRSV(Memphis-37)__AIY60640.1__F-del_DSCav1_mut5
auggagcugcccauccucaagaccaacgccaucaccacgauccuggccgcggugacccugugcuucgccagcucccagaacaucaccgaggaguucuaccagagcacgugcuccgccgucagcaagggcuaccucuccgcccugcgcaccgggugguacaccagcgugaucaccaucgagcuguccaacaucaaggagaacaagugcaacggcaccgacgccaaggugaagcucaucaagcaggagcuggacaaguacaagaacgcggucacggagcugcagcuccugaugcagagcaccccggccgccggcuccgggagcgcgaucgccuccggcaucgccgucugcaaggugcugcaccucgagggcgaggugaacaagaucaagaacgcccugcuguccaccaacaaggccgucgugagccucuccggcugcggggugagcguccugaccuucaaggugcuggaccucaagaacuacaucgacaagcagcugcugcccauccugaacaagcagagcugcuccaucagcaacaucgagaccgucaucgaguuccagcagaagaacaaccgccuccuggagaucacgcgggaguucagcgugaacgcgggcgugaccacccccgucuccaccuacaugcugacgaacagcgagcuccugucccugaucaacgacaugccgaucaccaacgaccagaagaagcucaugagcaacaacgugcagaucgugcgccagcaguccuacagcaucaugugcaucaucaaggaggagguccuggccuacguggugcagcugccccucuacggggucaucgacacccccugcuggaagcugcacaccagcccccugugcacgaccaacaccaaggagggcuccaacaucugccucacccggacggaccgcgggugguacugcgacaacgccggcagcguguccuucuucccgcaggccgagaccugcaagguccagagcaaccggguguucugcgacaccaugaacucccggacccugcccagcgaggugaaccucugcaacaucgacaucuucaaccccaaguacgacugcaagaucaugacguccaagaccgacgucagcuccagcgugaucaccucccugggcgccaucgugagcugcuacgggaagaccaagugcacggcgagcaacaagugccgcggcaucaucaagaccuucuccaacgggugcgacuacgucagcaacaagggcguggacaccguguccgucggcaacacccuguacuacgugaacaagcaggagggcaagagccucuacgugaagggggagcccaucaucaacuucuacgacccgcuggucuuccccuccgacgaguucgacgccagcaucucccaggugaacgagaagaucaaccagagccuggccuucauccggaaguccgacgagcuccugcacaacgugaacgucggcaagagcaccacgaacaucaugaucaccaccaucaucaucgugaucaucgugauccugcugcuccugaucgccgucgggcuguuccucuacugcaaggcccgcuga

SEQ ID NO: 17263 - RNA, 1548 nt, Artificial Sequence
  derived and/or modified CDS sequence (opt1) from HRSV(Memphis-37)__AIY60640.1__F-del_DSCav1_mut5
auggagcugcccauccucaagaccaacgccaucaccacgauccuggccgcggugacccugugcuucgccagcucccagaacaucaccgaggaguucuaccagagcacgugcuccgccgucagcaagggcuaccucuccgcccugcgcaccgggugguacaccagcgugaucaccaucgagcuguccaacaucaaggagaacaagugcaacggcaccgacgccaaggugaagcucaucaagcaggagcuggacaaguacaagaacgcggucacggagcugcagcuccugaugcagagcaccccggccgccggguccggcagcgccaucgcguccgggaucgccgugugcaaggugcugcaccucgagggcgaggucaacaagaucaagaacgcccugcugagcaccaacaaggccguggugucccucagcggcugcggggucuccgugcugaccuucaaggugcuggaccucaagaacuacaucgacaagcagcugcugcccauccucaacaagcagagcugcuccaucagcaacaucgagacggucaucgaguuccagcagaagaacaaccggcugcuggagaucacccgcgaguucuccgugaacgccggcgugaccacccccgucagcacguacaugcucaccaacagcgagcugcugucccucaucaacgacaugcccaucaccaacgaccagaagaagcugaugagcaacaacgugcagaucgugcggcagcaguccuacagcaucaugugcaucaucaaggaggagguccuggcguacguggugcagcucccgcuguacggggucaucgacacccccugcuggaagcugcacacgagcccccucugcaccaccaacaccaaggagggcuccaacaucugccugacgcgcaccgaccgggggugguacugcgacaacgccggcuccgugagcuucuucccccaggccgagaccugcaaggugcaguccaaccgcgucuucugcgacaccaugaacagccggacgcucccguccgaggugaaccugugcaacaucgacaucuucaaccccaaguacgacugcaagaucaugaccagcaagaccgacgucuccagcuccgugaucaccagccugggcgccaucguguccugcuacgggaagacgaagugcaccgccagcaacaagugccggggcaucaucaagaccuucuccaacgggugcgacuacgucagcaacaagggcguggacaccgugagcgucggcaacacgcucuacuacgugaacaagcaggaggggaagucccuguacgugaagggcgagcccaucaucaacuucuacgacccccuggucuucccgagcgacgaguucgacgcguccaucagccaggugaacgagaagaucaaccagucccucgccuucauccgcaagagcgacgagcugcugcacaacgugaacgucgggaaguccaccaccaacaucaugaucaccaccaucaucaucgugaucaucgugauccuccugcugcucaucgccgucggccuguuccuguacugcaaggcccgguga

SEQ ID NO: 17264 - RNA, 1548 nt, Artificial Sequence
  derived and/or modified CDS sequence (opt2) from HRSV(Memphis-37)__AIY60640.1__F-del_DSCav1_mut5
auggagcuccccauccucaagaccaacgccaucaccaccauccucgccgccgucacccucugcuucgccuccucccagaacaucaccgaggaguucuaccaguccaccugcuccgccgucuccaagggcuaccucuccgcccuccgcaccggcugguacaccuccgucaucaccaucgagcucuccaacaucaaggagaacaagugcaacggcaccgacgccaaggucaagcucaucaagcaggagcucgacaaguacaagaacgccgucaccgagcuccagcuccucaugcaguccacccccgccgccggcuccggcuccgccaucgccuccggcaucgccgucugcaagguccuccaccucgagggcgaggucaacaagaucaagaacgcccuccucuccaccaacaaggccgucgucucccucuccggcugcggcgucuccguccucaccuucaagguccucgaccucaagaacuacaucgacaagcagcuccuccccauccucaacaagcaguccugcuccaucuccaacaucgagaccgucaucgaguuccagcagaagaacaaccgccuccucgagaucacccgcgaguucuccgucaacgccggcgucaccacccccgucuccaccuacaugcucaccaacuccgagcuccucucccucaucaacgacaugcccaucaccaacgaccagaagaagcucauguccaacaacguccagaucguccgccagcaguccuacuccaucaugugcaucaucaaggaggagguccucgccuacgucguccagcucccccucuacggcgucaucgacacccccugcuggaagcuccacaccuccccccucugcaccaccaacaccaaggagggcuccaacaucugccucacccgcaccgaccgcggcugguacugcgacaacgccggcuccgucuccuucuucccccaggccgagaccugcaagguccaguccaaccgcgucuucugcgacaccaugaacucccgcacccuccccuccgaggucaaccucugcaacaucgacaucuucaaccccaaguacgacugcaagaucaugaccuccaagaccgacgucuccuccuccgucaucaccucccucggcgccaucgucuccugcuacggcaagaccaagugcaccgccuccaacaagugccgcggcaucaucaagaccuucuccaacggcugcgacuacgucuccaacaagggcgucgacaccgucuccgucggcaacacccucuacuacgucaacaagcaggagggcaagucccucuacgucaagggcgagcccaucaucaacuucuacgacccccucgucuuccccuccgacgaguucgacgccuccaucucccaggucaacgagaagaucaaccagucccucgccuucauccgcaaguccgacgagcuccuccacaacgucaacgucggcaaguccaccaccaacaucaugaucaccaccaucaucaucgucaucaucgucauccuccuccuccucaucgccgucggccucuuccucuacugcaaggcccgcuga

SEQ ID NO: 17265 - RNA, 1548 nt, Artificial Sequence
  derived and/or modified CDS sequence (opt3) from HRSV(Memphis-37)__AIY60640.1__F-del_DSCav1_mut5
auggagcugcccauccucaagaccaacgccauuacaacuauacuugcugcagugacgcugugcuucgccagcucccagaauaucaccgaagaguuuuaccaaucuacauguucagcggucaguaaaggcuauuugagcgcuuuaagaacugggugguacaccuccguuauuacaaucgaacugucuaacauuaaggagaauaaaugcaacggaaccgacgccaaggugaaacuaaucaagcaggaacucgauaaguauaaaaaugcaguaacugagcugcagcuucugaugcagucgaccccugccgcugguucaggcagcgcaauagccagugggaucgcuguguguaaggucuugcaccucgagggagaagugaacaaaauuaagaaugcccugcuguccacaaacaaagcgguugugucucucagcggcugcggugucuccguguuaacguucaagguacuggaccuuaagaauuacaucgauaaacaauugcugccaauucuaaacaagcagucauguaguaucagcaauauagagacuguuauugaauuucagcagaaaaacaauaggcuccuggagaucacccgggaguucucugugaacgcaggggucacaacuccgguguccaccuauaugcuuacaaauucagaacuguugagccucauuaacgacaugcccaucaccaacgaucaaaagaaacugaugaguaauaacgugcagaucguccgccagcagucuuacuccauuaugugcauaaucaaggaggaaguuuuagccuaugugguacaacugccucucuacggagugauugacacgccauguuggaaacuucauacuagcccccugugcacaaccaauacuaaggagggcucgaacaucuguuugacacgaaccgaucguggcugguacugcgacaaugcugggucugucuccuuuuucccucaggccgaaacguguaaggugcagucaaacagaguguuuugcgauaccaugaauaguagaacacugccaagcgaggugaaccucugcaauauagacauuuucaaccccaaauaugauuguaagaucaugacuuccaaaaccgacgucucuagcucagugaucacaagucugggagcaauuguauccugcuacgguaagacuaaauguaccgcuagcaauaagugcaggggcaucauuaagacauuuucuaacgggugugauuauguuucaaauaaaggaguggacaccgucagugugggcaacacucuuuacuaugucaauaagcaagaggguaaaagccuguacgugaagggggaaccuauaaucaacuucuaugacccauugguuuuuccguccgaugaguucgacgccucuauuucgcagguuaacgagaaaaucaaucagagccucgcguuuauccggaaguccgaugaacuguuacacaacguaaaugucggaaagucaacgacaaacauuaugauaaccacuaucauuaucgugauuaucguuauacugcuacuccugaucgccgugggccuuuucuuguacugcaaagcacgcuga

SEQ ID NO: 17266 - RNA, 1548 nt, Artificial Sequence
  derived and/or modified CDS sequence (opt4) from HRSV(Memphis-37)__AIY60640.1__F-del_DSCav1_mut5
auggagcugcccauccugaagaccaacgccaucaccaccauccuggccgccgugacccugugcuucgccagcagccagaacaucaccgaggaguucuaccagagcaccugcagcgccgugagcaagggcuaccugagcgcccugagaaccggcugguacaccagcgugaucaccaucgagcugagcaacaucaaggagaacaagugcaacggcaccgacgccaaggugaagcugaucaagcaggagcuggacaaguacaagaacgccgugaccgagcugcagcugcugaugcagagcacccccgccgccggcagcggcagcgccaucgccagcggcaucgccgugugcaaggugcugcaccuggagggcgaggugaacaagaucaagaacgcccugcugagcaccaacaaggccguggugagccugagcggcugcggcgugagcgugcugaccuucaaggugcuggaccugaagaacuacaucgacaagcagcugcugcccauccugaacaagcagagcugcagcaucagcaacaucgagaccgugaucgaguuccagcagaagaacaacagacugcuggagaucaccagagaguucagcgugaacgccggcgugaccacccccgugagcaccuacaugcugaccaacagcgagcugcugagccugaucaacgacaugcccaucaccaacgaccagaagaagcugaugagcaacaacgugcagaucgugagacagcagagcuacagcaucaugugcaucaucaaggaggaggugcuggccuacguggugcagcugccccuguacggcgugaucgacacccccugcuggaagcugcacaccagcccccugugcaccaccaacaccaaggagggcagcaacaucugccugaccagaaccgacagaggcugguacugcgacaacgccggcagcgugagcuucuucccccaggccgagaccugcaaggugcagagcaacagaguguucugcgacaccaugaacagcagaacccugcccagcgaggugaaccugugcaacaucgacaucuucaaccccaaguacgacugcaagaucaugaccagcaagaccgacgugagcagcagcgugaucaccagccugggcgccaucgugagcugcuacggcaagaccaagugcaccgccagcaacaagugcagaggcaucaucaagaccuucagcaacggcugcgacuacgugagcaacaagggcguggacaccgugagcgugggcaacacccuguacuacgugaacaagcaggagggcaagagccuguacgugaagggcgagcccaucaucaacuucuacgacccccugguguuccccagcgacgaguucgacgccagcaucagccaggugaacgagaagaucaaccagagccuggccuucaucagaaagagcgacgagcugcugcacaacgugaacgugggcaagagcaccaccaacaucaugaucaccaccaucaucaucgugaucaucgugauccugcugcugcugaucgccgugggccuguuccuguacugcaaggccagauga

SEQ ID NO: 17267 - RNA, 1548 nt, Artificial Sequence
  derived and/or modified CDS sequence (opt5) from HRSV(Memphis-37)__AIY60640.1__F-del_DSCav1_mut5
auggagcugcccauccucaagaccaacgccauuacaacgauccuggcugccgugacccuuugcuucgcgagcucccagaauauuacagaagaguuuuaccaaucuaccuguagcgcugucuccaaaggcuaucugucugcccucagaacagggugguacaccagcguuaucacaauugaacuguccaacaucaaggagaauaaaugcaacggaaccgacgccaaggugaaacuuaucaagcaggaacuggauaaguauaaaaaugcugugacggagcuccagcugcugaugcagucuaccccugccgcuggcagcggguccgccauugcgagcggaaucgccgucuguaaggugcuccaccuggagggcgaaguuaacaaaauuaagaaugcccuucugucuacaaacaaagcuguggucucccucagcgggugcggagugucuguucugaccuucaaggugcuugaccugaagaauuacaucgauaaacaacuccugccgauucugaacaagcaguccuguagcaucucuaauauugagacagucaucgaauuucagcagaaaaacaaucggcuccuggagaucacccgcgaguucuccgugaacgcuggcgugacgacacccgucagcaccuauaugcuuacaaauuccgaacugcucucucugauuaacgacaugccuaucaccaacgaucaaaagaaacuuaugagcaauaacguucagauugugagacagcaguccuacagcaucaugugcauuaucaaggaggaagugcuggccuaugucgugcaacucccccuguacggcguuaucgacaccccuuguuggaaacugcauacaucuccccucugcacgaccaauacaaaggagggguccaacauuugucugacccggacagaucgcggaugguacugcgacaaugcgggcagcgugagcuuuuucccucaggccgaaaccuguaagguccagucuaacagaguguuuugcgauacgaugaacuccagaacacugccgucugagguuaaucucugcaauaucgacauuuucaaccccaaauaugauuguaagaucaugaccagcaaaaccgacguguccagcucugucauuacaucccugggggcuaucgugagcugcuacggaaagaccaaauguacagccucuaauaagugccggggcaucauuaagacguuuuccaacgggugugauuaugucagcaauaaaggaguggacaccguuuccgugggcaacacacuuuacuaugucaauaagcaagagggcaaaucucuguacgugaagggggaaccuaucauuaacuucuaugacccccucguuuuuccuagcgaugaguucgacgcuuccaucucucaggugaacgagaaaauuaaucagagccuggccuuuauccgcaaguccgaugaacugcuccacaacgucaaugugggaaagagcaccacaaacauuaugaucaccacgaucauuaucgugauuaucguuauucugcuucugcucaucgccgucggccuguuccuguacugcaaagcuagauga

SEQ ID NO: 17268 - RNA, 1548 nt, Artificial Sequence
  derived and/or modified CDS sequence (opt6) from HRSV(Memphis-37)__AIY60640.1__F-del_DSCav1_mut5
auggaauuacccaucuuaaaaacaaaugcaauaacaacaauacuagcagccguaacauuaugcuucgccucaagccaaaacauaacagaagaauuuuaccaaagcacauguuccgccguaucaaaaggauaucucucagcacuacguacuggaugguauacauccguaaucacaauugaacuaucaaacauuaaagaaaacaaaugcaauggaacagaugcgaaaguaaaacuaauaaaacaagaauuagauaaauauaaaaaugcaguaaccgaacuacaacuacuaaugcaaucaacucccgcugccgguagcggauccgccauagcaagcggaauugcuguauguaaaguccuacaucuugaaggcgaagucaacaaaaucaaaaaugcauuacucucgaccaacaaagcagucguaucacuaucaggaugcggagucucaguauuaacuuuuaaaguccuugaccuaaaaaacuacauagacaaacaacuacuaccaauucuaaauaaacaaaguugcagcauauccaauaucgaaacaguuauagaauuucaacaaaaaaacaaccgccuacuagaaaucacuagagaauuuucaguaaaugcaggcguaaccacaccagucucuaccuauaugcuuaccaacucugaauuauuaucacuuauaaacgacaugcccauaacaaaugaucaaaaaaaacuaaugagcaacaacguacaaauaguaagacaacaaagcuacagcauuauguguauaauaaaagaagaaguguuagcuuauguaguccaacuaccccucuauggcguuaucgauacaccaugcuggaaauuacacacaagcccucuaugcacaacuaacaccaaagaaggcucuaacauaugcuuaacaagaacagauagaggaugguauugcgauaacgcaggaucaguaucauucuuuccacaagcagaaacauguaaaguacaaucuaaccgaguauucugcgacacaaugaacucuagaacacuacccucagaaguuaaucucuguaauauugacauuuucaauccaaaauacgauugcaaaauaaugaccucuaaaaccgacguaucauccucaguuauaacguccuuaggagcaaucguaagcugcuauggcaaaacaaaauguaccgcaucaaacaaaugcagaggaauaauaaaaacauucucaaacggcugugacuacguaagcaauaaagguguugacacaguuucaguaggaaauacacuauacuauguaaauaaacaagaaggaaaaucucucuauguaaaaggagaacccauaauaaacuucuacgacccacucguauuuccaagcgaugaauuugaugcgagcauuucccagguaaaugaaaaaauaaaucaaucacuagcauucaucagaaaaagugaugaauuacuacacaauguuaacguaggaaaaucaacaacaaauaucaugauaacaacaaucauaauagucauaaucguaauauuacuauuacuaauagcaguagguuuauuucuauacuguaaagcaagguaa

SEQ ID NO: 17269 - RNA, 1548 nt, Artificial Sequence
  derived and/or modified CDS sequence (opt11) from HRSV(Memphis-37)__AIY60640.1__F-del_DSCav1_mut5
auggaacuucccauccuaaaaaccaacgccauaacaacaauccucgcagcagucacccucugcuucgccucuucacaaaacaucaccgaagaauuuuaccaaucaaccugcuccgccguguccaaaggcuaccucucagcacugcgcacaggaugguauaccagcguaaucaccaucgaacucuccaacaucaaggaaaacaaaugcaacggcaccgaugccaaagucaaacucaucaagcaagaacuugacaaauacaaaaacgccgugaccgagcuacaacuccucaugcaguccacuccagccgccggcuccggcagcgccaucgccuccggcaucgccguaugcaaaguccuccaccucgaaggcgaaguaaacaaaaucaagaacgcacuccuaagcaccaacaaagccgucgucucacucuccgguugcggcgucagcguccuaacauucaaaguucucgaccucaaaaacuacauagacaaacaacuccuccccauccucaacaaacaauccugcuccauaucaaacaucgaaaccguuaucgaauuucaacaaaaaaacaaccgccuccuagaaaucacccgcgaauuuuccgucaacgcaggcgucaccacccccguuuccaccuauaugcucaccaacuccgaacuccucucccucaucaacgacaugcccauuaccaacgaccaaaagaaacuuaugagcaacaacguucaaaucguccgacaacaaucauacuccaucaugugcauuaucaaagaagaaguacucgccuacguaguacaauuaccccucuacggcguaaucgacaccccaugcuggaaacuacacaccuccccccucuguaccaccaacaccaaagaaggcucuaacaucugccucacccgcacagaccguggcugguauugcgauaacgcagggucugucuccuucuucccccaagccgaaacaugcaaaguccaauccaacagagucuucugcgacaccaugaacucgagaacccuccccuccgaagucaaccuaugcaacaucgacaucuucaacccaaaauacgacugcaaaaucaugacuucaaaaacagacgugagcucguccgucaucacaagccuaggagcuaucguauccugcuacggaaaaacaaaaugcacugcuuccaacaaaugccgcggaaucauaaaaaccuucuccaacggcugcgacuacgucagcaacaaaggcgucgacacagucuccguaggcaacacccuauacuacgucaauaaacaagaaggcaagucccuauaugucaaaggcgagcccaucaucaauuucuaugauccccucguuuucccauccgacgaauuugacgcauccaucucccaagucaacgaaaaaauaaaccaaagccucgcauucauccgcaaauccgacgaacuccuccacaacguaaacguaggaaaauccacaacuaacaucaugaucaccaccaucaucaucgucauuaucgucauccuacuccuccucauagcagucggccucuuccucuacugcaaagcacgcuag

SEQ ID NO: 17270 - RNA, 1824 nt, Artificial Sequence
  mRNA product Design a-1 comprising derived and/or modified sequence from HRSV(Memphis-37)__AIY60640.1__F-del_DSCav1_mut5 (opt1)
gggagagucccgcagucggcguccagcggcucugcuuguucgugugugugucguugcaggccuuauucaagcuuaccauggagcugcccauccucaagaccaacgccaucaccacgauccuggccgcggugacccugugcuucgccagcucccagaacaucaccgaggaguucuaccagagcacgugcuccgccgucagcaagggcuaccucuccgcccugcgcaccgggugguacaccagcgugaucaccaucgagcuguccaacaucaaggagaacaagugcaacggcaccgacgccaaggugaagcucaucaagcaggagcuggacaaguacaagaacgcggucacggagcugcagcuccugaugcagagcaccccggccgccggcuccgggagcgcgaucgccuccggcaucgccgucugcaaggugcugcaccucgagggcgaggugaacaagaucaagaacgcccugcuguccaccaacaaggccgucgugagccucuccggcugcggggugagcguccugaccuucaaggugcuggaccucaagaacuacaucgacaagcagcugcugcccauccugaacaagcagagcugcuccaucagcaacaucgagaccgucaucgaguuccagcagaagaacaaccgccuccuggagaucacgcgggaguucagcgugaacgcgggcgugaccacccccgucuccaccuacaugcugacgaacagcgagcuccugucccugaucaacgacaugccgaucaccaacgaccagaagaagcucaugagcaacaacgugcagaucgugcgccagcaguccuacagcaucaugugcaucaucaaggaggagguccuggccuacguggugcagcugccccucuacggggucaucgacacccccugcuggaagcugcacaccagcccccugugcacgaccaacaccaaggagggcuccaacaucugccucacccggacggaccgcgggugguacugcgacaacgccggcagcguguccuucuucccgcaggccgagaccugcaagguccagagcaaccggguguucugcgacaccaugaacucccggacccugcccagcgaggugaaccucugcaacaucgacaucuucaaccccaaguacgacugcaagaucaugacguccaagaccgacgucagcuccagcgugaucaccucccugggcgccaucgugagcugcuacgggaagaccaagugcacggcgagcaacaagugccgcggcaucaucaagaccuucuccaacgggugcgacuacgucagcaacaagggcguggacaccguguccgucggcaacacccuguacuacgugaacaagcaggagggcaagagccucuacgugaagggggagcccaucaucaacuucuacgacccgcuggucuuccccuccgacgaguucgacgccagcaucucccaggugaacgagaagaucaaccagagccuggccuucauccggaaguccgacgagcuccugcacaacgugaacgucggcaagagcaccacgaacaucaugaucaccaccaucaucaucgugaucaucgugauccugcugcuccugaucgccgucgggcuguuccucuacugcaaggcccgcugaggacuagucccuguucccagagcccacuuuuuuuucuuuuuuugaaauaaaauagccugucuuucagaucuaaaaaaaaaaaaaaaaaaaaaaaaaaaaaaaaaaaaaaaaaaaaaaaaaaaaaaaaaaaaaaaaugcaucccccccccccccccccccccccccccccccaaaggcucuuuucagagccaccagaauu

SEQ ID NO: 17271 - RNA, 1824 nt, Artificial Sequence
  mRNA product Design a-1 comprising derived and/or modified sequence from HRSV(Memphis-37)__AIY60640.1__F-del_DSCav1_mut5 (opt1)
gggagagucccgcagucggcguccagcggcucugcuuguucgugugugugucguugcaggccuuauucaagcuuaccauggagcugcccauccucaagaccaacgccaucaccacgauccuggccgcggugacccugugcuucgccagcucccagaacaucaccgaggaguucuaccagagcacgugcuccgccgucagcaagggcuaccucuccgcccugcgcaccgggugguacaccagcgugaucaccaucgagcuguccaacaucaaggagaacaagugcaacggcaccgacgccaaggugaagcucaucaagcaggagcuggacaaguacaagaacgcggucacggagcugcagcuccugaugcagagcaccccggccgccggguccggcagcgccaucgcguccgggaucgccgugugcaaggugcugcaccucgagggcgaggucaacaagaucaagaacgcccugcugagcaccaacaaggccguggugucccucagcggcugcggggucuccgugcugaccuucaaggugcuggaccucaagaacuacaucgacaagcagcugcugcccauccucaacaagcagagcugcuccaucagcaacaucgagacggucaucgaguuccagcagaagaacaaccggcugcuggagaucacccgcgaguucuccgugaacgccggcgugaccacccccgucagcacguacaugcucaccaacagcgagcugcugucccucaucaacgacaugcccaucaccaacgaccagaagaagcugaugagcaacaacgugcagaucgugcggcagcaguccuacagcaucaugugcaucaucaaggaggagguccuggcguacguggugcagcucccgcuguacggggucaucgacacccccugcuggaagcugcacacgagcccccucugcaccaccaacaccaaggagggcuccaacaucugccugacgcgcaccgaccgggggugguacugcgacaacgccggcuccgugagcuucuucccccaggccgagaccugcaaggugcaguccaaccgcgucuucugcgacaccaugaacagccggacgcucccguccgaggugaaccugugcaacaucgacaucuucaaccccaaguacgacugcaagaucaugaccagcaagaccgacgucuccagcuccgugaucaccagccugggcgccaucguguccugcuacgggaagacgaagugcaccgccagcaacaagugccggggcaucaucaagaccuucuccaacgggugcgacuacgucagcaacaagggcguggacaccgugagcgucggcaacacgcucuacuacgugaacaagcaggaggggaagucccuguacgugaagggcgagcccaucaucaacuucuacgacccccuggucuucccgagcgacgaguucgacgcguccaucagccaggugaacgagaagaucaaccagucccucgccuucauccgcaagagcgacgagcugcugcacaacgugaacgucgggaaguccaccaccaacaucaugaucaccaccaucaucaucgugaucaucgugauccuccugcugcucaucgccgucggccuguuccuguacugcaaggcccggugaggacuagucccuguucccagagcccacuuuuuuuucuuuuuuugaaauaaaauagccugucuuucagaucuaaaaaaaaaaaaaaaaaaaaaaaaaaaaaaaaaaaaaaaaaaaaaaaaaaaaaaaaaaaaaaaaugcaucccccccccccccccccccccccccccccccaaaggcucuuuucagagccaccagaauu

SEQ ID NO: 17272 - RNA, 1824 nt, Artificial Sequence
  mRNA product Design a-1 comprising derived and/or modified sequence from HRSV(Memphis-37)__AIY60640.1__F-del_DSCav1_mut5 (opt2)
gggagagucccgcagucggcguccagcggcucugcuuguucgugugugugucguugcaggccuuauucaagcuuaccauggagcuccccauccucaagaccaacgccaucaccaccauccucgccgccgucacccucugcuucgccuccucccagaacaucaccgaggaguucuaccaguccaccugcuccgccgucuccaagggcuaccucuccgcccuccgcaccggcugguacaccuccgucaucaccaucgagcucuccaacaucaaggagaacaagugcaacggcaccgacgccaaggucaagcucaucaagcaggagcucgacaaguacaagaacgccgucaccgagcuccagcuccucaugcaguccacccccgccgccggcuccggcuccgccaucgccuccggcaucgccgucugcaagguccuccaccucgagggcgaggucaacaagaucaagaacgcccuccucuccaccaacaaggccgucgucucccucuccggcugcggcgucuccguccucaccuucaagguccucgaccucaagaacuacaucgacaagcagcuccuccccauccucaacaagcaguccugcuccaucuccaacaucgagaccgucaucgaguuccagcagaagaacaaccgccuccucgagaucacccgcgaguucuccgucaacgccggcgucaccacccccgucuccaccuacaugcucaccaacuccgagcuccucucccucaucaacgacaugcccaucaccaacgaccagaagaagcucauguccaacaacguccagaucguccgccagcaguccuacuccaucaugugcaucaucaaggaggagguccucgccuacgucguccagcucccccucuacggcgucaucgacacccccugcuggaagcuccacaccuccccccucugcaccaccaacaccaaggagggcuccaacaucugccucacccgcaccgaccgcggcugguacugcgacaacgccggcuccgucuccuucuucccccaggccgagaccugcaagguccaguccaaccgcgucuucugcgacaccaugaacucccgcacccuccccuccgaggucaaccucugcaacaucgacaucuucaaccccaaguacgacugcaagaucaugaccuccaagaccgacgucuccuccuccgucaucaccucccucggcgccaucgucuccugcuacggcaagaccaagugcaccgccuccaacaagugccgcggcaucaucaagaccuucuccaacggcugcgacuacgucuccaacaagggcgucgacaccgucuccgucggcaacacccucuacuacgucaacaagcaggagggcaagucccucuacgucaagggcgagcccaucaucaacuucuacgacccccucgucuuccccuccgacgaguucgacgccuccaucucccaggucaacgagaagaucaaccagucccucgccuucauccgcaaguccgacgagcuccuccacaacgucaacgucggcaaguccaccaccaacaucaugaucaccaccaucaucaucgucaucaucgucauccuccuccuccucaucgccgucggccucuuccucuacugcaaggcccgcugaggacuagucccuguucccagagcccacuuuuuuuucuuuuuuugaaauaaaauagccugucuuucagaucuaaaaaaaaaaaaaaaaaaaaaaaaaaaaaaaaaaaaaaaaaaaaaaaaaaaaaaaaaaaaaaaaugcaucccccccccccccccccccccccccccccccaaaggcucuuuucagagccaccagaauu

SEQ ID NO: 17273 - RNA, 1824 nt, Artificial Sequence
  mRNA product Design a-1 comprising derived and/or modified sequence from HRSV(Memphis-37)__AIY60640.1__F-del_DSCav1_mut5 (opt3)
gggagagucccgcagucggcguccagcggcucugcuuguucgugugugugucguugcaggccuuauucaagcuuaccauggagcugcccauccucaagaccaacgccauuacaacuauacuugcugcagugacgcugugcuucgccagcucccagaauaucaccgaagaguuuuaccaaucuacauguucagcggucaguaaaggcuauuugagcgcuuuaagaacugggugguacaccuccguuauuacaaucgaacugucuaacauuaaggagaauaaaugcaacggaaccgacgccaaggugaaacuaaucaagcaggaacucgauaaguauaaaaaugcaguaacugagcugcagcuucugaugcagucgaccccugccgcugguucaggcagcgcaauagccagugggaucgcuguguguaaggucuugcaccucgagggagaagugaacaaaauuaagaaugcccugcuguccacaaacaaagcgguugugucucucagcggcugcggugucuccguguuaacguucaagguacuggaccuuaagaauuacaucgauaaacaauugcugccaauucuaaacaagcagucauguaguaucagcaauauagagacuguuauugaauuucagcagaaaaacaauaggcuccuggagaucacccgggaguucucugugaacgcaggggucacaacuccgguguccaccuauaugcuuacaaauucagaacuguugagccucauuaacgacaugcccaucaccaacgaucaaaagaaacugaugaguaauaacgugcagaucguccgccagcagucuuacuccauuaugugcauaaucaaggaggaaguuuuagccuaugugguacaacugccucucuacggagugauugacacgccauguuggaaacuucauacuagcccccugugcacaaccaauacuaaggagggcucgaacaucuguuugacacgaaccgaucguggcugguacugcgacaaugcugggucugucuccuuuuucccucaggccgaaacguguaaggugcagucaaacagaguguuuugcgauaccaugaauaguagaacacugccaagcgaggugaaccucugcaauauagacauuuucaaccccaaauaugauuguaagaucaugacuuccaaaaccgacgucucuagcucagugaucacaagucugggagcaauuguauccugcuacgguaagacuaaauguaccgcuagcaauaagugcaggggcaucauuaagacauuuucuaacgggugugauuauguuucaaauaaaggaguggacaccgucagugugggcaacacucuuuacuaugucaauaagcaagaggguaaaagccuguacgugaagggggaaccuauaaucaacuucuaugacccauugguuuuuccguccgaugaguucgacgccucuauuucgcagguuaacgagaaaaucaaucagagccucgcguuuauccggaaguccgaugaacuguuacacaacguaaaugucggaaagucaacgacaaacauuaugauaaccacuaucauuaucgugauuaucguuauacugcuacuccugaucgccgugggccuuuucuuguacugcaaagcacgcugaggacuagucccuguucccagagcccacuuuuuuuucuuuuuuugaaauaaaauagccugucuuucagaucuaaaaaaaaaaaaaaaaaaaaaaaaaaaaaaaaaaaaaaaaaaaaaaaaaaaaaaaaaaaaaaaaugcaucccccccccccccccccccccccccccccccaaaggcucuuuucagagccaccagaauu

SEQ ID NO: 17274 - RNA, 1824 nt, Artificial Sequence
  mRNA product Design a-1 comprising derived and/or modified sequence from HRSV(Memphis-37)__AIY60640.1__F-del_DSCav1_mut5 (opt4)
gggagagucccgcagucggcguccagcggcucugcuuguucgugugugugucguugcaggccuuauucaagcuuaccauggagcugcccauccugaagaccaacgccaucaccaccauccuggccgccgugacccugugcuucgccagcagccagaacaucaccgaggaguucuaccagagcaccugcagcgccgugagcaagggcuaccugagcgcccugagaaccggcugguacaccagcgugaucaccaucgagcugagcaacaucaaggagaacaagugcaacggcaccgacgccaaggugaagcugaucaagcaggagcuggacaaguacaagaacgccgugaccgagcugcagcugcugaugcagagcacccccgccgccggcagcggcagcgccaucgccagcggcaucgccgugugcaaggugcugcaccuggagggcgaggugaacaagaucaagaacgcccugcugagcaccaacaaggccguggugagccugagcggcugcggcgugagcgugcugaccuucaaggugcuggaccugaagaacuacaucgacaagcagcugcugcccauccugaacaagcagagcugcagcaucagcaacaucgagaccgugaucgaguuccagcagaagaacaacagacugcuggagaucaccagagaguucagcgugaacgccggcgugaccacccccgugagcaccuacaugcugaccaacagcgagcugcugagccugaucaacgacaugcccaucaccaacgaccagaagaagcugaugagcaacaacgugcagaucgugagacagcagagcuacagcaucaugugcaucaucaaggaggaggugcuggccuacguggugcagcugccccuguacggcgugaucgacacccccugcuggaagcugcacaccagcccccugugcaccaccaacaccaaggagggcagcaacaucugccugaccagaaccgacagaggcugguacugcgacaacgccggcagcgugagcuucuucccccaggccgagaccugcaaggugcagagcaacagaguguucugcgacaccaugaacagcagaacccugcccagcgaggugaaccugugcaacaucgacaucuucaaccccaaguacgacugcaagaucaugaccagcaagaccgacgugagcagcagcgugaucaccagccugggcgccaucgugagcugcuacggcaagaccaagugcaccgccagcaacaagugcagaggcaucaucaagaccuucagcaacggcugcgacuacgugagcaacaagggcguggacaccgugagcgugggcaacacccuguacuacgugaacaagcaggagggcaagagccuguacgugaagggcgagcccaucaucaacuucuacgacccccugguguuccccagcgacgaguucgacgccagcaucagccaggugaacgagaagaucaaccagagccuggccuucaucagaaagagcgacgagcugcugcacaacgugaacgugggcaagagcaccaccaacaucaugaucaccaccaucaucaucgugaucaucgugauccugcugcugcugaucgccgugggccuguuccuguacugcaaggccagaugaggacuagucccuguucccagagcccacuuuuuuuucuuuuuuugaaauaaaauagccugucuuucagaucuaaaaaaaaaaaaaaaaaaaaaaaaaaaaaaaaaaaaaaaaaaaaaaaaaaaaaaaaaaaaaaaaugcaucccccccccccccccccccccccccccccccaaaggcucuuuucagagccaccagaauu

SEQ ID NO: 17275 - RNA, 1824 nt, Artificial Sequence
  mRNA product Design a-1 comprising derived and/or modified sequence from HRSV(Memphis-37)__AIY60640.1__F-del_DSCav1_mut5 (opt5)
gggagagucccgcagucggcguccagcggcucugcuuguucgugugugugucguugcaggccuuauucaagcuuaccauggagcugcccauccucaagaccaacgccauuacaacgauccuggcugccgugacccuuugcuucgcgagcucccagaauauuacagaagaguuuuaccaaucuaccuguagcgcugucuccaaaggcuaucugucugcccucagaacagggugguacaccagcguuaucacaauugaacuguccaacaucaaggagaauaaaugcaacggaaccgacgccaaggugaaacuuaucaagcaggaacuggauaaguauaaaaaugcugugacggagcuccagcugcugaugcagucuaccccugccgcuggcagcggguccgccauugcgagcggaaucgccgucuguaaggugcuccaccuggagggcgaaguuaacaaaauuaagaaugcccuucugucuacaaacaaagcuguggucucccucagcgggugcggagugucuguucugaccuucaaggugcuugaccugaagaauuacaucgauaaacaacuccugccgauucugaacaagcaguccuguagcaucucuaauauugagacagucaucgaauuucagcagaaaaacaaucggcuccuggagaucacccgcgaguucuccgugaacgcuggcgugacgacacccgucagcaccuauaugcuuacaaauuccgaacugcucucucugauuaacgacaugccuaucaccaacgaucaaaagaaacuuaugagcaauaacguucagauugugagacagcaguccuacagcaucaugugcauuaucaaggaggaagugcuggccuaugucgugcaacucccccuguacggcguuaucgacaccccuuguuggaaacugcauacaucuccccucugcacgaccaauacaaaggagggguccaacauuugucugacccggacagaucgcggaugguacugcgacaaugcgggcagcgugagcuuuuucccucaggccgaaaccuguaagguccagucuaacagaguguuuugcgauacgaugaacuccagaacacugccgucugagguuaaucucugcaauaucgacauuuucaaccccaaauaugauuguaagaucaugaccagcaaaaccgacguguccagcucugucauuacaucccugggggcuaucgugagcugcuacggaaagaccaaauguacagccucuaauaagugccggggcaucauuaagacguuuuccaacgggugugauuaugucagcaauaaaggaguggacaccguuuccgugggcaacacacuuuacuaugucaauaagcaagagggcaaaucucuguacgugaagggggaaccuaucauuaacuucuaugacccccucguuuuuccuagcgaugaguucgacgcuuccaucucucaggugaacgagaaaauuaaucagagccuggccuuuauccgcaaguccgaugaacugcuccacaacgucaaugugggaaagagcaccacaaacauuaugaucaccacgaucauuaucgugauuaucguuauucugcuucugcucaucgccgucggccuguuccuguacugcaaagcuagaugaggacuagucccuguucccagagcccacuuuuuuuucuuuuuuugaaauaaaauagccugucuuucagaucuaaaaaaaaaaaaaaaaaaaaaaaaaaaaaaaaaaaaaaaaaaaaaaaaaaaaaaaaaaaaaaaaugcaucccccccccccccccccccccccccccccccaaaggcucuuuucagagccaccagaauu

SEQ ID NO: 17276 - RNA, 1824 nt, Artificial Sequence
  mRNA product Design a-1 comprising derived and/or modified sequence from HRSV(Memphis-37)__AIY60640.1__F-del_DSCav1_mut5 (opt6)
gggagagucccgcagucggcguccagcggcucugcuuguucgugugugugucguugcaggccuuauucaagcuuaccauggaauuacccaucuuaaaaacaaaugcaauaacaacaauacuagcagccguaacauuaugcuucgccucaagccaaaacauaacagaagaauuuuaccaaagcacauguuccgccguaucaaaaggauaucucucagcacuacguacuggaugguauacauccguaaucacaauugaacuaucaaacauuaaagaaaacaaaugcaauggaacagaugcgaaaguaaaacuaauaaaacaagaauuagauaaauauaaaaaugcaguaaccgaacuacaacuacuaaugcaaucaacucccgcugccgguagcggauccgccauagcaagcggaauugcuguauguaaaguccuacaucuugaaggcgaagucaacaaaaucaaaaaugcauuacucucgaccaacaaagcagucguaucacuaucaggaugcggagucucaguauuaacuuuuaaaguccuugaccuaaaaaacuacauagacaaacaacuacuaccaauucuaaauaaacaaaguugcagcauauccaauaucgaaacaguuauagaauuucaacaaaaaaacaaccgccuacuagaaaucacuagagaauuuucaguaaaugcaggcguaaccacaccagucucuaccuauaugcuuaccaacucugaauuauuaucacuuauaaacgacaugcccauaacaaaugaucaaaaaaaacuaaugagcaacaacguacaaauaguaagacaacaaagcuacagcauuauguguauaauaaaagaagaaguguuagcuuauguaguccaacuaccccucuauggcguuaucgauacaccaugcuggaaauuacacacaagcccucuaugcacaacuaacaccaaagaaggcucuaacauaugcuuaacaagaacagauagaggaugguauugcgauaacgcaggaucaguaucauucuuuccacaagcagaaacauguaaaguacaaucuaaccgaguauucugcgacacaaugaacucuagaacacuacccucagaaguuaaucucuguaauauugacauuuucaauccaaaauacgauugcaaaauaaugaccucuaaaaccgacguaucauccucaguuauaacguccuuaggagcaaucguaagcugcuauggcaaaacaaaauguaccgcaucaaacaaaugcagaggaauaauaaaaacauucucaaacggcugugacuacguaagcaauaaagguguugacacaguuucaguaggaaauacacuauacuauguaaauaaacaagaaggaaaaucucucuauguaaaaggagaacccauaauaaacuucuacgacccacucguauuuccaagcgaugaauuugaugcgagcauuucccagguaaaugaaaaaauaaaucaaucacuagcauucaucagaaaaagugaugaauuacuacacaauguuaacguaggaaaaucaacaacaaauaucaugauaacaacaaucauaauagucauaaucguaauauuacuauuacuaauagcaguagguuuauuucuauacuguaaagcaagguaaggacuagucccuguucccagagcccacuuuuuuuucuuuuuuugaaauaaaauagccugucuuucagaucuaaaaaaaaaaaaaaaaaaaaaaaaaaaaaaaaaaaaaaaaaaaaaaaaaaaaaaaaaaaaaaaaugcaucccccccccccccccccccccccccccccccaaaggcucuuuucagagccaccagaauu

SEQ ID NO: 17277 - RNA, 1824 nt, Artificial Sequence
  mRNA product Design a-1 comprising derived and/or modified sequence from HRSV(Memphis-37)__AIY60640.1__F-del_DSCav1_mut5 (opt11)
gggagagucccgcagucggcguccagcggcucugcuuguucgugugugugucguugcaggccuuauucaagcuuaccauggaacuucccauccuaaaaaccaacgccauaacaacaauccucgcagcagucacccucugcuucgccucuucacaaaacaucaccgaagaauuuuaccaaucaaccugcuccgccguguccaaaggcuaccucucagcacugcgcacaggaugguauaccagcguaaucaccaucgaacucuccaacaucaaggaaaacaaaugcaacggcaccgaugccaaagucaaacucaucaagcaagaacuugacaaauacaaaaacgccgugaccgagcuacaacuccucaugcaguccacuccagccgccggcuccggcagcgccaucgccuccggcaucgccguaugcaaaguccuccaccucgaaggcgaaguaaacaaaaucaagaacgcacuccuaagcaccaacaaagccgucgucucacucuccgguugcggcgucagcguccuaacauucaaaguucucgaccucaaaaacuacauagacaaacaacuccuccccauccucaacaaacaauccugcuccauaucaaacaucgaaaccguuaucgaauuucaacaaaaaaacaaccgccuccuagaaaucacccgcgaauuuuccgucaacgcaggcgucaccacccccguuuccaccuauaugcucaccaacuccgaacuccucucccucaucaacgacaugcccauuaccaacgaccaaaagaaacuuaugagcaacaacguucaaaucguccgacaacaaucauacuccaucaugugcauuaucaaagaagaaguacucgccuacguaguacaauuaccccucuacggcguaaucgacaccccaugcuggaaacuacacaccuccccccucuguaccaccaacaccaaagaaggcucuaacaucugccucacccgcacagaccguggcugguauugcgauaacgcagggucugucuccuucuucccccaagccgaaacaugcaaaguccaauccaacagagucuucugcgacaccaugaacucgagaacccuccccuccgaagucaaccuaugcaacaucgacaucuucaacccaaaauacgacugcaaaaucaugacuucaaaaacagacgugagcucguccgucaucacaagccuaggagcuaucguauccugcuacggaaaaacaaaaugcacugcuuccaacaaaugccgcggaaucauaaaaaccuucuccaacggcugcgacuacgucagcaacaaaggcgucgacacagucuccguaggcaacacccuauacuacgucaauaaacaagaaggcaagucccuauaugucaaaggcgagcccaucaucaauuucuaugauccccucguuuucccauccgacgaauuugacgcauccaucucccaagucaacgaaaaaauaaaccaaagccucgcauucauccgcaaauccgacgaacuccuccacaacguaaacguaggaaaauccacaacuaacaucaugaucaccaccaucaucaucgucauuaucgucauccuacuccuccucauagcagucggccucuuccucuacugcaaagcacgcuagggacuagucccuguucccagagcccacuuuuuuuucuuuuuuugaaauaaaauagccugucuuucagaucuaaaaaaaaaaaaaaaaaaaaaaaaaaaaaaaaaaaaaaaaaaaaaaaaaaaaaaaaaaaaaaaaugcaucccccccccccccccccccccccccccccccaaaggcucuuuucagagccaccagaauu

SEQ ID NO: 17278 - RNA, 1843 nt, Artificial Sequence
  mRNA product Design a-2 comprising derived and/or modified sequence from HRSV(Memphis-37)__AIY60640.1__F-del_DSCav1_mut5 (opt1)
gggagaguccgcucagccagguugcagaagcggcuuagcguguguccuaaucuucucucugcguguagguaggccugugccgcaaacaagcuuaccauggagcugcccauccucaagaccaacgccaucaccacgauccuggccgcggugacccugugcuucgccagcucccagaacaucaccgaggaguucuaccagagcacgugcuccgccgucagcaagggcuaccucuccgcccugcgcaccgggugguacaccagcgugaucaccaucgagcuguccaacaucaaggagaacaagugcaacggcaccgacgccaaggugaagcucaucaagcaggagcuggacaaguacaagaacgcggucacggagcugcagcuccugaugcagagcaccccggccgccggcuccgggagcgcgaucgccuccggcaucgccgucugcaaggugcugcaccucgagggcgaggugaacaagaucaagaacgcccugcuguccaccaacaaggccgucgugagccucuccggcugcggggugagcguccugaccuucaaggugcuggaccucaagaacuacaucgacaagcagcugcugcccauccugaacaagcagagcugcuccaucagcaacaucgagaccgucaucgaguuccagcagaagaacaaccgccuccuggagaucacgcgggaguucagcgugaacgcgggcgugaccacccccgucuccaccuacaugcugacgaacagcgagcuccugucccugaucaacgacaugccgaucaccaacgaccagaagaagcucaugagcaacaacgugcagaucgugcgccagcaguccuacagcaucaugugcaucaucaaggaggagguccuggccuacguggugcagcugccccucuacggggucaucgacacccccugcuggaagcugcacaccagcccccugugcacgaccaacaccaaggagggcuccaacaucugccucacccggacggaccgcgggugguacugcgacaacgccggcagcguguccuucuucccgcaggccgagaccugcaagguccagagcaaccggguguucugcgacaccaugaacucccggacccugcccagcgaggugaaccucugcaacaucgacaucuucaaccccaaguacgacugcaagaucaugacguccaagaccgacgucagcuccagcgugaucaccucccugggcgccaucgugagcugcuacgggaagaccaagugcacggcgagcaacaagugccgcggcaucaucaagaccuucuccaacgggugcgacuacgucagcaacaagggcguggacaccguguccgucggcaacacccuguacuacgugaacaagcaggagggcaagagccucuacgugaagggggagcccaucaucaacuucuacgacccgcuggucuuccccuccgacgaguucgacgccagcaucucccaggugaacgagaagaucaaccagagccuggccuucauccggaaguccgacgagcuccugcacaacgugaacgucggcaagagcaccacgaacaucaugaucaccaccaucaucaucgugaucaucgugauccugcugcuccugaucgccgucgggcuguuccucuacugcaaggcccgcugaggacuagucccuguucccagagcccacuuuuuuuucuuuuuuugaaauaaaauagccugucuuucagaucuaaaaaaaaaaaaaaaaaaaaaaaaaaaaaaaaaaaaaaaaaaaaaaaaaaaaaaaaaaaaaaaaugcaucccccccccccccccccccccccccccccccaaaggcucuuuucagagccaccagaauu

SEQ ID NO: 17279 - RNA, 1843 nt, Artificial Sequence
  mRNA product Design a-2 comprising derived and/or modified sequence from HRSV(Memphis-37)__AIY60640.1__F-del_DSCav1_mut5 (opt1)
gggagaguccgcucagccagguugcagaagcggcuuagcguguguccuaaucuucucucugcguguagguaggccugugccgcaaacaagcuuaccauggagcugcccauccucaagaccaacgccaucaccacgauccuggccgcggugacccugugcuucgccagcucccagaacaucaccgaggaguucuaccagagcacgugcuccgccgucagcaagggcuaccucuccgcccugcgcaccgggugguacaccagcgugaucaccaucgagcuguccaacaucaaggagaacaagugcaacggcaccgacgccaaggugaagcucaucaagcaggagcuggacaaguacaagaacgcggucacggagcugcagcuccugaugcagagcaccccggccgccggguccggcagcgccaucgcguccgggaucgccgugugcaaggugcugcaccucgagggcgaggucaacaagaucaagaacgcccugcugagcaccaacaaggccguggugucccucagcggcugcggggucuccgugcugaccuucaaggugcuggaccucaagaacuacaucgacaagcagcugcugcccauccucaacaagcagagcugcuccaucagcaacaucgagacggucaucgaguuccagcagaagaacaaccggcugcuggagaucacccgcgaguucuccgugaacgccggcgugaccacccccgucagcacguacaugcucaccaacagcgagcugcugucccucaucaacgacaugcccaucaccaacgaccagaagaagcugaugagcaacaacgugcagaucgugcggcagcaguccuacagcaucaugugcaucaucaaggaggagguccuggcguacguggugcagcucccgcuguacggggucaucgacacccccugcuggaagcugcacacgagcccccucugcaccaccaacaccaaggagggcuccaacaucugccugacgcgcaccgaccgggggugguacugcgacaacgccggcuccgugagcuucuucccccaggccgagaccugcaaggugcaguccaaccgcgucuucugcgacaccaugaacagccggacgcucccguccgaggugaaccugugcaacaucgacaucuucaaccccaaguacgacugcaagaucaugaccagcaagaccgacgucuccagcuccgugaucaccagccugggcgccaucguguccugcuacgggaagacgaagugcaccgccagcaacaagugccggggcaucaucaagaccuucuccaacgggugcgacuacgucagcaacaagggcguggacaccgugagcgucggcaacacgcucuacuacgugaacaagcaggaggggaagucccuguacgugaagggcgagcccaucaucaacuucuacgacccccuggucuucccgagcgacgaguucgacgcguccaucagccaggugaacgagaagaucaaccagucccucgccuucauccgcaagagcgacgagcugcugcacaacgugaacgucgggaaguccaccaccaacaucaugaucaccaccaucaucaucgugaucaucgugauccuccugcugcucaucgccgucggccuguuccuguacugcaaggcccggugaggacuagucccuguucccagagcccacuuuuuuuucuuuuuuugaaauaaaauagccugucuuucagaucuaaaaaaaaaaaaaaaaaaaaaaaaaaaaaaaaaaaaaaaaaaaaaaaaaaaaaaaaaaaaaaaaugcaucccccccccccccccccccccccccccccccaaaggcucuuuucagagccaccagaauu

SEQ ID NO: 17280 - RNA, 1843 nt, Artificial Sequence
  mRNA product Design a-2 comprising derived and/or modified sequence from HRSV(Memphis-37)__AIY60640.1__F-del_DSCav1_mut5 (opt2)
gggagaguccgcucagccagguugcagaagcggcuuagcguguguccuaaucuucucucugcguguagguaggccugugccgcaaacaagcuuaccauggagcuccccauccucaagaccaacgccaucaccaccauccucgccgccgucacccucugcuucgccuccucccagaacaucaccgaggaguucuaccaguccaccugcuccgccgucuccaagggcuaccucuccgcccuccgcaccggcugguacaccuccgucaucaccaucgagcucuccaacaucaaggagaacaagugcaacggcaccgacgccaaggucaagcucaucaagcaggagcucgacaaguacaagaacgccgucaccgagcuccagcuccucaugcaguccacccccgccgccggcuccggcuccgccaucgccuccggcaucgccgucugcaagguccuccaccucgagggcgaggucaacaagaucaagaacgcccuccucuccaccaacaaggccgucgucucccucuccggcugcggcgucuccguccucaccuucaagguccucgaccucaagaacuacaucgacaagcagcuccuccccauccucaacaagcaguccugcuccaucuccaacaucgagaccgucaucgaguuccagcagaagaacaaccgccuccucgagaucacccgcgaguucuccgucaacgccggcgucaccacccccgucuccaccuacaugcucaccaacuccgagcuccucucccucaucaacgacaugcccaucaccaacgaccagaagaagcucauguccaacaacguccagaucguccgccagcaguccuacuccaucaugugcaucaucaaggaggagguccucgccuacgucguccagcucccccucuacggcgucaucgacacccccugcuggaagcuccacaccuccccccucugcaccaccaacaccaaggagggcuccaacaucugccucacccgcaccgaccgcggcugguacugcgacaacgccggcuccgucuccuucuucccccaggccgagaccugcaagguccaguccaaccgcgucuucugcgacaccaugaacucccgcacccuccccuccgaggucaaccucugcaacaucgacaucuucaaccccaaguacgacugcaagaucaugaccuccaagaccgacgucuccuccuccgucaucaccucccucggcgccaucgucuccugcuacggcaagaccaagugcaccgccuccaacaagugccgcggcaucaucaagaccuucuccaacggcugcgacuacgucuccaacaagggcgucgacaccgucuccgucggcaacacccucuacuacgucaacaagcaggagggcaagucccucuacgucaagggcgagcccaucaucaacuucuacgacccccucgucuuccccuccgacgaguucgacgccuccaucucccaggucaacgagaagaucaaccagucccucgccuucauccgcaaguccgacgagcuccuccacaacgucaacgucggcaaguccaccaccaacaucaugaucaccaccaucaucaucgucaucaucgucauccuccuccuccucaucgccgucggccucuuccucuacugcaaggcccgcugaggacuagucccuguucccagagcccacuuuuuuuucuuuuuuugaaauaaaauagccugucuuucagaucuaaaaaaaaaaaaaaaaaaaaaaaaaaaaaaaaaaaaaaaaaaaaaaaaaaaaaaaaaaaaaaaaugcaucccccccccccccccccccccccccccccccaaaggcucuuuucagagccaccagaauu

SEQ ID NO: 17281 - RNA, 1843 nt, Artificial Sequence
  mRNA product Design a-2 comprising derived and/or modified sequence from HRSV(Memphis-37)__AIY60640.1__F-del_DSCav1_mut5 (opt3)
gggagaguccgcucagccagguugcagaagcggcuuagcguguguccuaaucuucucucugcguguagguaggccugugccgcaaacaagcuuaccauggagcugcccauccucaagaccaacgccauuacaacuauacuugcugcagugacgcugugcuucgccagcucccagaauaucaccgaagaguuuuaccaaucuacauguucagcggucaguaaaggcuauuugagcgcuuuaagaacugggugguacaccuccguuauuacaaucgaacugucuaacauuaaggagaauaaaugcaacggaaccgacgccaaggugaaacuaaucaagcaggaacucgauaaguauaaaaaugcaguaacugagcugcagcuucugaugcagucgaccccugccgcugguucaggcagcgcaauagccagugggaucgcuguguguaaggucuugcaccucgagggagaagugaacaaaauuaagaaugcccugcuguccacaaacaaagcgguugugucucucagcggcugcggugucuccguguuaacguucaagguacuggaccuuaagaauuacaucgauaaacaauugcugccaauucuaaacaagcagucauguaguaucagcaauauagagacuguuauugaauuucagcagaaaaacaauaggcuccuggagaucacccgggaguucucugugaacgcaggggucacaacuccgguguccaccuauaugcuuacaaauucagaacuguugagccucauuaacgacaugcccaucaccaacgaucaaaagaaacugaugaguaauaacgugcagaucguccgccagcagucuuacuccauuaugugcauaaucaaggaggaaguuuuagccuaugugguacaacugccucucuacggagugauugacacgccauguuggaaacuucauacuagcccccugugcacaaccaauacuaaggagggcucgaacaucuguuugacacgaaccgaucguggcugguacugcgacaaugcugggucugucuccuuuuucccucaggccgaaacguguaaggugcagucaaacagaguguuuugcgauaccaugaauaguagaacacugccaagcgaggugaaccucugcaauauagacauuuucaaccccaaauaugauuguaagaucaugacuuccaaaaccgacgucucuagcucagugaucacaagucugggagcaauuguauccugcuacgguaagacuaaauguaccgcuagcaauaagugcaggggcaucauuaagacauuuucuaacgggugugauuauguuucaaauaaaggaguggacaccgucagugugggcaacacucuuuacuaugucaauaagcaagaggguaaaagccuguacgugaagggggaaccuauaaucaacuucuaugacccauugguuuuuccguccgaugaguucgacgccucuauuucgcagguuaacgagaaaaucaaucagagccucgcguuuauccggaaguccgaugaacuguuacacaacguaaaugucggaaagucaacgacaaacauuaugauaaccacuaucauuaucgugauuaucguuauacugcuacuccugaucgccgugggccuuuucuuguacugcaaagcacgcugaggacuagucccuguucccagagcccacuuuuuuuucuuuuuuugaaauaaaauagccugucuuucagaucuaaaaaaaaaaaaaaaaaaaaaaaaaaaaaaaaaaaaaaaaaaaaaaaaaaaaaaaaaaaaaaaaugcaucccccccccccccccccccccccccccccccaaaggcucuuuucagagccaccagaauu

SEQ ID NO: 17282 - RNA, 1843 nt, Artificial Sequence
  mRNA product Design a-2 comprising derived and/or modified sequence from HRSV(Memphis-37)__AIY60640.1__F-del_DSCav1_mut5 (opt4)
gggagaguccgcucagccagguugcagaagcggcuuagcguguguccuaaucuucucucugcguguagguaggccugugccgcaaacaagcuuaccauggagcugcccauccugaagaccaacgccaucaccaccauccuggccgccgugacccugugcuucgccagcagccagaacaucaccgaggaguucuaccagagcaccugcagcgccgugagcaagggcuaccugagcgcccugagaaccggcugguacaccagcgugaucaccaucgagcugagcaacaucaaggagaacaagugcaacggcaccgacgccaaggugaagcugaucaagcaggagcuggacaaguacaagaacgccgugaccgagcugcagcugcugaugcagagcacccccgccgccggcagcggcagcgccaucgccagcggcaucgccgugugcaaggugcugcaccuggagggcgaggugaacaagaucaagaacgcccugcugagcaccaacaaggccguggugagccugagcggcugcggcgugagcgugcugaccuucaaggugcuggaccugaagaacuacaucgacaagcagcugcugcccauccugaacaagcagagcugcagcaucagcaacaucgagaccgugaucgaguuccagcagaagaacaacagacugcuggagaucaccagagaguucagcgugaacgccggcgugaccacccccgugagcaccuacaugcugaccaacagcgagcugcugagccugaucaacgacaugcccaucaccaacgaccagaagaagcugaugagcaacaacgugcagaucgugagacagcagagcuacagcaucaugugcaucaucaaggaggaggugcuggccuacguggugcagcugccccuguacggcgugaucgacacccccugcuggaagcugcacaccagcccccugugcaccaccaacaccaaggagggcagcaacaucugccugaccagaaccgacagaggcugguacugcgacaacgccggcagcgugagcuucuucccccaggccgagaccugcaaggugcagagcaacagaguguucugcgacaccaugaacagcagaacccugcccagcgaggugaaccugugcaacaucgacaucuucaaccccaaguacgacugcaagaucaugaccagcaagaccgacgugagcagcagcgugaucaccagccugggcgccaucgugagcugcuacggcaagaccaagugcaccgccagcaacaagugcagaggcaucaucaagaccuucagcaacggcugcgacuacgugagcaacaagggcguggacaccgugagcgugggcaacacccuguacuacgugaacaagcaggagggcaagagccuguacgugaagggcgagcccaucaucaacuucuacgacccccugguguuccccagcgacgaguucgacgccagcaucagccaggugaacgagaagaucaaccagagccuggccuucaucagaaagagcgacgagcugcugcacaacgugaacgugggcaagagcaccaccaacaucaugaucaccaccaucaucaucgugaucaucgugauccugcugcugcugaucgccgugggccuguuccuguacugcaaggccagaugaggacuagucccuguucccagagcccacuuuuuuuucuuuuuuugaaauaaaauagccugucuuucagaucuaaaaaaaaaaaaaaaaaaaaaaaaaaaaaaaaaaaaaaaaaaaaaaaaaaaaaaaaaaaaaaaaugcaucccccccccccccccccccccccccccccccaaaggcucuuuucagagccaccagaauu

SEQ ID NO: 17283 - RNA, 1843 nt, Artificial Sequence
  mRNA product Design a-2 comprising derived and/or modified sequence from HRSV(Memphis-37)__AIY60640.1__F-del_DSCav1_mut5 (opt5)
gggagaguccgcucagccagguugcagaagcggcuuagcguguguccuaaucuucucucugcguguagguaggccugugccgcaaacaagcuuaccauggagcugcccauccucaagaccaacgccauuacaacgauccuggcugccgugacccuuugcuucgcgagcucccagaauauuacagaagaguuuuaccaaucuaccuguagcgcugucuccaaaggcuaucugucugcccucagaacagggugguacaccagcguuaucacaauugaacuguccaacaucaaggagaauaaaugcaacggaaccgacgccaaggugaaacuuaucaagcaggaacuggauaaguauaaaaaugcugugacggagcuccagcugcugaugcagucuaccccugccgcuggcagcggguccgccauugcgagcggaaucgccgucuguaaggugcuccaccuggagggcgaaguuaacaaaauuaagaaugcccuucugucuacaaacaaagcuguggucucccucagcgggugcggagugucuguucugaccuucaaggugcuugaccugaagaauuacaucgauaaacaacuccugccgauucugaacaagcaguccuguagcaucucuaauauugagacagucaucgaauuucagcagaaaaacaaucggcuccuggagaucacccgcgaguucuccgugaacgcuggcgugacgacacccgucagcaccuauaugcuuacaaauuccgaacugcucucucugauuaacgacaugccuaucaccaacgaucaaaagaaacuuaugagcaauaacguucagauugugagacagcaguccuacagcaucaugugcauuaucaaggaggaagugcuggccuaugucgugcaacucccccuguacggcguuaucgacaccccuuguuggaaacugcauacaucuccccucugcacgaccaauacaaaggagggguccaacauuugucugacccggacagaucgcggaugguacugcgacaaugcgggcagcgugagcuuuuucccucaggccgaaaccuguaagguccagucuaacagaguguuuugcgauacgaugaacuccagaacacugccgucugagguuaaucucugcaauaucgacauuuucaaccccaaauaugauuguaagaucaugaccagcaaaaccgacguguccagcucugucauuacaucccugggggcuaucgugagcugcuacggaaagaccaaauguacagccucuaauaagugccggggcaucauuaagacguuuuccaacgggugugauuaugucagcaauaaaggaguggacaccguuuccgugggcaacacacuuuacuaugucaauaagcaagagggcaaaucucuguacgugaagggggaaccuaucauuaacuucuaugacccccucguuuuuccuagcgaugaguucgacgcuuccaucucucaggugaacgagaaaauuaaucagagccuggccuuuauccgcaaguccgaugaacugcuccacaacgucaaugugggaaagagcaccacaaacauuaugaucaccacgaucauuaucgugauuaucguuauucugcuucugcucaucgccgucggccuguuccuguacugcaaagcuagaugaggacuagucccuguucccagagcccacuuuuuuuucuuuuuuugaaauaaaauagccugucuuucagaucuaaaaaaaaaaaaaaaaaaaaaaaaaaaaaaaaaaaaaaaaaaaaaaaaaaaaaaaaaaaaaaaaugcaucccccccccccccccccccccccccccccccaaaggcucuuuucagagccaccagaauu

SEQ ID NO: 17284 - RNA, 1843 nt, Artificial Sequence
  mRNA product Design a-2 comprising derived and/or modified sequence from HRSV(Memphis-37)__AIY60640.1__F-del_DSCav1_mut5 (opt6)
gggagaguccgcucagccagguugcagaagcggcuuagcguguguccuaaucuucucucugcguguagguaggccugugccgcaaacaagcuuaccauggaauuacccaucuuaaaaacaaaugcaauaacaacaauacuagcagccguaacauuaugcuucgccucaagccaaaacauaacagaagaauuuuaccaaagcacauguuccgccguaucaaaaggauaucucucagcacuacguacuggaugguauacauccguaaucacaauugaacuaucaaacauuaaagaaaacaaaugcaauggaacagaugcgaaaguaaaacuaauaaaacaagaauuagauaaauauaaaaaugcaguaaccgaacuacaacuacuaaugcaaucaacucccgcugccgguagcggauccgccauagcaagcggaauugcuguauguaaaguccuacaucuugaaggcgaagucaacaaaaucaaaaaugcauuacucucgaccaacaaagcagucguaucacuaucaggaugcggagucucaguauuaacuuuuaaaguccuugaccuaaaaaacuacauagacaaacaacuacuaccaauucuaaauaaacaaaguugcagcauauccaauaucgaaacaguuauagaauuucaacaaaaaaacaaccgccuacuagaaaucacuagagaauuuucaguaaaugcaggcguaaccacaccagucucuaccuauaugcuuaccaacucugaauuauuaucacuuauaaacgacaugcccauaacaaaugaucaaaaaaaacuaaugagcaacaacguacaaauaguaagacaacaaagcuacagcauuauguguauaauaaaagaagaaguguuagcuuauguaguccaacuaccccucuauggcguuaucgauacaccaugcuggaaauuacacacaagcccucuaugcacaacuaacaccaaagaaggcucuaacauaugcuuaacaagaacagauagaggaugguauugcgauaacgcaggaucaguaucauucuuuccacaagcagaaacauguaaaguacaaucuaaccgaguauucugcgacacaaugaacucuagaacacuacccucagaaguuaaucucuguaauauugacauuuucaauccaaaauacgauugcaaaauaaugaccucuaaaaccgacguaucauccucaguuauaacguccuuaggagcaaucguaagcugcuauggcaaaacaaaauguaccgcaucaaacaaaugcagaggaauaauaaaaacauucucaaacggcugugacuacguaagcaauaaagguguugacacaguuucaguaggaaauacacuauacuauguaaauaaacaagaaggaaaaucucucuauguaaaaggagaacccauaauaaacuucuacgacccacucguauuuccaagcgaugaauuugaugcgagcauuucccagguaaaugaaaaaauaaaucaaucacuagcauucaucagaaaaagugaugaauuacuacacaauguuaacguaggaaaaucaacaacaaauaucaugauaacaacaaucauaauagucauaaucguaauauuacuauuacuaauagcaguagguuuauuucuauacuguaaagcaagguaaggacuagucccuguucccagagcccacuuuuuuuucuuuuuuugaaauaaaauagccugucuuucagaucuaaaaaaaaaaaaaaaaaaaaaaaaaaaaaaaaaaaaaaaaaaaaaaaaaaaaaaaaaaaaaaaaugcaucccccccccccccccccccccccccccccccaaaggcucuuuucagagccaccagaauu

SEQ ID NO: 17285 - RNA, 1843 nt, Artificial Sequence
  mRNA product Design a-2 comprising derived and/or modified sequence from HRSV(Memphis-37)__AIY60640.1__F-del_DSCav1_mut5 (opt11)
gggagaguccgcucagccagguugcagaagcggcuuagcguguguccuaaucuucucucugcguguagguaggccugugccgcaaacaagcuuaccauggaacuucccauccuaaaaaccaacgccauaacaacaauccucgcagcagucacccucugcuucgccucuucacaaaacaucaccgaagaauuuuaccaaucaaccugcuccgccguguccaaaggcuaccucucagcacugcgcacaggaugguauaccagcguaaucaccaucgaacucuccaacaucaaggaaaacaaaugcaacggcaccgaugccaaagucaaacucaucaagcaagaacuugacaaauacaaaaacgccgugaccgagcuacaacuccucaugcaguccacuccagccgccggcuccggcagcgccaucgccuccggcaucgccguaugcaaaguccuccaccucgaaggcgaaguaaacaaaaucaagaacgcacuccuaagcaccaacaaagccgucgucucacucuccgguugcggcgucagcguccuaacauucaaaguucucgaccucaaaaacuacauagacaaacaacuccuccccauccucaacaaacaauccugcuccauaucaaacaucgaaaccguuaucgaauuucaacaaaaaaacaaccgccuccuagaaaucacccgcgaauuuuccgucaacgcaggcgucaccacccccguuuccaccuauaugcucaccaacuccgaacuccucucccucaucaacgacaugcccauuaccaacgaccaaaagaaacuuaugagcaacaacguucaaaucguccgacaacaaucauacuccaucaugugcauuaucaaagaagaaguacucgccuacguaguacaauuaccccucuacggcguaaucgacaccccaugcuggaaacuacacaccuccccccucuguaccaccaacaccaaagaaggcucuaacaucugccucacccgcacagaccguggcugguauugcgauaacgcagggucugucuccuucuucccccaagccgaaacaugcaaaguccaauccaacagagucuucugcgacaccaugaacucgagaacccuccccuccgaagucaaccuaugcaacaucgacaucuucaacccaaaauacgacugcaaaaucaugacuucaaaaacagacgugagcucguccgucaucacaagccuaggagcuaucguauccugcuacggaaaaacaaaaugcacugcuuccaacaaaugccgcggaaucauaaaaaccuucuccaacggcugcgacuacgucagcaacaaaggcgucgacacagucuccguaggcaacacccuauacuacgucaauaaacaagaaggcaagucccuauaugucaaaggcgagcccaucaucaauuucuaugauccccucguuuucccauccgacgaauuugacgcauccaucucccaagucaacgaaaaaauaaaccaaagccucgcauucauccgcaaauccgacgaacuccuccacaacguaaacguaggaaaauccacaacuaacaucaugaucaccaccaucaucaucgucauuaucgucauccuacuccuccucauagcagucggccucuuccucuacugcaaagcacgcuagggacuagucccuguucccagagcccacuuuuuuuucuuuuuuugaaauaaaauagccugucuuucagaucuaaaaaaaaaaaaaaaaaaaaaaaaaaaaaaaaaaaaaaaaaaaaaaaaaaaaaaaaaaaaaaaaugcaucccccccccccccccccccccccccccccccaaaggcucuuuucagagccaccagaauu

SEQ ID NO: 17286 - RNA, 1921 nt, Artificial Sequence
  mRNA product Design a-3 comprising derived and/or modified sequence from HRSV(Memphis-37)__AIY60640.1__F-del_DSCav1_mut5 (opt1)
gggagagggcgcuuggcuugcaaggacccugagcugcggcauugaagcacacccaacccaacucgacugaagucagccucacugaaccggaucugagaaucuucucucucugggcuugccagggcucuccgaaccuagcuagcauccucuucaauuccaacuagaaagcuuaccauggagcugcccauccucaagaccaacgccaucaccacgauccuggccgcggugacccugugcuucgccagcucccagaacaucaccgaggaguucuaccagagcacgugcuccgccgucagcaagggcuaccucuccgcccugcgcaccgggugguacaccagcgugaucaccaucgagcuguccaacaucaaggagaacaagugcaacggcaccgacgccaaggugaagcucaucaagcaggagcuggacaaguacaagaacgcggucacggagcugcagcuccugaugcagagcaccccggccgccggcuccgggagcgcgaucgccuccggcaucgccgucugcaaggugcugcaccucgagggcgaggugaacaagaucaagaacgcccugcuguccaccaacaaggccgucgugagccucuccggcugcggggugagcguccugaccuucaaggugcuggaccucaagaacuacaucgacaagcagcugcugcccauccugaacaagcagagcugcuccaucagcaacaucgagaccgucaucgaguuccagcagaagaacaaccgccuccuggagaucacgcgggaguucagcgugaacgcgggcgugaccacccccgucuccaccuacaugcugacgaacagcgagcuccugucccugaucaacgacaugccgaucaccaacgaccagaagaagcucaugagcaacaacgugcagaucgugcgccagcaguccuacagcaucaugugcaucaucaaggaggagguccuggccuacguggugcagcugccccucuacggggucaucgacacccccugcuggaagcugcacaccagcccccugugcacgaccaacaccaaggagggcuccaacaucugccucacccggacggaccgcgggugguacugcgacaacgccggcagcguguccuucuucccgcaggccgagaccugcaagguccagagcaaccggguguucugcgacaccaugaacucccggacccugcccagcgaggugaaccucugcaacaucgacaucuucaaccccaaguacgacugcaagaucaugacguccaagaccgacgucagcuccagcgugaucaccucccugggcgccaucgugagcugcuacgggaagaccaagugcacggcgagcaacaagugccgcggcaucaucaagaccuucuccaacgggugcgacuacgucagcaacaagggcguggacaccguguccgucggcaacacccuguacuacgugaacaagcaggagggcaagagccucuacgugaagggggagcccaucaucaacuucuacgacccgcuggucuuccccuccgacgaguucgacgccagcaucucccaggugaacgagaagaucaaccagagccuggccuucauccggaaguccgacgagcuccugcacaacgugaacgucggcaagagcaccacgaacaucaugaucaccaccaucaucaucgugaucaucgugauccugcugcuccugaucgccgucgggcuguuccucuacugcaaggcccgcugaggacuagucccuguucccagagcccacuuuuuuuucuuuuuuugaaauaaaauagccugucuuucagaucuaaaaaaaaaaaaaaaaaaaaaaaaaaaaaaaaaaaaaaaaaaaaaaaaaaaaaaaaaaaaaaaaugcaucccccccccccccccccccccccccccccccaaaggcucuuuucagagccaccagaauu

SEQ ID NO: 17287 - RNA, 1921 nt, Artificial Sequence
  mRNA product Design a-3 comprising derived and/or modified sequence from HRSV(Memphis-37)__AIY60640.1__F-del_DSCav1_mut5 (opt1)
gggagagggcgcuuggcuugcaaggacccugagcugcggcauugaagcacacccaacccaacucgacugaagucagccucacugaaccggaucugagaaucuucucucucugggcuugccagggcucuccgaaccuagcuagcauccucuucaauuccaacuagaaagcuuaccauggagcugcccauccucaagaccaacgccaucaccacgauccuggccgcggugacccugugcuucgccagcucccagaacaucaccgaggaguucuaccagagcacgugcuccgccgucagcaagggcuaccucuccgcccugcgcaccgggugguacaccagcgugaucaccaucgagcuguccaacaucaaggagaacaagugcaacggcaccgacgccaaggugaagcucaucaagcaggagcuggacaaguacaagaacgcggucacggagcugcagcuccugaugcagagcaccccggccgccggguccggcagcgccaucgcguccgggaucgccgugugcaaggugcugcaccucgagggcgaggucaacaagaucaagaacgcccugcugagcaccaacaaggccguggugucccucagcggcugcggggucuccgugcugaccuucaaggugcuggaccucaagaacuacaucgacaagcagcugcugcccauccucaacaagcagagcugcuccaucagcaacaucgagacggucaucgaguuccagcagaagaacaaccggcugcuggagaucacccgcgaguucuccgugaacgccggcgugaccacccccgucagcacguacaugcucaccaacagcgagcugcugucccucaucaacgacaugcccaucaccaacgaccagaagaagcugaugagcaacaacgugcagaucgugcggcagcaguccuacagcaucaugugcaucaucaaggaggagguccuggcguacguggugcagcucccgcuguacggggucaucgacacccccugcuggaagcugcacacgagcccccucugcaccaccaacaccaaggagggcuccaacaucugccugacgcgcaccgaccgggggugguacugcgacaacgccggcuccgugagcuucuucccccaggccgagaccugcaaggugcaguccaaccgcgucuucugcgacaccaugaacagccggacgcucccguccgaggugaaccugugcaacaucgacaucuucaaccccaaguacgacugcaagaucaugaccagcaagaccgacgucuccagcuccgugaucaccagccugggcgccaucguguccugcuacgggaagacgaagugcaccgccagcaacaagugccggggcaucaucaagaccuucuccaacgggugcgacuacgucagcaacaagggcguggacaccgugagcgucggcaacacgcucuacuacgugaacaagcaggaggggaagucccuguacgugaagggcgagcccaucaucaacuucuacgacccccuggucuucccgagcgacgaguucgacgcguccaucagccaggugaacgagaagaucaaccagucccucgccuucauccgcaagagcgacgagcugcugcacaacgugaacgucgggaaguccaccaccaacaucaugaucaccaccaucaucaucgugaucaucgugauccuccugcugcucaucgccgucggccuguuccuguacugcaaggcccggugaggacuagucccuguucccagagcccacuuuuuuuucuuuuuuugaaauaaaauagccugucuuucagaucuaaaaaaaaaaaaaaaaaaaaaaaaaaaaaaaaaaaaaaaaaaaaaaaaaaaaaaaaaaaaaaaaugcaucccccccccccccccccccccccccccccccaaaggcucuuuucagagccaccagaauu

SEQ ID NO: 17288 - RNA, 1921 nt, Artificial Sequence
  mRNA product Design a-3 comprising derived and/or modified sequence from HRSV(Memphis-37)__AIY60640.1__F-del_DSCav1_mut5 (opt2)
gggagagggcgcuuggcuugcaaggacccugagcugcggcauugaagcacacccaacccaacucgacugaagucagccucacugaaccggaucugagaaucuucucucucugggcuugccagggcucuccgaaccuagcuagcauccucuucaauuccaacuagaaagcuuaccauggagcuccccauccucaagaccaacgccaucaccaccauccucgccgccgucacccucugcuucgccuccucccagaacaucaccgaggaguucuaccaguccaccugcuccgccgucuccaagggcuaccucuccgcccuccgcaccggcugguacaccuccgucaucaccaucgagcucuccaacaucaaggagaacaagugcaacggcaccgacgccaaggucaagcucaucaagcaggagcucgacaaguacaagaacgccgucaccgagcuccagcuccucaugcaguccacccccgccgccggcuccggcuccgccaucgccuccggcaucgccgucugcaagguccuccaccucgagggcgaggucaacaagaucaagaacgcccuccucuccaccaacaaggccgucgucucccucuccggcugcggcgucuccguccucaccuucaagguccucgaccucaagaacuacaucgacaagcagcuccuccccauccucaacaagcaguccugcuccaucuccaacaucgagaccgucaucgaguuccagcagaagaacaaccgccuccucgagaucacccgcgaguucuccgucaacgccggcgucaccacccccgucuccaccuacaugcucaccaacuccgagcuccucucccucaucaacgacaugcccaucaccaacgaccagaagaagcucauguccaacaacguccagaucguccgccagcaguccuacuccaucaugugcaucaucaaggaggagguccucgccuacgucguccagcucccccucuacggcgucaucgacacccccugcuggaagcuccacaccuccccccucugcaccaccaacaccaaggagggcuccaacaucugccucacccgcaccgaccgcggcugguacugcgacaacgccggcuccgucuccuucuucccccaggccgagaccugcaagguccaguccaaccgcgucuucugcgacaccaugaacucccgcacccuccccuccgaggucaaccucugcaacaucgacaucuucaaccccaaguacgacugcaagaucaugaccuccaagaccgacgucuccuccuccgucaucaccucccucggcgccaucgucuccugcuacggcaagaccaagugcaccgccuccaacaagugccgcggcaucaucaagaccuucuccaacggcugcgacuacgucuccaacaagggcgucgacaccgucuccgucggcaacacccucuacuacgucaacaagcaggagggcaagucccucuacgucaagggcgagcccaucaucaacuucuacgacccccucgucuuccccuccgacgaguucgacgccuccaucucccaggucaacgagaagaucaaccagucccucgccuucauccgcaaguccgacgagcuccuccacaacgucaacgucggcaaguccaccaccaacaucaugaucaccaccaucaucaucgucaucaucgucauccuccuccuccucaucgccgucggccucuuccucuacugcaaggcccgcugaggacuagucccuguucccagagcccacuuuuuuuucuuuuuuugaaauaaaauagccugucuuucagaucuaaaaaaaaaaaaaaaaaaaaaaaaaaaaaaaaaaaaaaaaaaaaaaaaaaaaaaaaaaaaaaaaugcaucccccccccccccccccccccccccccccccaaaggcucuuuucagagccaccagaauu

SEQ ID NO: 17289 - RNA, 1921 nt, Artificial Sequence
  mRNA product Design a-3 comprising derived and/or modified sequence from HRSV(Memphis-37)__AIY60640.1__F-del_DSCav1_mut5 (opt3)
gggagagggcgcuuggcuugcaaggacccugagcugcggcauugaagcacacccaacccaacucgacugaagucagccucacugaaccggaucugagaaucuucucucucugggcuugccagggcucuccgaaccuagcuagcauccucuucaauuccaacuagaaagcuuaccauggagcugcccauccucaagaccaacgccauuacaacuauacuugcugcagugacgcugugcuucgccagcucccagaauaucaccgaagaguuuuaccaaucuacauguucagcggucaguaaaggcuauuugagcgcuuuaagaacugggugguacaccuccguuauuacaaucgaacugucuaacauuaaggagaauaaaugcaacggaaccgacgccaaggugaaacuaaucaagcaggaacucgauaaguauaaaaaugcaguaacugagcugcagcuucugaugcagucgaccccugccgcugguucaggcagcgcaauagccagugggaucgcuguguguaaggucuugcaccucgagggagaagugaacaaaauuaagaaugcccugcuguccacaaacaaagcgguugugucucucagcggcugcggugucuccguguuaacguucaagguacuggaccuuaagaauuacaucgauaaacaauugcugccaauucuaaacaagcagucauguaguaucagcaauauagagacuguuauugaauuucagcagaaaaacaauaggcuccuggagaucacccgggaguucucugugaacgcaggggucacaacuccgguguccaccuauaugcuuacaaauucagaacuguugagccucauuaacgacaugcccaucaccaacgaucaaaagaaacugaugaguaauaacgugcagaucguccgccagcagucuuacuccauuaugugcauaaucaaggaggaaguuuuagccuaugugguacaacugccucucuacggagugauugacacgccauguuggaaacuucauacuagcccccugugcacaaccaauacuaaggagggcucgaacaucuguuugacacgaaccgaucguggcugguacugcgacaaugcugggucugucuccuuuuucccucaggccgaaacguguaaggugcagucaaacagaguguuuugcgauaccaugaauaguagaacacugccaagcgaggugaaccucugcaauauagacauuuucaaccccaaauaugauuguaagaucaugacuuccaaaaccgacgucucuagcucagugaucacaagucugggagcaauuguauccugcuacgguaagacuaaauguaccgcuagcaauaagugcaggggcaucauuaagacauuuucuaacgggugugauuauguuucaaauaaaggaguggacaccgucagugugggcaacacucuuuacuaugucaauaagcaagaggguaaaagccuguacgugaagggggaaccuauaaucaacuucuaugacccauugguuuuuccguccgaugaguucgacgccucuauuucgcagguuaacgagaaaaucaaucagagccucgcguuuauccggaaguccgaugaacuguuacacaacguaaaugucggaaagucaacgacaaacauuaugauaaccacuaucauuaucgugauuaucguuauacugcuacuccugaucgccgugggccuuuucuuguacugcaaagcacgcugaggacuagucccuguucccagagcccacuuuuuuuucuuuuuuugaaauaaaauagccugucuuucagaucuaaaaaaaaaaaaaaaaaaaaaaaaaaaaaaaaaaaaaaaaaaaaaaaaaaaaaaaaaaaaaaaaugcaucccccccccccccccccccccccccccccccaaaggcucuuuucagagccaccagaauu

SEQ ID NO: 17290 - RNA, 1921 nt, Artificial Sequence
  mRNA product Design a-3 comprising derived and/or modified sequence from HRSV(Memphis-37)__AIY60640.1__F-del_DSCav1_mut5 (opt4)
gggagagggcgcuuggcuugcaaggacccugagcugcggcauugaagcacacccaacccaacucgacugaagucagccucacugaaccggaucugagaaucuucucucucugggcuugccagggcucuccgaaccuagcuagcauccucuucaauuccaacuagaaagcuuaccauggagcugcccauccugaagaccaacgccaucaccaccauccuggccgccgugacccugugcuucgccagcagccagaacaucaccgaggaguucuaccagagcaccugcagcgccgugagcaagggcuaccugagcgcccugagaaccggcugguacaccagcgugaucaccaucgagcugagcaacaucaaggagaacaagugcaacggcaccgacgccaaggugaagcugaucaagcaggagcuggacaaguacaagaacgccgugaccgagcugcagcugcugaugcagagcacccccgccgccggcagcggcagcgccaucgccagcggcaucgccgugugcaaggugcugcaccuggagggcgaggugaacaagaucaagaacgcccugcugagcaccaacaaggccguggugagccugagcggcugcggcgugagcgugcugaccuucaaggugcuggaccugaagaacuacaucgacaagcagcugcugcccauccugaacaagcagagcugcagcaucagcaacaucgagaccgugaucgaguuccagcagaagaacaacagacugcuggagaucaccagagaguucagcgugaacgccggcgugaccacccccgugagcaccuacaugcugaccaacagcgagcugcugagccugaucaacgacaugcccaucaccaacgaccagaagaagcugaugagcaacaacgugcagaucgugagacagcagagcuacagcaucaugugcaucaucaaggaggaggugcuggccuacguggugcagcugccccuguacggcgugaucgacacccccugcuggaagcugcacaccagcccccugugcaccaccaacaccaaggagggcagcaacaucugccugaccagaaccgacagaggcugguacugcgacaacgccggcagcgugagcuucuucccccaggccgagaccugcaaggugcagagcaacagaguguucugcgacaccaugaacagcagaacccugcccagcgaggugaaccugugcaacaucgacaucuucaaccccaaguacgacugcaagaucaugaccagcaagaccgacgugagcagcagcgugaucaccagccugggcgccaucgugagcugcuacggcaagaccaagugcaccgccagcaacaagugcagaggcaucaucaagaccuucagcaacggcugcgacuacgugagcaacaagggcguggacaccgugagcgugggcaacacccuguacuacgugaacaagcaggagggcaagagccuguacgugaagggcgagcccaucaucaacuucuacgacccccugguguuccccagcgacgaguucgacgccagcaucagccaggugaacgagaagaucaaccagagccuggccuucaucagaaagagcgacgagcugcugcacaacgugaacgugggcaagagcaccaccaacaucaugaucaccaccaucaucaucgugaucaucgugauccugcugcugcugaucgccgugggccuguuccuguacugcaaggccagaugaggacuagucccuguucccagagcccacuuuuuuuucuuuuuuugaaauaaaauagccugucuuucagaucuaaaaaaaaaaaaaaaaaaaaaaaaaaaaaaaaaaaaaaaaaaaaaaaaaaaaaaaaaaaaaaaaugcaucccccccccccccccccccccccccccccccaaaggcucuuuucagagccaccagaauu

SEQ ID NO: 17291 - RNA, 1921 nt, Artificial Sequence
  mRNA product Design a-3 comprising derived and/or modified sequence from HRSV(Memphis-37)__AIY60640.1__F-del_DSCav1_mut5 (opt5)
gggagagggcgcuuggcuugcaaggacccugagcugcggcauugaagcacacccaacccaacucgacugaagucagccucacugaaccggaucugagaaucuucucucucugggcuugccagggcucuccgaaccuagcuagcauccucuucaauuccaacuagaaagcuuaccauggagcugcccauccucaagaccaacgccauuacaacgauccuggcugccgugacccuuugcuucgcgagcucccagaauauuacagaagaguuuuaccaaucuaccuguagcgcugucuccaaaggcuaucugucugcccucagaacagggugguacaccagcguuaucacaauugaacuguccaacaucaaggagaauaaaugcaacggaaccgacgccaaggugaaacuuaucaagcaggaacuggauaaguauaaaaaugcugugacggagcuccagcugcugaugcagucuaccccugccgcuggcagcggguccgccauugcgagcggaaucgccgucuguaaggugcuccaccuggagggcgaaguuaacaaaauuaagaaugcccuucugucuacaaacaaagcuguggucucccucagcgggugcggagugucuguucugaccuucaaggugcuugaccugaagaauuacaucgauaaacaacuccugccgauucugaacaagcaguccuguagcaucucuaauauugagacagucaucgaauuucagcagaaaaacaaucggcuccuggagaucacccgcgaguucuccgugaacgcuggcgugacgacacccgucagcaccuauaugcuuacaaauuccgaacugcucucucugauuaacgacaugccuaucaccaacgaucaaaagaaacuuaugagcaauaacguucagauugugagacagcaguccuacagcaucaugugcauuaucaaggaggaagugcuggccuaugucgugcaacucccccuguacggcguuaucgacaccccuuguuggaaacugcauacaucuccccucugcacgaccaauacaaaggagggguccaacauuugucugacccggacagaucgcggaugguacugcgacaaugcgggcagcgugagcuuuuucccucaggccgaaaccuguaagguccagucuaacagaguguuuugcgauacgaugaacuccagaacacugccgucugagguuaaucucugcaauaucgacauuuucaaccccaaauaugauuguaagaucaugaccagcaaaaccgacguguccagcucugucauuacaucccugggggcuaucgugagcugcuacggaaagaccaaauguacagccucuaauaagugccggggcaucauuaagacguuuuccaacgggugugauuaugucagcaauaaaggaguggacaccguuuccgugggcaacacacuuuacuaugucaauaagcaagagggcaaaucucuguacgugaagggggaaccuaucauuaacuucuaugacccccucguuuuuccuagcgaugaguucgacgcuuccaucucucaggugaacgagaaaauuaaucagagccuggccuuuauccgcaaguccgaugaacugcuccacaacgucaaugugggaaagagcaccacaaacauuaugaucaccacgaucauuaucgugauuaucguuauucugcuucugcucaucgccgucggccuguuccuguacugcaaagcuagaugaggacuagucccuguucccagagcccacuuuuuuuucuuuuuuugaaauaaaauagccugucuuucagaucuaaaaaaaaaaaaaaaaaaaaaaaaaaaaaaaaaaaaaaaaaaaaaaaaaaaaaaaaaaaaaaaaugcaucccccccccccccccccccccccccccccccaaaggcucuuuucagagccaccagaauu

SEQ ID NO: 17292 - RNA, 1921 nt, Artificial Sequence
  mRNA product Design a-3 comprising derived and/or modified sequence from HRSV(Memphis-37)__AIY60640.1__F-del_DSCav1_mut5 (opt6)
gggagagggcgcuuggcuugcaaggacccugagcugcggcauugaagcacacccaacccaacucgacugaagucagccucacugaaccggaucugagaaucuucucucucugggcuugccagggcucuccgaaccuagcuagcauccucuucaauuccaacuagaaagcuuaccauggaauuacccaucuuaaaaacaaaugcaauaacaacaauacuagcagccguaacauuaugcuucgccucaagccaaaacauaacagaagaauuuuaccaaagcacauguuccgccguaucaaaaggauaucucucagcacuacguacuggaugguauacauccguaaucacaauugaacuaucaaacauuaaagaaaacaaaugcaauggaacagaugcgaaaguaaaacuaauaaaacaagaauuagauaaauauaaaaaugcaguaaccgaacuacaacuacuaaugcaaucaacucccgcugccgguagcggauccgccauagcaagcggaauugcuguauguaaaguccuacaucuugaaggcgaagucaacaaaaucaaaaaugcauuacucucgaccaacaaagcagucguaucacuaucaggaugcggagucucaguauuaacuuuuaaaguccuugaccuaaaaaacuacauagacaaacaacuacuaccaauucuaaauaaacaaaguugcagcauauccaauaucgaaacaguuauagaauuucaacaaaaaaacaaccgccuacuagaaaucacuagagaauuuucaguaaaugcaggcguaaccacaccagucucuaccuauaugcuuaccaacucugaauuauuaucacuuauaaacgacaugcccauaacaaaugaucaaaaaaaacuaaugagcaacaacguacaaauaguaagacaacaaagcuacagcauuauguguauaauaaaagaagaaguguuagcuuauguaguccaacuaccccucuauggcguuaucgauacaccaugcuggaaauuacacacaagcccucuaugcacaacuaacaccaaagaaggcucuaacauaugcuuaacaagaacagauagaggaugguauugcgauaacgcaggaucaguaucauucuuuccacaagcagaaacauguaaaguacaaucuaaccgaguauucugcgacacaaugaacucuagaacacuacccucagaaguuaaucucuguaauauugacauuuucaauccaaaauacgauugcaaaauaaugaccucuaaaaccgacguaucauccucaguuauaacguccuuaggagcaaucguaagcugcuauggcaaaacaaaauguaccgcaucaaacaaaugcagaggaauaauaaaaacauucucaaacggcugugacuacguaagcaauaaagguguugacacaguuucaguaggaaauacacuauacuauguaaauaaacaagaaggaaaaucucucuauguaaaaggagaacccauaauaaacuucuacgacccacucguauuuccaagcgaugaauuugaugcgagcauuucccagguaaaugaaaaaauaaaucaaucacuagcauucaucagaaaaagugaugaauuacuacacaauguuaacguaggaaaaucaacaacaaauaucaugauaacaacaaucauaauagucauaaucguaauauuacuauuacuaauagcaguagguuuauuucuauacuguaaagcaagguaaggacuagucccuguucccagagcccacuuuuuuuucuuuuuuugaaauaaaauagccugucuuucagaucuaaaaaaaaaaaaaaaaaaaaaaaaaaaaaaaaaaaaaaaaaaaaaaaaaaaaaaaaaaaaaaaaugcaucccccccccccccccccccccccccccccccaaaggcucuuuucagagccaccagaauu

SEQ ID NO: 17293 - RNA, 1921 nt, Artificial Sequence
  mRNA product Design a-3 comprising derived and/or modified sequence from HRSV(Memphis-37)__AIY60640.1__F-del_DSCav1_mut5 (opt11)
gggagagggcgcuuggcuugcaaggacccugagcugcggcauugaagcacacccaacccaacucgacugaagucagccucacugaaccggaucugagaaucuucucucucugggcuugccagggcucuccgaaccuagcuagcauccucuucaauuccaacuagaaagcuuaccauggaacuucccauccuaaaaaccaacgccauaacaacaauccucgcagcagucacccucugcuucgccucuucacaaaacaucaccgaagaauuuuaccaaucaaccugcuccgccguguccaaaggcuaccucucagcacugcgcacaggaugguauaccagcguaaucaccaucgaacucuccaacaucaaggaaaacaaaugcaacggcaccgaugccaaagucaaacucaucaagcaagaacuugacaaauacaaaaacgccgugaccgagcuacaacuccucaugcaguccacuccagccgccggcuccggcagcgccaucgccuccggcaucgccguaugcaaaguccuccaccucgaaggcgaaguaaacaaaaucaagaacgcacuccuaagcaccaacaaagccgucgucucacucuccgguugcggcgucagcguccuaacauucaaaguucucgaccucaaaaacuacauagacaaacaacuccuccccauccucaacaaacaauccugcuccauaucaaacaucgaaaccguuaucgaauuucaacaaaaaaacaaccgccuccuagaaaucacccgcgaauuuuccgucaacgcaggcgucaccacccccguuuccaccuauaugcucaccaacuccgaacuccucucccucaucaacgacaugcccauuaccaacgaccaaaagaaacuuaugagcaacaacguucaaaucguccgacaacaaucauacuccaucaugugcauuaucaaagaagaaguacucgccuacguaguacaauuaccccucuacggcguaaucgacaccccaugcuggaaacuacacaccuccccccucuguaccaccaacaccaaagaaggcucuaacaucugccucacccgcacagaccguggcugguauugcgauaacgcagggucugucuccuucuucccccaagccgaaacaugcaaaguccaauccaacagagucuucugcgacaccaugaacucgagaacccuccccuccgaagucaaccuaugcaacaucgacaucuucaacccaaaauacgacugcaaaaucaugacuucaaaaacagacgugagcucguccgucaucacaagccuaggagcuaucguauccugcuacggaaaaacaaaaugcacugcuuccaacaaaugccgcggaaucauaaaaaccuucuccaacggcugcgacuacgucagcaacaaaggcgucgacacagucuccguaggcaacacccuauacuacgucaauaaacaagaaggcaagucccuauaugucaaaggcgagcccaucaucaauuucuaugauccccucguuuucccauccgacgaauuugacgcauccaucucccaagucaacgaaaaaauaaaccaaagccucgcauucauccgcaaauccgacgaacuccuccacaacguaaacguaggaaaauccacaacuaacaucaugaucaccaccaucaucaucgucauuaucgucauccuacuccuccucauagcagucggccucuuccucuacugcaaagcacgcuagggacuagucccuguucccagagcccacuuuuuuuucuuuuuuugaaauaaaauagccugucuuucagaucuaaaaaaaaaaaaaaaaaaaaaaaaaaaaaaaaaaaaaaaaaaaaaaaaaaaaaaaaaaaaaaaaugcaucccccccccccccccccccccccccccccccaaaggcucuuuucagagccaccagaauu

SEQ ID NO: 17294 - RNA, 1870 nt, Artificial Sequence
  mRNA product Design a-4 comprising derived and/or modified sequence from HRSV(Memphis-37)__AIY60640.1__F-del_DSCav1_mut5 (opt1)
gggagacuccugucgggcggaaguaggaggaguagaguuuaaaaacaguacucuuuuuccgguucgggacguaguugaagcaacgacaagccggauaaccgcucuugagacaggaagcuuaccauggagcugcccauccucaagaccaacgccaucaccacgauccuggccgcggugacccugugcuucgccagcucccagaacaucaccgaggaguucuaccagagcacgugcuccgccgucagcaagggcuaccucuccgcccugcgcaccgggugguacaccagcgugaucaccaucgagcuguccaacaucaaggagaacaagugcaacggcaccgacgccaaggugaagcucaucaagcaggagcuggacaaguacaagaacgcggucacggagcugcagcuccugaugcagagcaccccggccgccggcuccgggagcgcgaucgccuccggcaucgccgucugcaaggugcugcaccucgagggcgaggugaacaagaucaagaacgcccugcuguccaccaacaaggccgucgugagccucuccggcugcggggugagcguccugaccuucaaggugcuggaccucaagaacuacaucgacaagcagcugcugcccauccugaacaagcagagcugcuccaucagcaacaucgagaccgucaucgaguuccagcagaagaacaaccgccuccuggagaucacgcgggaguucagcgugaacgcgggcgugaccacccccgucuccaccuacaugcugacgaacagcgagcuccugucccugaucaacgacaugccgaucaccaacgaccagaagaagcucaugagcaacaacgugcagaucgugcgccagcaguccuacagcaucaugugcaucaucaaggaggagguccuggccuacguggugcagcugccccucuacggggucaucgacacccccugcuggaagcugcacaccagcccccugugcacgaccaacaccaaggagggcuccaacaucugccucacccggacggaccgcgggugguacugcgacaacgccggcagcguguccuucuucccgcaggccgagaccugcaagguccagagcaaccggguguucugcgacaccaugaacucccggacccugcccagcgaggugaaccucugcaacaucgacaucuucaaccccaaguacgacugcaagaucaugacguccaagaccgacgucagcuccagcgugaucaccucccugggcgccaucgugagcugcuacgggaagaccaagugcacggcgagcaacaagugccgcggcaucaucaagaccuucuccaacgggugcgacuacgucagcaacaagggcguggacaccguguccgucggcaacacccuguacuacgugaacaagcaggagggcaagagccucuacgugaagggggagcccaucaucaacuucuacgacccgcuggucuuccccuccgacgaguucgacgccagcaucucccaggugaacgagaagaucaaccagagccuggccuucauccggaaguccgacgagcuccugcacaacgugaacgucggcaagagcaccacgaacaucaugaucaccaccaucaucaucgugaucaucgugauccugcugcuccugaucgccgucgggcuguuccucuacugcaaggcccgcugaggacuagucccuguucccagagcccacuuuuuuuucuuuuuuugaaauaaaauagccugucuuucagaucuaaaaaaaaaaaaaaaaaaaaaaaaaaaaaaaaaaaaaaaaaaaaaaaaaaaaaaaaaaaaaaaaugcaucccccccccccccccccccccccccccccccaaaggcucuuuucagagccaccagaauu

SEQ ID NO: 17295 - RNA, 1870 nt, Artificial Sequence
  mRNA product Design a-4 comprising derived and/or modified sequence from HRSV(Memphis-37)__AIY60640.1__F-del_DSCav1_mut5 (opt1)
gggagacuccugucgggcggaaguaggaggaguagaguuuaaaaacaguacucuuuuuccgguucgggacguaguugaagcaacgacaagccggauaaccgcucuugagacaggaagcuuaccauggagcugcccauccucaagaccaacgccaucaccacgauccuggccgcggugacccugugcuucgccagcucccagaacaucaccgaggaguucuaccagagcacgugcuccgccgucagcaagggcuaccucuccgcccugcgcaccgggugguacaccagcgugaucaccaucgagcuguccaacaucaaggagaacaagugcaacggcaccgacgccaaggugaagcucaucaagcaggagcuggacaaguacaagaacgcggucacggagcugcagcuccugaugcagagcaccccggccgccggguccggcagcgccaucgcguccgggaucgccgugugcaaggugcugcaccucgagggcgaggucaacaagaucaagaacgcccugcugagcaccaacaaggccguggugucccucagcggcugcggggucuccgugcugaccuucaaggugcuggaccucaagaacuacaucgacaagcagcugcugcccauccucaacaagcagagcugcuccaucagcaacaucgagacggucaucgaguuccagcagaagaacaaccggcugcuggagaucacccgcgaguucuccgugaacgccggcgugaccacccccgucagcacguacaugcucaccaacagcgagcugcugucccucaucaacgacaugcccaucaccaacgaccagaagaagcugaugagcaacaacgugcagaucgugcggcagcaguccuacagcaucaugugcaucaucaaggaggagguccuggcguacguggugcagcucccgcuguacggggucaucgacacccccugcuggaagcugcacacgagcccccucugcaccaccaacaccaaggagggcuccaacaucugccugacgcgcaccgaccgggggugguacugcgacaacgccggcuccgugagcuucuucccccaggccgagaccugcaaggugcaguccaaccgcgucuucugcgacaccaugaacagccggacgcucccguccgaggugaaccugugcaacaucgacaucuucaaccccaaguacgacugcaagaucaugaccagcaagaccgacgucuccagcuccgugaucaccagccugggcgccaucguguccugcuacgggaagacgaagugcaccgccagcaacaagugccggggcaucaucaagaccuucuccaacgggugcgacuacgucagcaacaagggcguggacaccgugagcgucggcaacacgcucuacuacgugaacaagcaggaggggaagucccuguacgugaagggcgagcccaucaucaacuucuacgacccccuggucuucccgagcgacgaguucgacgcguccaucagccaggugaacgagaagaucaaccagucccucgccuucauccgcaagagcgacgagcugcugcacaacgugaacgucgggaaguccaccaccaacaucaugaucaccaccaucaucaucgugaucaucgugauccuccugcugcucaucgccgucggccuguuccuguacugcaaggcccggugaggacuagucccuguucccagagcccacuuuuuuuucuuuuuuugaaauaaaauagccugucuuucagaucuaaaaaaaaaaaaaaaaaaaaaaaaaaaaaaaaaaaaaaaaaaaaaaaaaaaaaaaaaaaaaaaaugcaucccccccccccccccccccccccccccccccaaaggcucuuuucagagccaccagaauu

SEQ ID NO: 17296 - RNA, 1870 nt, Artificial Sequence
  mRNA product Design a-4 comprising derived and/or modified sequence from HRSV(Memphis-37)__AIY60640.1__F-del_DSCav1_mut5 (opt2)
gggagacuccugucgggcggaaguaggaggaguagaguuuaaaaacaguacucuuuuuccgguucgggacguaguugaagcaacgacaagccggauaaccgcucuugagacaggaagcuuaccauggagcuccccauccucaagaccaacgccaucaccaccauccucgccgccgucacccucugcuucgccuccucccagaacaucaccgaggaguucuaccaguccaccugcuccgccgucuccaagggcuaccucuccgcccuccgcaccggcugguacaccuccgucaucaccaucgagcucuccaacaucaaggagaacaagugcaacggcaccgacgccaaggucaagcucaucaagcaggagcucgacaaguacaagaacgccgucaccgagcuccagcuccucaugcaguccacccccgccgccggcuccggcuccgccaucgccuccggcaucgccgucugcaagguccuccaccucgagggcgaggucaacaagaucaagaacgcccuccucuccaccaacaaggccgucgucucccucuccggcugcggcgucuccguccucaccuucaagguccucgaccucaagaacuacaucgacaagcagcuccuccccauccucaacaagcaguccugcuccaucuccaacaucgagaccgucaucgaguuccagcagaagaacaaccgccuccucgagaucacccgcgaguucuccgucaacgccggcgucaccacccccgucuccaccuacaugcucaccaacuccgagcuccucucccucaucaacgacaugcccaucaccaacgaccagaagaagcucauguccaacaacguccagaucguccgccagcaguccuacuccaucaugugcaucaucaaggaggagguccucgccuacgucguccagcucccccucuacggcgucaucgacacccccugcuggaagcuccacaccuccccccucugcaccaccaacaccaaggagggcuccaacaucugccucacccgcaccgaccgcggcugguacugcgacaacgccggcuccgucuccuucuucccccaggccgagaccugcaagguccaguccaaccgcgucuucugcgacaccaugaacucccgcacccuccccuccgaggucaaccucugcaacaucgacaucuucaaccccaaguacgacugcaagaucaugaccuccaagaccgacgucuccuccuccgucaucaccucccucggcgccaucgucuccugcuacggcaagaccaagugcaccgccuccaacaagugccgcggcaucaucaagaccuucuccaacggcugcgacuacgucuccaacaagggcgucgacaccgucuccgucggcaacacccucuacuacgucaacaagcaggagggcaagucccucuacgucaagggcgagcccaucaucaacuucuacgacccccucgucuuccccuccgacgaguucgacgccuccaucucccaggucaacgagaagaucaaccagucccucgccuucauccgcaaguccgacgagcuccuccacaacgucaacgucggcaaguccaccaccaacaucaugaucaccaccaucaucaucgucaucaucgucauccuccuccuccucaucgccgucggccucuuccucuacugcaaggcccgcugaggacuagucccuguucccagagcccacuuuuuuuucuuuuuuugaaauaaaauagccugucuuucagaucuaaaaaaaaaaaaaaaaaaaaaaaaaaaaaaaaaaaaaaaaaaaaaaaaaaaaaaaaaaaaaaaaugcaucccccccccccccccccccccccccccccccaaaggcucuuuucagagccaccagaauu

SEQ ID NO: 17297 - RNA, 1870 nt, Artificial Sequence
  mRNA product Design a-4 comprising derived and/or modified sequence from HRSV(Memphis-37)__AIY60640.1__F-del_DSCav1_mut5 (opt3)
gggagacuccugucgggcggaaguaggaggaguagaguuuaaaaacaguacucuuuuuccgguucgggacguaguugaagcaacgacaagccggauaaccgcucuugagacaggaagcuuaccauggagcugcccauccucaagaccaacgccauuacaacuauacuugcugcagugacgcugugcuucgccagcucccagaauaucaccgaagaguuuuaccaaucuacauguucagcggucaguaaaggcuauuugagcgcuuuaagaacugggugguacaccuccguuauuacaaucgaacugucuaacauuaaggagaauaaaugcaacggaaccgacgccaaggugaaacuaaucaagcaggaacucgauaaguauaaaaaugcaguaacugagcugcagcuucugaugcagucgaccccugccgcugguucaggcagcgcaauagccagugggaucgcuguguguaaggucuugcaccucgagggagaagugaacaaaauuaagaaugcccugcuguccacaaacaaagcgguugugucucucagcggcugcggugucuccguguuaacguucaagguacuggaccuuaagaauuacaucgauaaacaauugcugccaauucuaaacaagcagucauguaguaucagcaauauagagacuguuauugaauuucagcagaaaaacaauaggcuccuggagaucacccgggaguucucugugaacgcaggggucacaacuccgguguccaccuauaugcuuacaaauucagaacuguugagccucauuaacgacaugcccaucaccaacgaucaaaagaaacugaugaguaauaacgugcagaucguccgccagcagucuuacuccauuaugugcauaaucaaggaggaaguuuuagccuaugugguacaacugccucucuacggagugauugacacgccauguuggaaacuucauacuagcccccugugcacaaccaauacuaaggagggcucgaacaucuguuugacacgaaccgaucguggcugguacugcgacaaugcugggucugucuccuuuuucccucaggccgaaacguguaaggugcagucaaacagaguguuuugcgauaccaugaauaguagaacacugccaagcgaggugaaccucugcaauauagacauuuucaaccccaaauaugauuguaagaucaugacuuccaaaaccgacgucucuagcucagugaucacaagucugggagcaauuguauccugcuacgguaagacuaaauguaccgcuagcaauaagugcaggggcaucauuaagacauuuucuaacgggugugauuauguuucaaauaaaggaguggacaccgucagugugggcaacacucuuuacuaugucaauaagcaagaggguaaaagccuguacgugaagggggaaccuauaaucaacuucuaugacccauugguuuuuccguccgaugaguucgacgccucuauuucgcagguuaacgagaaaaucaaucagagccucgcguuuauccggaaguccgaugaacuguuacacaacguaaaugucggaaagucaacgacaaacauuaugauaaccacuaucauuaucgugauuaucguuauacugcuacuccugaucgccgugggccuuuucuuguacugcaaagcacgcugaggacuagucccuguucccagagcccacuuuuuuuucuuuuuuugaaauaaaauagccugucuuucagaucuaaaaaaaaaaaaaaaaaaaaaaaaaaaaaaaaaaaaaaaaaaaaaaaaaaaaaaaaaaaaaaaaugcaucccccccccccccccccccccccccccccccaaaggcucuuuucagagccaccagaauu

SEQ ID NO: 17298 - RNA, 1870 nt, Artificial Sequence
  mRNA product Design a-4 comprising derived and/or modified sequence from HRSV(Memphis-37)__AIY60640.1__F-del_DSCav1_mut5 (opt4)
gggagacuccugucgggcggaaguaggaggaguagaguuuaaaaacaguacucuuuuuccgguucgggacguaguugaagcaacgacaagccggauaaccgcucuugagacaggaagcuuaccauggagcugcccauccugaagaccaacgccaucaccaccauccuggccgccgugacccugugcuucgccagcagccagaacaucaccgaggaguucuaccagagcaccugcagcgccgugagcaagggcuaccugagcgcccugagaaccggcugguacaccagcgugaucaccaucgagcugagcaacaucaaggagaacaagugcaacggcaccgacgccaaggugaagcugaucaagcaggagcuggacaaguacaagaacgccgugaccgagcugcagcugcugaugcagagcacccccgccgccggcagcggcagcgccaucgccagcggcaucgccgugugcaaggugcugcaccuggagggcgaggugaacaagaucaagaacgcccugcugagcaccaacaaggccguggugagccugagcggcugcggcgugagcgugcugaccuucaaggugcuggaccugaagaacuacaucgacaagcagcugcugcccauccugaacaagcagagcugcagcaucagcaacaucgagaccgugaucgaguuccagcagaagaacaacagacugcuggagaucaccagagaguucagcgugaacgccggcgugaccacccccgugagcaccuacaugcugaccaacagcgagcugcugagccugaucaacgacaugcccaucaccaacgaccagaagaagcugaugagcaacaacgugcagaucgugagacagcagagcuacagcaucaugugcaucaucaaggaggaggugcuggccuacguggugcagcugccccuguacggcgugaucgacacccccugcuggaagcugcacaccagcccccugugcaccaccaacaccaaggagggcagcaacaucugccugaccagaaccgacagaggcugguacugcgacaacgccggcagcgugagcuucuucccccaggccgagaccugcaaggugcagagcaacagaguguucugcgacaccaugaacagcagaacccugcccagcgaggugaaccugugcaacaucgacaucuucaaccccaaguacgacugcaagaucaugaccagcaagaccgacgugagcagcagcgugaucaccagccugggcgccaucgugagcugcuacggcaagaccaagugcaccgccagcaacaagugcagaggcaucaucaagaccuucagcaacggcugcgacuacgugagcaacaagggcguggacaccgugagcgugggcaacacccuguacuacgugaacaagcaggagggcaagagccuguacgugaagggcgagcccaucaucaacuucuacgacccccugguguuccccagcgacgaguucgacgccagcaucagccaggugaacgagaagaucaaccagagccuggccuucaucagaaagagcgacgagcugcugcacaacgugaacgugggcaagagcaccaccaacaucaugaucaccaccaucaucaucgugaucaucgugauccugcugcugcugaucgccgugggccuguuccuguacugcaaggccagaugaggacuagucccuguucccagagcccacuuuuuuuucuuuuuuugaaauaaaauagccugucuuucagaucuaaaaaaaaaaaaaaaaaaaaaaaaaaaaaaaaaaaaaaaaaaaaaaaaaaaaaaaaaaaaaaaaugcaucccccccccccccccccccccccccccccccaaaggcucuuuucagagccaccagaauu

SEQ ID NO: 17299 - RNA, 1870 nt, Artificial Sequence
  mRNA product Design a-4 comprising derived and/or modified sequence from HRSV(Memphis-37)__AIY60640.1__F-del_DSCav1_mut5 (opt5)
gggagacuccugucgggcggaaguaggaggaguagaguuuaaaaacaguacucuuuuuccgguucgggacguaguugaagcaacgacaagccggauaaccgcucuugagacaggaagcuuaccauggagcugcccauccucaagaccaacgccauuacaacgauccuggcugccgugacccuuugcuucgcgagcucccagaauauuacagaagaguuuuaccaaucuaccuguagcgcugucuccaaaggcuaucugucugcccucagaacagggugguacaccagcguuaucacaauugaacuguccaacaucaaggagaauaaaugcaacggaaccgacgccaaggugaaacuuaucaagcaggaacuggauaaguauaaaaaugcugugacggagcuccagcugcugaugcagucuaccccugccgcuggcagcggguccgccauugcgagcggaaucgccgucuguaaggugcuccaccuggagggcgaaguuaacaaaauuaagaaugcccuucugucuacaaacaaagcuguggucucccucagcgggugcggagugucuguucugaccuucaaggugcuugaccugaagaauuacaucgauaaacaacuccugccgauucugaacaagcaguccuguagcaucucuaauauugagacagucaucgaauuucagcagaaaaacaaucggcuccuggagaucacccgcgaguucuccgugaacgcuggcgugacgacacccgucagcaccuauaugcuuacaaauuccgaacugcucucucugauuaacgacaugccuaucaccaacgaucaaaagaaacuuaugagcaauaacguucagauugugagacagcaguccuacagcaucaugugcauuaucaaggaggaagugcuggccuaugucgugcaacucccccuguacggcguuaucgacaccccuuguuggaaacugcauacaucuccccucugcacgaccaauacaaaggagggguccaacauuugucugacccggacagaucgcggaugguacugcgacaaugcgggcagcgugagcuuuuucccucaggccgaaaccuguaagguccagucuaacagaguguuuugcgauacgaugaacuccagaacacugccgucugagguuaaucucugcaauaucgacauuuucaaccccaaauaugauuguaagaucaugaccagcaaaaccgacguguccagcucugucauuacaucccugggggcuaucgugagcugcuacggaaagaccaaauguacagccucuaauaagugccggggcaucauuaagacguuuuccaacgggugugauuaugucagcaauaaaggaguggacaccguuuccgugggcaacacacuuuacuaugucaauaagcaagagggcaaaucucuguacgugaagggggaaccuaucauuaacuucuaugacccccucguuuuuccuagcgaugaguucgacgcuuccaucucucaggugaacgagaaaauuaaucagagccuggccuuuauccgcaaguccgaugaacugcuccacaacgucaaugugggaaagagcaccacaaacauuaugaucaccacgaucauuaucgugauuaucguuauucugcuucugcucaucgccgucggccuguuccuguacugcaaagcuagaugaggacuagucccuguucccagagcccacuuuuuuuucuuuuuuugaaauaaaauagccugucuuucagaucuaaaaaaaaaaaaaaaaaaaaaaaaaaaaaaaaaaaaaaaaaaaaaaaaaaaaaaaaaaaaaaaaugcaucccccccccccccccccccccccccccccccaaaggcucuuuucagagccaccagaauu

SEQ ID NO: 17300 - RNA, 1870 nt, Artificial Sequence
  mRNA product Design a-4 comprising derived and/or modified sequence from HRSV(Memphis-37)__AIY60640.1__F-del_DSCav1_mut5 (opt6)
gggagacuccugucgggcggaaguaggaggaguagaguuuaaaaacaguacucuuuuuccgguucgggacguaguugaagcaacgacaagccggauaaccgcucuugagacaggaagcuuaccauggaauuacccaucuuaaaaacaaaugcaauaacaacaauacuagcagccguaacauuaugcuucgccucaagccaaaacauaacagaagaauuuuaccaaagcacauguuccgccguaucaaaaggauaucucucagcacuacguacuggaugguauacauccguaaucacaauugaacuaucaaacauuaaagaaaacaaaugcaauggaacagaugcgaaaguaaaacuaauaaaacaagaauuagauaaauauaaaaaugcaguaaccgaacuacaacuacuaaugcaaucaacucccgcugccgguagcggauccgccauagcaagcggaauugcuguauguaaaguccuacaucuugaaggcgaagucaacaaaaucaaaaaugcauuacucucgaccaacaaagcagucguaucacuaucaggaugcggagucucaguauuaacuuuuaaaguccuugaccuaaaaaacuacauagacaaacaacuacuaccaauucuaaauaaacaaaguugcagcauauccaauaucgaaacaguuauagaauuucaacaaaaaaacaaccgccuacuagaaaucacuagagaauuuucaguaaaugcaggcguaaccacaccagucucuaccuauaugcuuaccaacucugaauuauuaucacuuauaaacgacaugcccauaacaaaugaucaaaaaaaacuaaugagcaacaacguacaaauaguaagacaacaaagcuacagcauuauguguauaauaaaagaagaaguguuagcuuauguaguccaacuaccccucuauggcguuaucgauacaccaugcuggaaauuacacacaagcccucuaugcacaacuaacaccaaagaaggcucuaacauaugcuuaacaagaacagauagaggaugguauugcgauaacgcaggaucaguaucauucuuuccacaagcagaaacauguaaaguacaaucuaaccgaguauucugcgacacaaugaacucuagaacacuacccucagaaguuaaucucuguaauauugacauuuucaauccaaaauacgauugcaaaauaaugaccucuaaaaccgacguaucauccucaguuauaacguccuuaggagcaaucguaagcugcuauggcaaaacaaaauguaccgcaucaaacaaaugcagaggaauaauaaaaacauucucaaacggcugugacuacguaagcaauaaagguguugacacaguuucaguaggaaauacacuauacuauguaaauaaacaagaaggaaaaucucucuauguaaaaggagaacccauaauaaacuucuacgacccacucguauuuccaagcgaugaauuugaugcgagcauuucccagguaaaugaaaaaauaaaucaaucacuagcauucaucagaaaaagugaugaauuacuacacaauguuaacguaggaaaaucaacaacaaauaucaugauaacaacaaucauaauagucauaaucguaauauuacuauuacuaauagcaguagguuuauuucuauacuguaaagcaagguaaggacuagucccuguucccagagcccacuuuuuuuucuuuuuuugaaauaaaauagccugucuuucagaucuaaaaaaaaaaaaaaaaaaaaaaaaaaaaaaaaaaaaaaaaaaaaaaaaaaaaaaaaaaaaaaaaugcaucccccccccccccccccccccccccccccccaaaggcucuuuucagagccaccagaauu

SEQ ID NO: 17301 - RNA, 1870 nt, Artificial Sequence
  mRNA product Design a-4 comprising derived and/or modified sequence from HRSV(Memphis-37)__AIY60640.1__F-del_DSCav1_mut5 (opt11)
gggagacuccugucgggcggaaguaggaggaguagaguuuaaaaacaguacucuuuuuccgguucgggacguaguugaagcaacgacaagccggauaaccgcucuugagacaggaagcuuaccauggaacuucccauccuaaaaaccaacgccauaacaacaauccucgcagcagucacccucugcuucgccucuucacaaaacaucaccgaagaauuuuaccaaucaaccugcuccgccguguccaaaggcuaccucucagcacugcgcacaggaugguauaccagcguaaucaccaucgaacucuccaacaucaaggaaaacaaaugcaacggcaccgaugccaaagucaaacucaucaagcaagaacuugacaaauacaaaaacgccgugaccgagcuacaacuccucaugcaguccacuccagccgccggcuccggcagcgccaucgccuccggcaucgccguaugcaaaguccuccaccucgaaggcgaaguaaacaaaaucaagaacgcacuccuaagcaccaacaaagccgucgucucacucuccgguugcggcgucagcguccuaacauucaaaguucucgaccucaaaaacuacauagacaaacaacuccuccccauccucaacaaacaauccugcuccauaucaaacaucgaaaccguuaucgaauuucaacaaaaaaacaaccgccuccuagaaaucacccgcgaauuuuccgucaacgcaggcgucaccacccccguuuccaccuauaugcucaccaacuccgaacuccucucccucaucaacgacaugcccauuaccaacgaccaaaagaaacuuaugagcaacaacguucaaaucguccgacaacaaucauacuccaucaugugcauuaucaaagaagaaguacucgccuacguaguacaauuaccccucuacggcguaaucgacaccccaugcuggaaacuacacaccuccccccucuguaccaccaacaccaaagaaggcucuaacaucugccucacccgcacagaccguggcugguauugcgauaacgcagggucugucuccuucuucccccaagccgaaacaugcaaaguccaauccaacagagucuucugcgacaccaugaacucgagaacccuccccuccgaagucaaccuaugcaacaucgacaucuucaacccaaaauacgacugcaaaaucaugacuucaaaaacagacgugagcucguccgucaucacaagccuaggagcuaucguauccugcuacggaaaaacaaaaugcacugcuuccaacaaaugccgcggaaucauaaaaaccuucuccaacggcugcgacuacgucagcaacaaaggcgucgacacagucuccguaggcaacacccuauacuacgucaauaaacaagaaggcaagucccuauaugucaaaggcgagcccaucaucaauuucuaugauccccucguuuucccauccgacgaauuugacgcauccaucucccaagucaacgaaaaaauaaaccaaagccucgcauucauccgcaaauccgacgaacuccuccacaacguaaacguaggaaaauccacaacuaacaucaugaucaccaccaucaucaucgucauuaucgucauccuacuccuccucauagcagucggccucuuccucuacugcaaagcacgcuagggacuagucccuguucccagagcccacuuuuuuuucuuuuuuugaaauaaaauagccugucuuucagaucuaaaaaaaaaaaaaaaaaaaaaaaaaaaaaaaaaaaaaaaaaaaaaaaaaaaaaaaaaaaaaaaaugcaucccccccccccccccccccccccccccccccaaaggcucuuuucagagccaccagaauu

SEQ ID NO: 17302 - RNA, 1816 nt, Artificial Sequence
  mRNA product Design a-5 comprising derived and/or modified sequence from HRSV(Memphis-37)__AIY60640.1__F-del_DSCav1_mut5 (opt1)
gggagacuuucccauucuguagcagaauuugguguugccuguggucuuggucccgcggagaagcuuaccauggagcugcccauccucaagaccaacgccaucaccacgauccuggccgcggugacccugugcuucgccagcucccagaacaucaccgaggaguucuaccagagcacgugcuccgccgucagcaagggcuaccucuccgcccugcgcaccgggugguacaccagcgugaucaccaucgagcuguccaacaucaaggagaacaagugcaacggcaccgacgccaaggugaagcucaucaagcaggagcuggacaaguacaagaacgcggucacggagcugcagcuccugaugcagagcaccccggccgccggcuccgggagcgcgaucgccuccggcaucgccgucugcaaggugcugcaccucgagggcgaggugaacaagaucaagaacgcccugcuguccaccaacaaggccgucgugagccucuccggcugcggggugagcguccugaccuucaaggugcuggaccucaagaacuacaucgacaagcagcugcugcccauccugaacaagcagagcugcuccaucagcaacaucgagaccgucaucgaguuccagcagaagaacaaccgccuccuggagaucacgcgggaguucagcgugaacgcgggcgugaccacccccgucuccaccuacaugcugacgaacagcgagcuccugucccugaucaacgacaugccgaucaccaacgaccagaagaagcucaugagcaacaacgugcagaucgugcgccagcaguccuacagcaucaugugcaucaucaaggaggagguccuggccuacguggugcagcugccccucuacggggucaucgacacccccugcuggaagcugcacaccagcccccugugcacgaccaacaccaaggagggcuccaacaucugccucacccggacggaccgcgggugguacugcgacaacgccggcagcguguccuucuucccgcaggccgagaccugcaagguccagagcaaccggguguucugcgacaccaugaacucccggacccugcccagcgaggugaaccucugcaacaucgacaucuucaaccccaaguacgacugcaagaucaugacguccaagaccgacgucagcuccagcgugaucaccucccugggcgccaucgugagcugcuacgggaagaccaagugcacggcgagcaacaagugccgcggcaucaucaagaccuucuccaacgggugcgacuacgucagcaacaagggcguggacaccguguccgucggcaacacccuguacuacgugaacaagcaggagggcaagagccucuacgugaagggggagcccaucaucaacuucuacgacccgcuggucuuccccuccgacgaguucgacgccagcaucucccaggugaacgagaagaucaaccagagccuggccuucauccggaaguccgacgagcuccugcacaacgugaacgucggcaagagcaccacgaacaucaugaucaccaccaucaucaucgugaucaucgugauccugcugcuccugaucgccgucgggcuguuccucuacugcaaggcccgcugaggacuagucccuguucccagagcccacuuuuuuuucuuuuuuugaaauaaaauagccugucuuucagaucuaaaaaaaaaaaaaaaaaaaaaaaaaaaaaaaaaaaaaaaaaaaaaaaaaaaaaaaaaaaaaaaaugcaucccccccccccccccccccccccccccccccaaaggcucuuuucagagccaccagaauu

SEQ ID NO: 17303 - RNA, 1816 nt, Artificial Sequence
  mRNA product Design a-5 comprising derived and/or modified sequence from HRSV(Memphis-37)__AIY60640.1__F-del_DSCav1_mut5 (opt1)
gggagacuuucccauucuguagcagaauuugguguugccuguggucuuggucccgcggagaagcuuaccauggagcugcccauccucaagaccaacgccaucaccacgauccuggccgcggugacccugugcuucgccagcucccagaacaucaccgaggaguucuaccagagcacgugcuccgccgucagcaagggcuaccucuccgcccugcgcaccgggugguacaccagcgugaucaccaucgagcuguccaacaucaaggagaacaagugcaacggcaccgacgccaaggugaagcucaucaagcaggagcuggacaaguacaagaacgcggucacggagcugcagcuccugaugcagagcaccccggccgccggguccggcagcgccaucgcguccgggaucgccgugugcaaggugcugcaccucgagggcgaggucaacaagaucaagaacgcccugcugagcaccaacaaggccguggugucccucagcggcugcggggucuccgugcugaccuucaaggugcuggaccucaagaacuacaucgacaagcagcugcugcccauccucaacaagcagagcugcuccaucagcaacaucgagacggucaucgaguuccagcagaagaacaaccggcugcuggagaucacccgcgaguucuccgugaacgccggcgugaccacccccgucagcacguacaugcucaccaacagcgagcugcugucccucaucaacgacaugcccaucaccaacgaccagaagaagcugaugagcaacaacgugcagaucgugcggcagcaguccuacagcaucaugugcaucaucaaggaggagguccuggcguacguggugcagcucccgcuguacggggucaucgacacccccugcuggaagcugcacacgagcccccucugcaccaccaacaccaaggagggcuccaacaucugccugacgcgcaccgaccgggggugguacugcgacaacgccggcuccgugagcuucuucccccaggccgagaccugcaaggugcaguccaaccgcgucuucugcgacaccaugaacagccggacgcucccguccgaggugaaccugugcaacaucgacaucuucaaccccaaguacgacugcaagaucaugaccagcaagaccgacgucuccagcuccgugaucaccagccugggcgccaucguguccugcuacgggaagacgaagugcaccgccagcaacaagugccggggcaucaucaagaccuucuccaacgggugcgacuacgucagcaacaagggcguggacaccgugagcgucggcaacacgcucuacuacgugaacaagcaggaggggaagucccuguacgugaagggcgagcccaucaucaacuucuacgacccccuggucuucccgagcgacgaguucgacgcguccaucagccaggugaacgagaagaucaaccagucccucgccuucauccgcaagagcgacgagcugcugcacaacgugaacgucgggaaguccaccaccaacaucaugaucaccaccaucaucaucgugaucaucgugauccuccugcugcucaucgccgucggccuguuccuguacugcaaggcccggugaggacuagucccuguucccagagcccacuuuuuuuucuuuuuuugaaauaaaauagccugucuuucagaucuaaaaaaaaaaaaaaaaaaaaaaaaaaaaaaaaaaaaaaaaaaaaaaaaaaaaaaaaaaaaaaaaugcaucccccccccccccccccccccccccccccccaaaggcucuuuucagagccaccagaauu

SEQ ID NO: 17304 - RNA, 1816 nt, Artificial Sequence
  mRNA product Design a-5 comprising derived and/or modified sequence from HRSV(Memphis-37)__AIY60640.1__F-del_DSCav1_mut5 (opt2)
gggagacuuucccauucuguagcagaauuugguguugccuguggucuuggucccgcggagaagcuuaccauggagcuccccauccucaagaccaacgccaucaccaccauccucgccgccgucacccucugcuucgccuccucccagaacaucaccgaggaguucuaccaguccaccugcuccgccgucuccaagggcuaccucuccgcccuccgcaccggcugguacaccuccgucaucaccaucgagcucuccaacaucaaggagaacaagugcaacggcaccgacgccaaggucaagcucaucaagcaggagcucgacaaguacaagaacgccgucaccgagcuccagcuccucaugcaguccacccccgccgccggcuccggcuccgccaucgccuccggcaucgccgucugcaagguccuccaccucgagggcgaggucaacaagaucaagaacgcccuccucuccaccaacaaggccgucgucucccucuccggcugcggcgucuccguccucaccuucaagguccucgaccucaagaacuacaucgacaagcagcuccuccccauccucaacaagcaguccugcuccaucuccaacaucgagaccgucaucgaguuccagcagaagaacaaccgccuccucgagaucacccgcgaguucuccgucaacgccggcgucaccacccccgucuccaccuacaugcucaccaacuccgagcuccucucccucaucaacgacaugcccaucaccaacgaccagaagaagcucauguccaacaacguccagaucguccgccagcaguccuacuccaucaugugcaucaucaaggaggagguccucgccuacgucguccagcucccccucuacggcgucaucgacacccccugcuggaagcuccacaccuccccccucugcaccaccaacaccaaggagggcuccaacaucugccucacccgcaccgaccgcggcugguacugcgacaacgccggcuccgucuccuucuucccccaggccgagaccugcaagguccaguccaaccgcgucuucugcgacaccaugaacucccgcacccuccccuccgaggucaaccucugcaacaucgacaucuucaaccccaaguacgacugcaagaucaugaccuccaagaccgacgucuccuccuccgucaucaccucccucggcgccaucgucuccugcuacggcaagaccaagugcaccgccuccaacaagugccgcggcaucaucaagaccuucuccaacggcugcgacuacgucuccaacaagggcgucgacaccgucuccgucggcaacacccucuacuacgucaacaagcaggagggcaagucccucuacgucaagggcgagcccaucaucaacuucuacgacccccucgucuuccccuccgacgaguucgacgccuccaucucccaggucaacgagaagaucaaccagucccucgccuucauccgcaaguccgacgagcuccuccacaacgucaacgucggcaaguccaccaccaacaucaugaucaccaccaucaucaucgucaucaucgucauccuccuccuccucaucgccgucggccucuuccucuacugcaaggcccgcugaggacuagucccuguucccagagcccacuuuuuuuucuuuuuuugaaauaaaauagccugucuuucagaucuaaaaaaaaaaaaaaaaaaaaaaaaaaaaaaaaaaaaaaaaaaaaaaaaaaaaaaaaaaaaaaaaugcaucccccccccccccccccccccccccccccccaaaggcucuuuucagagccaccagaauu

SEQ ID NO: 17305 - RNA, 1816 nt, Artificial Sequence
  mRNA product Design a-5 comprising derived and/or modified sequence from HRSV(Memphis-37)__AIY60640.1__F-del_DSCav1_mut5 (opt3)
gggagacuuucccauucuguagcagaauuugguguugccuguggucuuggucccgcggagaagcuuaccauggagcugcccauccucaagaccaacgccauuacaacuauacuugcugcagugacgcugugcuucgccagcucccagaauaucaccgaagaguuuuaccaaucuacauguucagcggucaguaaaggcuauuugagcgcuuuaagaacugggugguacaccuccguuauuacaaucgaacugucuaacauuaaggagaauaaaugcaacggaaccgacgccaaggugaaacuaaucaagcaggaacucgauaaguauaaaaaugcaguaacugagcugcagcuucugaugcagucgaccccugccgcugguucaggcagcgcaauagccagugggaucgcuguguguaaggucuugcaccucgagggagaagugaacaaaauuaagaaugcccugcuguccacaaacaaagcgguugugucucucagcggcugcggugucuccguguuaacguucaagguacuggaccuuaagaauuacaucgauaaacaauugcugccaauucuaaacaagcagucauguaguaucagcaauauagagacuguuauugaauuucagcagaaaaacaauaggcuccuggagaucacccgggaguucucugugaacgcaggggucacaacuccgguguccaccuauaugcuuacaaauucagaacuguugagccucauuaacgacaugcccaucaccaacgaucaaaagaaacugaugaguaauaacgugcagaucguccgccagcagucuuacuccauuaugugcauaaucaaggaggaaguuuuagccuaugugguacaacugccucucuacggagugauugacacgccauguuggaaacuucauacuagcccccugugcacaaccaauacuaaggagggcucgaacaucuguuugacacgaaccgaucguggcugguacugcgacaaugcugggucugucuccuuuuucccucaggccgaaacguguaaggugcagucaaacagaguguuuugcgauaccaugaauaguagaacacugccaagcgaggugaaccucugcaauauagacauuuucaaccccaaauaugauuguaagaucaugacuuccaaaaccgacgucucuagcucagugaucacaagucugggagcaauuguauccugcuacgguaagacuaaauguaccgcuagcaauaagugcaggggcaucauuaagacauuuucuaacgggugugauuauguuucaaauaaaggaguggacaccgucagugugggcaacacucuuuacuaugucaauaagcaagaggguaaaagccuguacgugaagggggaaccuauaaucaacuucuaugacccauugguuuuuccguccgaugaguucgacgccucuauuucgcagguuaacgagaaaaucaaucagagccucgcguuuauccggaaguccgaugaacuguuacacaacguaaaugucggaaagucaacgacaaacauuaugauaaccacuaucauuaucgugauuaucguuauacugcuacuccugaucgccgugggccuuuucuuguacugcaaagcacgcugaggacuagucccuguucccagagcccacuuuuuuuucuuuuuuugaaauaaaauagccugucuuucagaucuaaaaaaaaaaaaaaaaaaaaaaaaaaaaaaaaaaaaaaaaaaaaaaaaaaaaaaaaaaaaaaaaugcaucccccccccccccccccccccccccccccccaaaggcucuuuucagagccaccagaauu

SEQ ID NO: 17306 - RNA, 1816 nt, Artificial Sequence
  mRNA product Design a-5 comprising derived and/or modified sequence from HRSV(Memphis-37)__AIY60640.1__F-del_DSCav1_mut5 (opt4)
gggagacuuucccauucuguagcagaauuugguguugccuguggucuuggucccgcggagaagcuuaccauggagcugcccauccugaagaccaacgccaucaccaccauccuggccgccgugacccugugcuucgccagcagccagaacaucaccgaggaguucuaccagagcaccugcagcgccgugagcaagggcuaccugagcgcccugagaaccggcugguacaccagcgugaucaccaucgagcugagcaacaucaaggagaacaagugcaacggcaccgacgccaaggugaagcugaucaagcaggagcuggacaaguacaagaacgccgugaccgagcugcagcugcugaugcagagcacccccgccgccggcagcggcagcgccaucgccagcggcaucgccgugugcaaggugcugcaccuggagggcgaggugaacaagaucaagaacgcccugcugagcaccaacaaggccguggugagccugagcggcugcggcgugagcgugcugaccuucaaggugcuggaccugaagaacuacaucgacaagcagcugcugcccauccugaacaagcagagcugcagcaucagcaacaucgagaccgugaucgaguuccagcagaagaacaacagacugcuggagaucaccagagaguucagcgugaacgccggcgugaccacccccgugagcaccuacaugcugaccaacagcgagcugcugagccugaucaacgacaugcccaucaccaacgaccagaagaagcugaugagcaacaacgugcagaucgugagacagcagagcuacagcaucaugugcaucaucaaggaggaggugcuggccuacguggugcagcugccccuguacggcgugaucgacacccccugcuggaagcugcacaccagcccccugugcaccaccaacaccaaggagggcagcaacaucugccugaccagaaccgacagaggcugguacugcgacaacgccggcagcgugagcuucuucccccaggccgagaccugcaaggugcagagcaacagaguguucugcgacaccaugaacagcagaacccugcccagcgaggugaaccugugcaacaucgacaucuucaaccccaaguacgacugcaagaucaugaccagcaagaccgacgugagcagcagcgugaucaccagccugggcgccaucgugagcugcuacggcaagaccaagugcaccgccagcaacaagugcagaggcaucaucaagaccuucagcaacggcugcgacuacgugagcaacaagggcguggacaccgugagcgugggcaacacccuguacuacgugaacaagcaggagggcaagagccuguacgugaagggcgagcccaucaucaacuucuacgacccccugguguuccccagcgacgaguucgacgccagcaucagccaggugaacgagaagaucaaccagagccuggccuucaucagaaagagcgacgagcugcugcacaacgugaacgugggcaagagcaccaccaacaucaugaucaccaccaucaucaucgugaucaucgugauccugcugcugcugaucgccgugggccuguuccuguacugcaaggccagaugaggacuagucccuguucccagagcccacuuuuuuuucuuuuuuugaaauaaaauagccugucuuucagaucuaaaaaaaaaaaaaaaaaaaaaaaaaaaaaaaaaaaaaaaaaaaaaaaaaaaaaaaaaaaaaaaaugcaucccccccccccccccccccccccccccccccaaaggcucuuuucagagccaccagaauu

SEQ ID NO: 17307 - RNA, 1816 nt, Artificial Sequence
  mRNA product Design a-5 comprising derived and/or modified sequence from HRSV(Memphis-37)__AIY60640.1__F-del_DSCav1_mut5 (opt5)
gggagacuuucccauucuguagcagaauuugguguugccuguggucuuggucccgcggagaagcuuaccauggagcugcccauccucaagaccaacgccauuacaacgauccuggcugccgugacccuuugcuucgcgagcucccagaauauuacagaagaguuuuaccaaucuaccuguagcgcugucuccaaaggcuaucugucugcccucagaacagggugguacaccagcguuaucacaauugaacuguccaacaucaaggagaauaaaugcaacggaaccgacgccaaggugaaacuuaucaagcaggaacuggauaaguauaaaaaugcugugacggagcuccagcugcugaugcagucuaccccugccgcuggcagcggguccgccauugcgagcggaaucgccgucuguaaggugcuccaccuggagggcgaaguuaacaaaauuaagaaugcccuucugucuacaaacaaagcuguggucucccucagcgggugcggagugucuguucugaccuucaaggugcuugaccugaagaauuacaucgauaaacaacuccugccgauucugaacaagcaguccuguagcaucucuaauauugagacagucaucgaauuucagcagaaaaacaaucggcuccuggagaucacccgcgaguucuccgugaacgcuggcgugacgacacccgucagcaccuauaugcuuacaaauuccgaacugcucucucugauuaacgacaugccuaucaccaacgaucaaaagaaacuuaugagcaauaacguucagauugugagacagcaguccuacagcaucaugugcauuaucaaggaggaagugcuggccuaugucgugcaacucccccuguacggcguuaucgacaccccuuguuggaaacugcauacaucuccccucugcacgaccaauacaaaggagggguccaacauuugucugacccggacagaucgcggaugguacugcgacaaugcgggcagcgugagcuuuuucccucaggccgaaaccuguaagguccagucuaacagaguguuuugcgauacgaugaacuccagaacacugccgucugagguuaaucucugcaauaucgacauuuucaaccccaaauaugauuguaagaucaugaccagcaaaaccgacguguccagcucugucauuacaucccugggggcuaucgugagcugcuacggaaagaccaaauguacagccucuaauaagugccggggcaucauuaagacguuuuccaacgggugugauuaugucagcaauaaaggaguggacaccguuuccgugggcaacacacuuuacuaugucaauaagcaagagggcaaaucucuguacgugaagggggaaccuaucauuaacuucuaugacccccucguuuuuccuagcgaugaguucgacgcuuccaucucucaggugaacgagaaaauuaaucagagccuggccuuuauccgcaaguccgaugaacugcuccacaacgucaaugugggaaagagcaccacaaacauuaugaucaccacgaucauuaucgugauuaucguuauucugcuucugcucaucgccgucggccuguuccuguacugcaaagcuagaugaggacuagucccuguucccagagcccacuuuuuuuucuuuuuuugaaauaaaauagccugucuuucagaucuaaaaaaaaaaaaaaaaaaaaaaaaaaaaaaaaaaaaaaaaaaaaaaaaaaaaaaaaaaaaaaaaugcaucccccccccccccccccccccccccccccccaaaggcucuuuucagagccaccagaauu

SEQ ID NO: 17308 - RNA, 1816 nt, Artificial Sequence
  mRNA product Design a-5 comprising derived and/or modified sequence from HRSV(Memphis-37)__AIY60640.1__F-del_DSCav1_mut5 (opt6)
gggagacuuucccauucuguagcagaauuugguguugccuguggucuuggucccgcggagaagcuuaccauggaauuacccaucuuaaaaacaaaugcaauaacaacaauacuagcagccguaacauuaugcuucgccucaagccaaaacauaacagaagaauuuuaccaaagcacauguuccgccguaucaaaaggauaucucucagcacuacguacuggaugguauacauccguaaucacaauugaacuaucaaacauuaaagaaaacaaaugcaauggaacagaugcgaaaguaaaacuaauaaaacaagaauuagauaaauauaaaaaugcaguaaccgaacuacaacuacuaaugcaaucaacucccgcugccgguagcggauccgccauagcaagcggaauugcuguauguaaaguccuacaucuugaaggcgaagucaacaaaaucaaaaaugcauuacucucgaccaacaaagcagucguaucacuaucaggaugcggagucucaguauuaacuuuuaaaguccuugaccuaaaaaacuacauagacaaacaacuacuaccaauucuaaauaaacaaaguugcagcauauccaauaucgaaacaguuauagaauuucaacaaaaaaacaaccgccuacuagaaaucacuagagaauuuucaguaaaugcaggcguaaccacaccagucucuaccuauaugcuuaccaacucugaauuauuaucacuuauaaacgacaugcccauaacaaaugaucaaaaaaaacuaaugagcaacaacguacaaauaguaagacaacaaagcuacagcauuauguguauaauaaaagaagaaguguuagcuuauguaguccaacuaccccucuauggcguuaucgauacaccaugcuggaaauuacacacaagcccucuaugcacaacuaacaccaaagaaggcucuaacauaugcuuaacaagaacagauagaggaugguauugcgauaacgcaggaucaguaucauucuuuccacaagcagaaacauguaaaguacaaucuaaccgaguauucugcgacacaaugaacucuagaacacuacccucagaaguuaaucucuguaauauugacauuuucaauccaaaauacgauugcaaaauaaugaccucuaaaaccgacguaucauccucaguuauaacguccuuaggagcaaucguaagcugcuauggcaaaacaaaauguaccgcaucaaacaaaugcagaggaauaauaaaaacauucucaaacggcugugacuacguaagcaauaaagguguugacacaguuucaguaggaaauacacuauacuauguaaauaaacaagaaggaaaaucucucuauguaaaaggagaacccauaauaaacuucuacgacccacucguauuuccaagcgaugaauuugaugcgagcauuucccagguaaaugaaaaaauaaaucaaucacuagcauucaucagaaaaagugaugaauuacuacacaauguuaacguaggaaaaucaacaacaaauaucaugauaacaacaaucauaauagucauaaucguaauauuacuauuacuaauagcaguagguuuauuucuauacuguaaagcaagguaaggacuagucccuguucccagagcccacuuuuuuuucuuuuuuugaaauaaaauagccugucuuucagaucuaaaaaaaaaaaaaaaaaaaaaaaaaaaaaaaaaaaaaaaaaaaaaaaaaaaaaaaaaaaaaaaaugcaucccccccccccccccccccccccccccccccaaaggcucuuuucagagccaccagaauu

SEQ ID NO: 17309 - RNA, 1816 nt, Artificial Sequence
  mRNA product Design a-5 comprising derived and/or modified sequence from HRSV(Memphis-37)__AIY60640.1__F-del_DSCav1_mut5 (opt11)
gggagacuuucccauucuguagcagaauuugguguugccuguggucuuggucccgcggagaagcuuaccauggaacuucccauccuaaaaaccaacgccauaacaacaauccucgcagcagucacccucugcuucgccucuucacaaaacaucaccgaagaauuuuaccaaucaaccugcuccgccguguccaaaggcuaccucucagcacugcgcacaggaugguauaccagcguaaucaccaucgaacucuccaacaucaaggaaaacaaaugcaacggcaccgaugccaaagucaaacucaucaagcaagaacuugacaaauacaaaaacgccgugaccgagcuacaacuccucaugcaguccacuccagccgccggcuccggcagcgccaucgccuccggcaucgccguaugcaaaguccuccaccucgaaggcgaaguaaacaaaaucaagaacgcacuccuaagcaccaacaaagccgucgucucacucuccgguugcggcgucagcguccuaacauucaaaguucucgaccucaaaaacuacauagacaaacaacuccuccccauccucaacaaacaauccugcuccauaucaaacaucgaaaccguuaucgaauuucaacaaaaaaacaaccgccuccuagaaaucacccgcgaauuuuccgucaacgcaggcgucaccacccccguuuccaccuauaugcucaccaacuccgaacuccucucccucaucaacgacaugcccauuaccaacgaccaaaagaaacuuaugagcaacaacguucaaaucguccgacaacaaucauacuccaucaugugcauuaucaaagaagaaguacucgccuacguaguacaauuaccccucuacggcguaaucgacaccccaugcuggaaacuacacaccuccccccucuguaccaccaacaccaaagaaggcucuaacaucugccucacccgcacagaccguggcugguauugcgauaacgcagggucugucuccuucuucccccaagccgaaacaugcaaaguccaauccaacagagucuucugcgacaccaugaacucgagaacccuccccuccgaagucaaccuaugcaacaucgacaucuucaacccaaaauacgacugcaaaaucaugacuucaaaaacagacgugagcucguccgucaucacaagccuaggagcuaucguauccugcuacggaaaaacaaaaugcacugcuuccaacaaaugccgcggaaucauaaaaaccuucuccaacggcugcgacuacgucagcaacaaaggcgucgacacagucuccguaggcaacacccuauacuacgucaauaaacaagaaggcaagucccuauaugucaaaggcgagcccaucaucaauuucuaugauccccucguuuucccauccgacgaauuugacgcauccaucucccaagucaacgaaaaaauaaaccaaagccucgcauucauccgcaaauccgacgaacuccuccacaacguaaacguaggaaaauccacaacuaacaucaugaucaccaccaucaucaucgucauuaucgucauccuacuccuccucauagcagucggccucuuccucuacugcaaagcacgcuagggacuagucccuguucccagagcccacuuuuuuuucuuuuuuugaaauaaaauagccugucuuucagaucuaaaaaaaaaaaaaaaaaaaaaaaaaaaaaaaaaaaaaaaaaaaaaaaaaaaaaaaaaaaaaaaaugcaucccccccccccccccccccccccccccccccaaaggcucuuuucagagccaccagaauu

SEQ ID NO: 17310 - RNA, 1997 nt, Artificial Sequence
  mRNA product Design b-1 comprising derived and/or modified sequence from HRSV(Memphis-37)__AIY60640.1__F-del_DSCav1_mut5 (opt1)
gggagacggagacggccugcaggaccugcucucucagcccucagccgaggccuacgccgagccgagugcgcagccgacgaccgggaggagccgcagccuucaacucugagguacugugauccgcgcugcccgccgggccgccccaguccgcugcugcggcaccuccuucccucgcgcccucuucgcucgccagcgccuucccugugagccugcgucaccgcggccgccaagcuuaccauggagcugcccauccucaagaccaacgccaucaccacgauccuggccgcggugacccugugcuucgccagcucccagaacaucaccgaggaguucuaccagagcacgugcuccgccgucagcaagggcuaccucuccgcccugcgcaccgggugguacaccagcgugaucaccaucgagcuguccaacaucaaggagaacaagugcaacggcaccgacgccaaggugaagcucaucaagcaggagcuggacaaguacaagaacgcggucacggagcugcagcuccugaugcagagcaccccggccgccggcuccgggagcgcgaucgccuccggcaucgccgucugcaaggugcugcaccucgagggcgaggugaacaagaucaagaacgcccugcuguccaccaacaaggccgucgugagccucuccggcugcggggugagcguccugaccuucaaggugcuggaccucaagaacuacaucgacaagcagcugcugcccauccugaacaagcagagcugcuccaucagcaacaucgagaccgucaucgaguuccagcagaagaacaaccgccuccuggagaucacgcgggaguucagcgugaacgcgggcgugaccacccccgucuccaccuacaugcugacgaacagcgagcuccugucccugaucaacgacaugccgaucaccaacgaccagaagaagcucaugagcaacaacgugcagaucgugcgccagcaguccuacagcaucaugugcaucaucaaggaggagguccuggccuacguggugcagcugccccucuacggggucaucgacacccccugcuggaagcugcacaccagcccccugugcacgaccaacaccaaggagggcuccaacaucugccucacccggacggaccgcgggugguacugcgacaacgccggcagcguguccuucuucccgcaggccgagaccugcaagguccagagcaaccggguguucugcgacaccaugaacucccggacccugcccagcgaggugaaccucugcaacaucgacaucuucaaccccaaguacgacugcaagaucaugacguccaagaccgacgucagcuccagcgugaucaccucccugggcgccaucgugagcugcuacgggaagaccaagugcacggcgagcaacaagugccgcggcaucaucaagaccuucuccaacgggugcgacuacgucagcaacaagggcguggacaccguguccgucggcaacacccuguacuacgugaacaagcaggagggcaagagccucuacgugaagggggagcccaucaucaacuucuacgacccgcuggucuuccccuccgacgaguucgacgccagcaucucccaggugaacgagaagaucaaccagagccuggccuucauccggaaguccgacgagcuccugcacaacgugaacgucggcaagagcaccacgaacaucaugaucaccaccaucaucaucgugaucaucgugauccugcugcuccugaucgccgucgggcuguuccucuacugcaaggcccgcugaggacuaguguccaccugucccuccugggcugcuggauugucucguuuuccugccaaauaaacaggaucagcgcuuuacagaucuaaaaaaaaaaaaaaaaaaaaaaaaaaaaaaaaaaaaaaaaaaaaaaaaaaaaaaaaaaaaaaaaugcaucccccccccccccccccccccccccccccccaaaggcucuuuucagagccaccagaauu

SEQ ID NO: 17311 - RNA, 1997 nt, Artificial Sequence
  mRNA product Design b-1 comprising derived and/or modified sequence from HRSV(Memphis-37)__AIY60640.1__F-del_DSCav1_mut5 (opt1)
gggagacggagacggccugcaggaccugcucucucagcccucagccgaggccuacgccgagccgagugcgcagccgacgaccgggaggagccgcagccuucaacucugagguacugugauccgcgcugcccgccgggccgccccaguccgcugcugcggcaccuccuucccucgcgcccucuucgcucgccagcgccuucccugugagccugcgucaccgcggccgccaagcuuaccauggagcugcccauccucaagaccaacgccaucaccacgauccuggccgcggugacccugugcuucgccagcucccagaacaucaccgaggaguucuaccagagcacgugcuccgccgucagcaagggcuaccucuccgcccugcgcaccgggugguacaccagcgugaucaccaucgagcuguccaacaucaaggagaacaagugcaacggcaccgacgccaaggugaagcucaucaagcaggagcuggacaaguacaagaacgcggucacggagcugcagcuccugaugcagagcaccccggccgccggguccggcagcgccaucgcguccgggaucgccgugugcaaggugcugcaccucgagggcgaggucaacaagaucaagaacgcccugcugagcaccaacaaggccguggugucccucagcggcugcggggucuccgugcugaccuucaaggugcuggaccucaagaacuacaucgacaagcagcugcugcccauccucaacaagcagagcugcuccaucagcaacaucgagacggucaucgaguuccagcagaagaacaaccggcugcuggagaucacccgcgaguucuccgugaacgccggcgugaccacccccgucagcacguacaugcucaccaacagcgagcugcugucccucaucaacgacaugcccaucaccaacgaccagaagaagcugaugagcaacaacgugcagaucgugcggcagcaguccuacagcaucaugugcaucaucaaggaggagguccuggcguacguggugcagcucccgcuguacggggucaucgacacccccugcuggaagcugcacacgagcccccucugcaccaccaacaccaaggagggcuccaacaucugccugacgcgcaccgaccgggggugguacugcgacaacgccggcuccgugagcuucuucccccaggccgagaccugcaaggugcaguccaaccgcgucuucugcgacaccaugaacagccggacgcucccguccgaggugaaccugugcaacaucgacaucuucaaccccaaguacgacugcaagaucaugaccagcaagaccgacgucuccagcuccgugaucaccagccugggcgccaucguguccugcuacgggaagacgaagugcaccgccagcaacaagugccggggcaucaucaagaccuucuccaacgggugcgacuacgucagcaacaagggcguggacaccgugagcgucggcaacacgcucuacuacgugaacaagcaggaggggaagucccuguacgugaagggcgagcccaucaucaacuucuacgacccccuggucuucccgagcgacgaguucgacgcguccaucagccaggugaacgagaagaucaaccagucccucgccuucauccgcaagagcgacgagcugcugcacaacgugaacgucgggaaguccaccaccaacaucaugaucaccaccaucaucaucgugaucaucgugauccuccugcugcucaucgccgucggccuguuccuguacugcaaggcccggugaggacuaguguccaccugucccuccugggcugcuggauugucucguuuuccugccaaauaaacaggaucagcgcuuuacagaucuaaaaaaaaaaaaaaaaaaaaaaaaaaaaaaaaaaaaaaaaaaaaaaaaaaaaaaaaaaaaaaaaugcaucccccccccccccccccccccccccccccccaaaggcucuuuucagagccaccagaauu

SEQ ID NO: 17312 - RNA, 1997 nt, Artificial Sequence
  mRNA product Design b-1 comprising derived and/or modified sequence from HRSV(Memphis-37)__AIY60640.1__F-del_DSCav1_mut5 (opt2)
gggagacggagacggccugcaggaccugcucucucagcccucagccgaggccuacgccgagccgagugcgcagccgacgaccgggaggagccgcagccuucaacucugagguacugugauccgcgcugcccgccgggccgccccaguccgcugcugcggcaccuccuucccucgcgcccucuucgcucgccagcgccuucccugugagccugcgucaccgcggccgccaagcuuaccauggagcuccccauccucaagaccaacgccaucaccaccauccucgccgccgucacccucugcuucgccuccucccagaacaucaccgaggaguucuaccaguccaccugcuccgccgucuccaagggcuaccucuccgcccuccgcaccggcugguacaccuccgucaucaccaucgagcucuccaacaucaaggagaacaagugcaacggcaccgacgccaaggucaagcucaucaagcaggagcucgacaaguacaagaacgccgucaccgagcuccagcuccucaugcaguccacccccgccgccggcuccggcuccgccaucgccuccggcaucgccgucugcaagguccuccaccucgagggcgaggucaacaagaucaagaacgcccuccucuccaccaacaaggccgucgucucccucuccggcugcggcgucuccguccucaccuucaagguccucgaccucaagaacuacaucgacaagcagcuccuccccauccucaacaagcaguccugcuccaucuccaacaucgagaccgucaucgaguuccagcagaagaacaaccgccuccucgagaucacccgcgaguucuccgucaacgccggcgucaccacccccgucuccaccuacaugcucaccaacuccgagcuccucucccucaucaacgacaugcccaucaccaacgaccagaagaagcucauguccaacaacguccagaucguccgccagcaguccuacuccaucaugugcaucaucaaggaggagguccucgccuacgucguccagcucccccucuacggcgucaucgacacccccugcuggaagcuccacaccuccccccucugcaccaccaacaccaaggagggcuccaacaucugccucacccgcaccgaccgcggcugguacugcgacaacgccggcuccgucuccuucuucccccaggccgagaccugcaagguccaguccaaccgcgucuucugcgacaccaugaacucccgcacccuccccuccgaggucaaccucugcaacaucgacaucuucaaccccaaguacgacugcaagaucaugaccuccaagaccgacgucuccuccuccgucaucaccucccucggcgccaucgucuccugcuacggcaagaccaagugcaccgccuccaacaagugccgcggcaucaucaagaccuucuccaacggcugcgacuacgucuccaacaagggcgucgacaccgucuccgucggcaacacccucuacuacgucaacaagcaggagggcaagucccucuacgucaagggcgagcccaucaucaacuucuacgacccccucgucuuccccuccgacgaguucgacgccuccaucucccaggucaacgagaagaucaaccagucccucgccuucauccgcaaguccgacgagcuccuccacaacgucaacgucggcaaguccaccaccaacaucaugaucaccaccaucaucaucgucaucaucgucauccuccuccuccucaucgccgucggccucuuccucuacugcaaggcccgcugaggacuaguguccaccugucccuccugggcugcuggauugucucguuuuccugccaaauaaacaggaucagcgcuuuacagaucuaaaaaaaaaaaaaaaaaaaaaaaaaaaaaaaaaaaaaaaaaaaaaaaaaaaaaaaaaaaaaaaaugcaucccccccccccccccccccccccccccccccaaaggcucuuuucagagccaccagaauu

SEQ ID NO: 17313 - RNA, 1997 nt, Artificial Sequence
  mRNA product Design b-1 comprising derived and/or modified sequence from HRSV(Memphis-37)__AIY60640.1__F-del_DSCav1_mut5 (opt3)
gggagacggagacggccugcaggaccugcucucucagcccucagccgaggccuacgccgagccgagugcgcagccgacgaccgggaggagccgcagccuucaacucugagguacugugauccgcgcugcccgccgggccgccccaguccgcugcugcggcaccuccuucccucgcgcccucuucgcucgccagcgccuucccugugagccugcgucaccgcggccgccaagcuuaccauggagcugcccauccucaagaccaacgccauuacaacuauacuugcugcagugacgcugugcuucgccagcucccagaauaucaccgaagaguuuuaccaaucuacauguucagcggucaguaaaggcuauuugagcgcuuuaagaacugggugguacaccuccguuauuacaaucgaacugucuaacauuaaggagaauaaaugcaacggaaccgacgccaaggugaaacuaaucaagcaggaacucgauaaguauaaaaaugcaguaacugagcugcagcuucugaugcagucgaccccugccgcugguucaggcagcgcaauagccagugggaucgcuguguguaaggucuugcaccucgagggagaagugaacaaaauuaagaaugcccugcuguccacaaacaaagcgguugugucucucagcggcugcggugucuccguguuaacguucaagguacuggaccuuaagaauuacaucgauaaacaauugcugccaauucuaaacaagcagucauguaguaucagcaauauagagacuguuauugaauuucagcagaaaaacaauaggcuccuggagaucacccgggaguucucugugaacgcaggggucacaacuccgguguccaccuauaugcuuacaaauucagaacuguugagccucauuaacgacaugcccaucaccaacgaucaaaagaaacugaugaguaauaacgugcagaucguccgccagcagucuuacuccauuaugugcauaaucaaggaggaaguuuuagccuaugugguacaacugccucucuacggagugauugacacgccauguuggaaacuucauacuagcccccugugcacaaccaauacuaaggagggcucgaacaucuguuugacacgaaccgaucguggcugguacugcgacaaugcugggucugucuccuuuuucccucaggccgaaacguguaaggugcagucaaacagaguguuuugcgauaccaugaauaguagaacacugccaagcgaggugaaccucugcaauauagacauuuucaaccccaaauaugauuguaagaucaugacuuccaaaaccgacgucucuagcucagugaucacaagucugggagcaauuguauccugcuacgguaagacuaaauguaccgcuagcaauaagugcaggggcaucauuaagacauuuucuaacgggugugauuauguuucaaauaaaggaguggacaccgucagugugggcaacacucuuuacuaugucaauaagcaagaggguaaaagccuguacgugaagggggaaccuauaaucaacuucuaugacccauugguuuuuccguccgaugaguucgacgccucuauuucgcagguuaacgagaaaaucaaucagagccucgcguuuauccggaaguccgaugaacuguuacacaacguaaaugucggaaagucaacgacaaacauuaugauaaccacuaucauuaucgugauuaucguuauacugcuacuccugaucgccgugggccuuuucuuguacugcaaagcacgcugaggacuaguguccaccugucccuccugggcugcuggauugucucguuuuccugccaaauaaacaggaucagcgcuuuacagaucuaaaaaaaaaaaaaaaaaaaaaaaaaaaaaaaaaaaaaaaaaaaaaaaaaaaaaaaaaaaaaaaaugcaucccccccccccccccccccccccccccccccaaaggcucuuuucagagccaccagaauu

SEQ ID NO: 17314 - RNA, 1997 nt, Artificial Sequence
  mRNA product Design b-1 comprising derived and/or modified sequence from HRSV(Memphis-37)__AIY60640.1__F-del_DSCav1_mut5 (opt4)
gggagacggagacggccugcaggaccugcucucucagcccucagccgaggccuacgccgagccgagugcgcagccgacgaccgggaggagccgcagccuucaacucugagguacugugauccgcgcugcccgccgggccgccccaguccgcugcugcggcaccuccuucccucgcgcccucuucgcucgccagcgccuucccugugagccugcgucaccgcggccgccaagcuuaccauggagcugcccauccugaagaccaacgccaucaccaccauccuggccgccgugacccugugcuucgccagcagccagaacaucaccgaggaguucuaccagagcaccugcagcgccgugagcaagggcuaccugagcgcccugagaaccggcugguacaccagcgugaucaccaucgagcugagcaacaucaaggagaacaagugcaacggcaccgacgccaaggugaagcugaucaagcaggagcuggacaaguacaagaacgccgugaccgagcugcagcugcugaugcagagcacccccgccgccggcagcggcagcgccaucgccagcggcaucgccgugugcaaggugcugcaccuggagggcgaggugaacaagaucaagaacgcccugcugagcaccaacaaggccguggugagccugagcggcugcggcgugagcgugcugaccuucaaggugcuggaccugaagaacuacaucgacaagcagcugcugcccauccugaacaagcagagcugcagcaucagcaacaucgagaccgugaucgaguuccagcagaagaacaacagacugcuggagaucaccagagaguucagcgugaacgccggcgugaccacccccgugagcaccuacaugcugaccaacagcgagcugcugagccugaucaacgacaugcccaucaccaacgaccagaagaagcugaugagcaacaacgugcagaucgugagacagcagagcuacagcaucaugugcaucaucaaggaggaggugcuggccuacguggugcagcugccccuguacggcgugaucgacacccccugcuggaagcugcacaccagcccccugugcaccaccaacaccaaggagggcagcaacaucugccugaccagaaccgacagaggcugguacugcgacaacgccggcagcgugagcuucuucccccaggccgagaccugcaaggugcagagcaacagaguguucugcgacaccaugaacagcagaacccugcccagcgaggugaaccugugcaacaucgacaucuucaaccccaaguacgacugcaagaucaugaccagcaagaccgacgugagcagcagcgugaucaccagccugggcgccaucgugagcugcuacggcaagaccaagugcaccgccagcaacaagugcagaggcaucaucaagaccuucagcaacggcugcgacuacgugagcaacaagggcguggacaccgugagcgugggcaacacccuguacuacgugaacaagcaggagggcaagagccuguacgugaagggcgagcccaucaucaacuucuacgacccccugguguuccccagcgacgaguucgacgccagcaucagccaggugaacgagaagaucaaccagagccuggccuucaucagaaagagcgacgagcugcugcacaacgugaacgugggcaagagcaccaccaacaucaugaucaccaccaucaucaucgugaucaucgugauccugcugcugcugaucgccgugggccuguuccuguacugcaaggccagaugaggacuaguguccaccugucccuccugggcugcuggauugucucguuuuccugccaaauaaacaggaucagcgcuuuacagaucuaaaaaaaaaaaaaaaaaaaaaaaaaaaaaaaaaaaaaaaaaaaaaaaaaaaaaaaaaaaaaaaaugcaucccccccccccccccccccccccccccccccaaaggcucuuuucagagccaccagaauu

SEQ ID NO: 17315 - RNA, 1997 nt, Artificial Sequence
  mRNA product Design b-1 comprising derived and/or modified sequence from HRSV(Memphis-37)__AIY60640.1__F-del_DSCav1_mut5 (opt5)
gggagacggagacggccugcaggaccugcucucucagcccucagccgaggccuacgccgagccgagugcgcagccgacgaccgggaggagccgcagccuucaacucugagguacugugauccgcgcugcccgccgggccgccccaguccgcugcugcggcaccuccuucccucgcgcccucuucgcucgccagcgccuucccugugagccugcgucaccgcggccgccaagcuuaccauggagcugcccauccucaagaccaacgccauuacaacgauccuggcugccgugacccuuugcuucgcgagcucccagaauauuacagaagaguuuuaccaaucuaccuguagcgcugucuccaaaggcuaucugucugcccucagaacagggugguacaccagcguuaucacaauugaacuguccaacaucaaggagaauaaaugcaacggaaccgacgccaaggugaaacuuaucaagcaggaacuggauaaguauaaaaaugcugugacggagcuccagcugcugaugcagucuaccccugccgcuggcagcggguccgccauugcgagcggaaucgccgucuguaaggugcuccaccuggagggcgaaguuaacaaaauuaagaaugcccuucugucuacaaacaaagcuguggucucccucagcgggugcggagugucuguucugaccuucaaggugcuugaccugaagaauuacaucgauaaacaacuccugccgauucugaacaagcaguccuguagcaucucuaauauugagacagucaucgaauuucagcagaaaaacaaucggcuccuggagaucacccgcgaguucuccgugaacgcuggcgugacgacacccgucagcaccuauaugcuuacaaauuccgaacugcucucucugauuaacgacaugccuaucaccaacgaucaaaagaaacuuaugagcaauaacguucagauugugagacagcaguccuacagcaucaugugcauuaucaaggaggaagugcuggccuaugucgugcaacucccccuguacggcguuaucgacaccccuuguuggaaacugcauacaucuccccucugcacgaccaauacaaaggagggguccaacauuugucugacccggacagaucgcggaugguacugcgacaaugcgggcagcgugagcuuuuucccucaggccgaaaccuguaagguccagucuaacagaguguuuugcgauacgaugaacuccagaacacugccgucugagguuaaucucugcaauaucgacauuuucaaccccaaauaugauuguaagaucaugaccagcaaaaccgacguguccagcucugucauuacaucccugggggcuaucgugagcugcuacggaaagaccaaauguacagccucuaauaagugccggggcaucauuaagacguuuuccaacgggugugauuaugucagcaauaaaggaguggacaccguuuccgugggcaacacacuuuacuaugucaauaagcaagagggcaaaucucuguacgugaagggggaaccuaucauuaacuucuaugacccccucguuuuuccuagcgaugaguucgacgcuuccaucucucaggugaacgagaaaauuaaucagagccuggccuuuauccgcaaguccgaugaacugcuccacaacgucaaugugggaaagagcaccacaaacauuaugaucaccacgaucauuaucgugauuaucguuauucugcuucugcucaucgccgucggccuguuccuguacugcaaagcuagaugaggacuaguguccaccugucccuccugggcugcuggauugucucguuuuccugccaaauaaacaggaucagcgcuuuacagaucuaaaaaaaaaaaaaaaaaaaaaaaaaaaaaaaaaaaaaaaaaaaaaaaaaaaaaaaaaaaaaaaaugcaucccccccccccccccccccccccccccccccaaaggcucuuuucagagccaccagaauu

SEQ ID NO: 17316 - RNA, 1997 nt, Artificial Sequence
  mRNA product Design b-1 comprising derived and/or modified sequence from HRSV(Memphis-37)__AIY60640.1__F-del_DSCav1_mut5 (opt6)
gggagacggagacggccugcaggaccugcucucucagcccucagccgaggccuacgccgagccgagugcgcagccgacgaccgggaggagccgcagccuucaacucugagguacugugauccgcgcugcccgccgggccgccccaguccgcugcugcggcaccuccuucccucgcgcccucuucgcucgccagcgccuucccugugagccugcgucaccgcggccgccaagcuuaccauggaauuacccaucuuaaaaacaaaugcaauaacaacaauacuagcagccguaacauuaugcuucgccucaagccaaaacauaacagaagaauuuuaccaaagcacauguuccgccguaucaaaaggauaucucucagcacuacguacuggaugguauacauccguaaucacaauugaacuaucaaacauuaaagaaaacaaaugcaauggaacagaugcgaaaguaaaacuaauaaaacaagaauuagauaaauauaaaaaugcaguaaccgaacuacaacuacuaaugcaaucaacucccgcugccgguagcggauccgccauagcaagcggaauugcuguauguaaaguccuacaucuugaaggcgaagucaacaaaaucaaaaaugcauuacucucgaccaacaaagcagucguaucacuaucaggaugcggagucucaguauuaacuuuuaaaguccuugaccuaaaaaacuacauagacaaacaacuacuaccaauucuaaauaaacaaaguugcagcauauccaauaucgaaacaguuauagaauuucaacaaaaaaacaaccgccuacuagaaaucacuagagaauuuucaguaaaugcaggcguaaccacaccagucucuaccuauaugcuuaccaacucugaauuauuaucacuuauaaacgacaugcccauaacaaaugaucaaaaaaaacuaaugagcaacaacguacaaauaguaagacaacaaagcuacagcauuauguguauaauaaaagaagaaguguuagcuuauguaguccaacuaccccucuauggcguuaucgauacaccaugcuggaaauuacacacaagcccucuaugcacaacuaacaccaaagaaggcucuaacauaugcuuaacaagaacagauagaggaugguauugcgauaacgcaggaucaguaucauucuuuccacaagcagaaacauguaaaguacaaucuaaccgaguauucugcgacacaaugaacucuagaacacuacccucagaaguuaaucucuguaauauugacauuuucaauccaaaauacgauugcaaaauaaugaccucuaaaaccgacguaucauccucaguuauaacguccuuaggagcaaucguaagcugcuauggcaaaacaaaauguaccgcaucaaacaaaugcagaggaauaauaaaaacauucucaaacggcugugacuacguaagcaauaaagguguugacacaguuucaguaggaaauacacuauacuauguaaauaaacaagaaggaaaaucucucuauguaaaaggagaacccauaauaaacuucuacgacccacucguauuuccaagcgaugaauuugaugcgagcauuucccagguaaaugaaaaaauaaaucaaucacuagcauucaucagaaaaagugaugaauuacuacacaauguuaacguaggaaaaucaacaacaaauaucaugauaacaacaaucauaauagucauaaucguaauauuacuauuacuaauagcaguagguuuauuucuauacuguaaagcaagguaaggacuaguguccaccugucccuccugggcugcuggauugucucguuuuccugccaaauaaacaggaucagcgcuuuacagaucuaaaaaaaaaaaaaaaaaaaaaaaaaaaaaaaaaaaaaaaaaaaaaaaaaaaaaaaaaaaaaaaaugcaucccccccccccccccccccccccccccccccaaaggcucuuuucagagccaccagaauu

SEQ ID NO: 17317 - RNA, 1997 nt, Artificial Sequence
  mRNA product Design b-1 comprising derived and/or modified sequence from HRSV(Memphis-37)__AIY60640.1__F-del_DSCav1_mut5 (opt11)
gggagacggagacggccugcaggaccugcucucucagcccucagccgaggccuacgccgagccgagugcgcagccgacgaccgggaggagccgcagccuucaacucugagguacugugauccgcgcugcccgccgggccgccccaguccgcugcugcggcaccuccuucccucgcgcccucuucgcucgccagcgccuucccugugagccugcgucaccgcggccgccaagcuuaccauggaacuucccauccuaaaaaccaacgccauaacaacaauccucgcagcagucacccucugcuucgccucuucacaaaacaucaccgaagaauuuuaccaaucaaccugcuccgccguguccaaaggcuaccucucagcacugcgcacaggaugguauaccagcguaaucaccaucgaacucuccaacaucaaggaaaacaaaugcaacggcaccgaugccaaagucaaacucaucaagcaagaacuugacaaauacaaaaacgccgugaccgagcuacaacuccucaugcaguccacuccagccgccggcuccggcagcgccaucgccuccggcaucgccguaugcaaaguccuccaccucgaaggcgaaguaaacaaaaucaagaacgcacuccuaagcaccaacaaagccgucgucucacucuccgguugcggcgucagcguccuaacauucaaaguucucgaccucaaaaacuacauagacaaacaacuccuccccauccucaacaaacaauccugcuccauaucaaacaucgaaaccguuaucgaauuucaacaaaaaaacaaccgccuccuagaaaucacccgcgaauuuuccgucaacgcaggcgucaccacccccguuuccaccuauaugcucaccaacuccgaacuccucucccucaucaacgacaugcccauuaccaacgaccaaaagaaacuuaugagcaacaacguucaaaucguccgacaacaaucauacuccaucaugugcauuaucaaagaagaaguacucgccuacguaguacaauuaccccucuacggcguaaucgacaccccaugcuggaaacuacacaccuccccccucuguaccaccaacaccaaagaaggcucuaacaucugccucacccgcacagaccguggcugguauugcgauaacgcagggucugucuccuucuucccccaagccgaaacaugcaaaguccaauccaacagagucuucugcgacaccaugaacucgagaacccuccccuccgaagucaaccuaugcaacaucgacaucuucaacccaaaauacgacugcaaaaucaugacuucaaaaacagacgugagcucguccgucaucacaagccuaggagcuaucguauccugcuacggaaaaacaaaaugcacugcuuccaacaaaugccgcggaaucauaaaaaccuucuccaacggcugcgacuacgucagcaacaaaggcgucgacacagucuccguaggcaacacccuauacuacgucaauaaacaagaaggcaagucccuauaugucaaaggcgagcccaucaucaauuucuaugauccccucguuuucccauccgacgaauuugacgcauccaucucccaagucaacgaaaaaauaaaccaaagccucgcauucauccgcaaauccgacgaacuccuccacaacguaaacguaggaaaauccacaacuaacaucaugaucaccaccaucaucaucgucauuaucgucauccuacuccuccucauagcagucggccucuuccucuacugcaaagcacgcuagggacuaguguccaccugucccuccugggcugcuggauugucucguuuuccugccaaauaaacaggaucagcgcuuuacagaucuaaaaaaaaaaaaaaaaaaaaaaaaaaaaaaaaaaaaaaaaaaaaaaaaaaaaaaaaaaaaaaaaugcaucccccccccccccccccccccccccccccccaaaggcucuuuucagagccaccagaauu

SEQ ID NO: 17318 - RNA, 1817 nt, Artificial Sequence
  mRNA product Design b-2 comprising derived and/or modified sequence from HRSV(Memphis-37)__AIY60640.1__F-del_DSCav1_mut5 (opt1)
gggagagccucugcuggaguccggggaguggcguuggcugcuagagcgaagcuuaccauggagcugcccauccucaagaccaacgccaucaccacgauccuggccgcggugacccugugcuucgccagcucccagaacaucaccgaggaguucuaccagagcacgugcuccgccgucagcaagggcuaccucuccgcccugcgcaccgggugguacaccagcgugaucaccaucgagcuguccaacaucaaggagaacaagugcaacggcaccgacgccaaggugaagcucaucaagcaggagcuggacaaguacaagaacgcggucacggagcugcagcuccugaugcagagcaccccggccgccggcuccgggagcgcgaucgccuccggcaucgccgucugcaaggugcugcaccucgagggcgaggugaacaagaucaagaacgcccugcuguccaccaacaaggccgucgugagccucuccggcugcggggugagcguccugaccuucaaggugcuggaccucaagaacuacaucgacaagcagcugcugcccauccugaacaagcagagcugcuccaucagcaacaucgagaccgucaucgaguuccagcagaagaacaaccgccuccuggagaucacgcgggaguucagcgugaacgcgggcgugaccacccccgucuccaccuacaugcugacgaacagcgagcuccugucccugaucaacgacaugccgaucaccaacgaccagaagaagcucaugagcaacaacgugcagaucgugcgccagcaguccuacagcaucaugugcaucaucaaggaggagguccuggccuacguggugcagcugccccucuacggggucaucgacacccccugcuggaagcugcacaccagcccccugugcacgaccaacaccaaggagggcuccaacaucugccucacccggacggaccgcgggugguacugcgacaacgccggcagcguguccuucuucccgcaggccgagaccugcaagguccagagcaaccggguguucugcgacaccaugaacucccggacccugcccagcgaggugaaccucugcaacaucgacaucuucaaccccaaguacgacugcaagaucaugacguccaagaccgacgucagcuccagcgugaucaccucccugggcgccaucgugagcugcuacgggaagaccaagugcacggcgagcaacaagugccgcggcaucaucaagaccuucuccaacgggugcgacuacgucagcaacaagggcguggacaccguguccgucggcaacacccuguacuacgugaacaagcaggagggcaagagccucuacgugaagggggagcccaucaucaacuucuacgacccgcuggucuuccccuccgacgaguucgacgccagcaucucccaggugaacgagaagaucaaccagagccuggccuucauccggaaguccgacgagcuccugcacaacgugaacgucggcaagagcaccacgaacaucaugaucaccaccaucaucaucgugaucaucgugauccugcugcuccugaucgccgucgggcuguuccucuacugcaaggcccgcugaggacuaguguccaccugucccuccugggcugcuggauugucucguuuuccugccaaauaaacaggaucagcgcuuuacagaucuaaaaaaaaaaaaaaaaaaaaaaaaaaaaaaaaaaaaaaaaaaaaaaaaaaaaaaaaaaaaaaaaugcaucccccccccccccccccccccccccccccccaaaggcucuuuucagagccaccagaauu

SEQ ID NO: 17319 - RNA, 1817 nt, Artificial Sequence
  mRNA product Design b-2 comprising derived and/or modified sequence from HRSV(Memphis-37)__AIY60640.1__F-del_DSCav1_mut5 (opt1)
gggagagccucugcuggaguccggggaguggcguuggcugcuagagcgaagcuuaccauggagcugcccauccucaagaccaacgccaucaccacgauccuggccgcggugacccugugcuucgccagcucccagaacaucaccgaggaguucuaccagagcacgugcuccgccgucagcaagggcuaccucuccgcccugcgcaccgggugguacaccagcgugaucaccaucgagcuguccaacaucaaggagaacaagugcaacggcaccgacgccaaggugaagcucaucaagcaggagcuggacaaguacaagaacgcggucacggagcugcagcuccugaugcagagcaccccggccgccggguccggcagcgccaucgcguccgggaucgccgugugcaaggugcugcaccucgagggcgaggucaacaagaucaagaacgcccugcugagcaccaacaaggccguggugucccucagcggcugcggggucuccgugcugaccuucaaggugcuggaccucaagaacuacaucgacaagcagcugcugcccauccucaacaagcagagcugcuccaucagcaacaucgagacggucaucgaguuccagcagaagaacaaccggcugcuggagaucacccgcgaguucuccgugaacgccggcgugaccacccccgucagcacguacaugcucaccaacagcgagcugcugucccucaucaacgacaugcccaucaccaacgaccagaagaagcugaugagcaacaacgugcagaucgugcggcagcaguccuacagcaucaugugcaucaucaaggaggagguccuggcguacguggugcagcucccgcuguacggggucaucgacacccccugcuggaagcugcacacgagcccccucugcaccaccaacaccaaggagggcuccaacaucugccugacgcgcaccgaccgggggugguacugcgacaacgccggcuccgugagcuucuucccccaggccgagaccugcaaggugcaguccaaccgcgucuucugcgacaccaugaacagccggacgcucccguccgaggugaaccugugcaacaucgacaucuucaaccccaaguacgacugcaagaucaugaccagcaagaccgacgucuccagcuccgugaucaccagccugggcgccaucguguccugcuacgggaagacgaagugcaccgccagcaacaagugccggggcaucaucaagaccuucuccaacgggugcgacuacgucagcaacaagggcguggacaccgugagcgucggcaacacgcucuacuacgugaacaagcaggaggggaagucccuguacgugaagggcgagcccaucaucaacuucuacgacccccuggucuucccgagcgacgaguucgacgcguccaucagccaggugaacgagaagaucaaccagucccucgccuucauccgcaagagcgacgagcugcugcacaacgugaacgucgggaaguccaccaccaacaucaugaucaccaccaucaucaucgugaucaucgugauccuccugcugcucaucgccgucggccuguuccuguacugcaaggcccggugaggacuaguguccaccugucccuccugggcugcuggauugucucguuuuccugccaaauaaacaggaucagcgcuuuacagaucuaaaaaaaaaaaaaaaaaaaaaaaaaaaaaaaaaaaaaaaaaaaaaaaaaaaaaaaaaaaaaaaaugcaucccccccccccccccccccccccccccccccaaaggcucuuuucagagccaccagaauu

SEQ ID NO: 17320 - RNA, 1817 nt, Artificial Sequence
  mRNA product Design b-2 comprising derived and/or modified sequence from HRSV(Memphis-37)__AIY60640.1__F-del_DSCav1_mut5 (opt2)
gggagagccucugcuggaguccggggaguggcguuggcugcuagagcgaagcuuaccauggagcuccccauccucaagaccaacgccaucaccaccauccucgccgccgucacccucugcuucgccuccucccagaacaucaccgaggaguucuaccaguccaccugcuccgccgucuccaagggcuaccucuccgcccuccgcaccggcugguacaccuccgucaucaccaucgagcucuccaacaucaaggagaacaagugcaacggcaccgacgccaaggucaagcucaucaagcaggagcucgacaaguacaagaacgccgucaccgagcuccagcuccucaugcaguccacccccgccgccggcuccggcuccgccaucgccuccggcaucgccgucugcaagguccuccaccucgagggcgaggucaacaagaucaagaacgcccuccucuccaccaacaaggccgucgucucccucuccggcugcggcgucuccguccucaccuucaagguccucgaccucaagaacuacaucgacaagcagcuccuccccauccucaacaagcaguccugcuccaucuccaacaucgagaccgucaucgaguuccagcagaagaacaaccgccuccucgagaucacccgcgaguucuccgucaacgccggcgucaccacccccgucuccaccuacaugcucaccaacuccgagcuccucucccucaucaacgacaugcccaucaccaacgaccagaagaagcucauguccaacaacguccagaucguccgccagcaguccuacuccaucaugugcaucaucaaggaggagguccucgccuacgucguccagcucccccucuacggcgucaucgacacccccugcuggaagcuccacaccuccccccucugcaccaccaacaccaaggagggcuccaacaucugccucacccgcaccgaccgcggcugguacugcgacaacgccggcuccgucuccuucuucccccaggccgagaccugcaagguccaguccaaccgcgucuucugcgacaccaugaacucccgcacccuccccuccgaggucaaccucugcaacaucgacaucuucaaccccaaguacgacugcaagaucaugaccuccaagaccgacgucuccuccuccgucaucaccucccucggcgccaucgucuccugcuacggcaagaccaagugcaccgccuccaacaagugccgcggcaucaucaagaccuucuccaacggcugcgacuacgucuccaacaagggcgucgacaccgucuccgucggcaacacccucuacuacgucaacaagcaggagggcaagucccucuacgucaagggcgagcccaucaucaacuucuacgacccccucgucuuccccuccgacgaguucgacgccuccaucucccaggucaacgagaagaucaaccagucccucgccuucauccgcaaguccgacgagcuccuccacaacgucaacgucggcaaguccaccaccaacaucaugaucaccaccaucaucaucgucaucaucgucauccuccuccuccucaucgccgucggccucuuccucuacugcaaggcccgcugaggacuaguguccaccugucccuccugggcugcuggauugucucguuuuccugccaaauaaacaggaucagcgcuuuacagaucuaaaaaaaaaaaaaaaaaaaaaaaaaaaaaaaaaaaaaaaaaaaaaaaaaaaaaaaaaaaaaaaaugcaucccccccccccccccccccccccccccccccaaaggcucuuuucagagccaccagaauu

SEQ ID NO: 17321 - RNA, 1817 nt, Artificial Sequence
  mRNA product Design b-2 comprising derived and/or modified sequence from HRSV(Memphis-37)__AIY60640.1__F-del_DSCav1_mut5 (opt3)
gggagagccucugcuggaguccggggaguggcguuggcugcuagagcgaagcuuaccauggagcugcccauccucaagaccaacgccauuacaacuauacuugcugcagugacgcugugcuucgccagcucccagaauaucaccgaagaguuuuaccaaucuacauguucagcggucaguaaaggcuauuugagcgcuuuaagaacugggugguacaccuccguuauuacaaucgaacugucuaacauuaaggagaauaaaugcaacggaaccgacgccaaggugaaacuaaucaagcaggaacucgauaaguauaaaaaugcaguaacugagcugcagcuucugaugcagucgaccccugccgcugguucaggcagcgcaauagccagugggaucgcuguguguaaggucuugcaccucgagggagaagugaacaaaauuaagaaugcccugcuguccacaaacaaagcgguugugucucucagcggcugcggugucuccguguuaacguucaagguacuggaccuuaagaauuacaucgauaaacaauugcugccaauucuaaacaagcagucauguaguaucagcaauauagagacuguuauugaauuucagcagaaaaacaauaggcuccuggagaucacccgggaguucucugugaacgcaggggucacaacuccgguguccaccuauaugcuuacaaauucagaacuguugagccucauuaacgacaugcccaucaccaacgaucaaaagaaacugaugaguaauaacgugcagaucguccgccagcagucuuacuccauuaugugcauaaucaaggaggaaguuuuagccuaugugguacaacugccucucuacggagugauugacacgccauguuggaaacuucauacuagcccccugugcacaaccaauacuaaggagggcucgaacaucuguuugacacgaaccgaucguggcugguacugcgacaaugcugggucugucuccuuuuucccucaggccgaaacguguaaggugcagucaaacagaguguuuugcgauaccaugaauaguagaacacugccaagcgaggugaaccucugcaauauagacauuuucaaccccaaauaugauuguaagaucaugacuuccaaaaccgacgucucuagcucagugaucacaagucugggagcaauuguauccugcuacgguaagacuaaauguaccgcuagcaauaagugcaggggcaucauuaagacauuuucuaacgggugugauuauguuucaaauaaaggaguggacaccgucagugugggcaacacucuuuacuaugucaauaagcaagaggguaaaagccuguacgugaagggggaaccuauaaucaacuucuaugacccauugguuuuuccguccgaugaguucgacgccucuauuucgcagguuaacgagaaaaucaaucagagccucgcguuuauccggaaguccgaugaacuguuacacaacguaaaugucggaaagucaacgacaaacauuaugauaaccacuaucauuaucgugauuaucguuauacugcuacuccugaucgccgugggccuuuucuuguacugcaaagcacgcugaggacuaguguccaccugucccuccugggcugcuggauugucucguuuuccugccaaauaaacaggaucagcgcuuuacagaucuaaaaaaaaaaaaaaaaaaaaaaaaaaaaaaaaaaaaaaaaaaaaaaaaaaaaaaaaaaaaaaaaugcaucccccccccccccccccccccccccccccccaaaggcucuuuucagagccaccagaauu

SEQ ID NO: 17322 - RNA, 1817 nt, Artificial Sequence
  mRNA product Design b-2 comprising derived and/or modified sequence from HRSV(Memphis-37)__AIY60640.1__F-del_DSCav1_mut5 (opt4)
gggagagccucugcuggaguccggggaguggcguuggcugcuagagcgaagcuuaccauggagcugcccauccugaagaccaacgccaucaccaccauccuggccgccgugacccugugcuucgccagcagccagaacaucaccgaggaguucuaccagagcaccugcagcgccgugagcaagggcuaccugagcgcccugagaaccggcugguacaccagcgugaucaccaucgagcugagcaacaucaaggagaacaagugcaacggcaccgacgccaaggugaagcugaucaagcaggagcuggacaaguacaagaacgccgugaccgagcugcagcugcugaugcagagcacccccgccgccggcagcggcagcgccaucgccagcggcaucgccgugugcaaggugcugcaccuggagggcgaggugaacaagaucaagaacgcccugcugagcaccaacaaggccguggugagccugagcggcugcggcgugagcgugcugaccuucaaggugcuggaccugaagaacuacaucgacaagcagcugcugcccauccugaacaagcagagcugcagcaucagcaacaucgagaccgugaucgaguuccagcagaagaacaacagacugcuggagaucaccagagaguucagcgugaacgccggcgugaccacccccgugagcaccuacaugcugaccaacagcgagcugcugagccugaucaacgacaugcccaucaccaacgaccagaagaagcugaugagcaacaacgugcagaucgugagacagcagagcuacagcaucaugugcaucaucaaggaggaggugcuggccuacguggugcagcugccccuguacggcgugaucgacacccccugcuggaagcugcacaccagcccccugugcaccaccaacaccaaggagggcagcaacaucugccugaccagaaccgacagaggcugguacugcgacaacgccggcagcgugagcuucuucccccaggccgagaccugcaaggugcagagcaacagaguguucugcgacaccaugaacagcagaacccugcccagcgaggugaaccugugcaacaucgacaucuucaaccccaaguacgacugcaagaucaugaccagcaagaccgacgugagcagcagcgugaucaccagccugggcgccaucgugagcugcuacggcaagaccaagugcaccgccagcaacaagugcagaggcaucaucaagaccuucagcaacggcugcgacuacgugagcaacaagggcguggacaccgugagcgugggcaacacccuguacuacgugaacaagcaggagggcaagagccuguacgugaagggcgagcccaucaucaacuucuacgacccccugguguuccccagcgacgaguucgacgccagcaucagccaggugaacgagaagaucaaccagagccuggccuucaucagaaagagcgacgagcugcugcacaacgugaacgugggcaagagcaccaccaacaucaugaucaccaccaucaucaucgugaucaucgugauccugcugcugcugaucgccgugggccuguuccuguacugcaaggccagaugaggacuaguguccaccugucccuccugggcugcuggauugucucguuuuccugccaaauaaacaggaucagcgcuuuacagaucuaaaaaaaaaaaaaaaaaaaaaaaaaaaaaaaaaaaaaaaaaaaaaaaaaaaaaaaaaaaaaaaaugcaucccccccccccccccccccccccccccccccaaaggcucuuuucagagccaccagaauu

SEQ ID NO: 17323 - RNA, 1817 nt, Artificial Sequence
  mRNA product Design b-2 comprising derived and/or modified sequence from HRSV(Memphis-37)__AIY60640.1__F-del_DSCav1_mut5 (opt5)
gggagagccucugcuggaguccggggaguggcguuggcugcuagagcgaagcuuaccauggagcugcccauccucaagaccaacgccauuacaacgauccuggcugccgugacccuuugcuucgcgagcucccagaauauuacagaagaguuuuaccaaucuaccuguagcgcugucuccaaaggcuaucugucugcccucagaacagggugguacaccagcguuaucacaauugaacuguccaacaucaaggagaauaaaugcaacggaaccgacgccaaggugaaacuuaucaagcaggaacuggauaaguauaaaaaugcugugacggagcuccagcugcugaugcagucuaccccugccgcuggcagcggguccgccauugcgagcggaaucgccgucuguaaggugcuccaccuggagggcgaaguuaacaaaauuaagaaugcccuucugucuacaaacaaagcuguggucucccucagcgggugcggagugucuguucugaccuucaaggugcuugaccugaagaauuacaucgauaaacaacuccugccgauucugaacaagcaguccuguagcaucucuaauauugagacagucaucgaauuucagcagaaaaacaaucggcuccuggagaucacccgcgaguucuccgugaacgcuggcgugacgacacccgucagcaccuauaugcuuacaaauuccgaacugcucucucugauuaacgacaugccuaucaccaacgaucaaaagaaacuuaugagcaauaacguucagauugugagacagcaguccuacagcaucaugugcauuaucaaggaggaagugcuggccuaugucgugcaacucccccuguacggcguuaucgacaccccuuguuggaaacugcauacaucuccccucugcacgaccaauacaaaggagggguccaacauuugucugacccggacagaucgcggaugguacugcgacaaugcgggcagcgugagcuuuuucccucaggccgaaaccuguaagguccagucuaacagaguguuuugcgauacgaugaacuccagaacacugccgucugagguuaaucucugcaauaucgacauuuucaaccccaaauaugauuguaagaucaugaccagcaaaaccgacguguccagcucugucauuacaucccugggggcuaucgugagcugcuacggaaagaccaaauguacagccucuaauaagugccggggcaucauuaagacguuuuccaacgggugugauuaugucagcaauaaaggaguggacaccguuuccgugggcaacacacuuuacuaugucaauaagcaagagggcaaaucucuguacgugaagggggaaccuaucauuaacuucuaugacccccucguuuuuccuagcgaugaguucgacgcuuccaucucucaggugaacgagaaaauuaaucagagccuggccuuuauccgcaaguccgaugaacugcuccacaacgucaaugugggaaagagcaccacaaacauuaugaucaccacgaucauuaucgugauuaucguuauucugcuucugcucaucgccgucggccuguuccuguacugcaaagcuagaugaggacuaguguccaccugucccuccugggcugcuggauugucucguuuuccugccaaauaaacaggaucagcgcuuuacagaucuaaaaaaaaaaaaaaaaaaaaaaaaaaaaaaaaaaaaaaaaaaaaaaaaaaaaaaaaaaaaaaaaugcaucccccccccccccccccccccccccccccccaaaggcucuuuucagagccaccagaauu

SEQ ID NO: 17324 - RNA, 1817 nt, Artificial Sequence
  mRNA product Design b-2 comprising derived and/or modified sequence from HRSV(Memphis-37)__AIY60640.1__F-del_DSCav1_mut5 (opt6)
gggagagccucugcuggaguccggggaguggcguuggcugcuagagcgaagcuuaccauggaauuacccaucuuaaaaacaaaugcaauaacaacaauacuagcagccguaacauuaugcuucgccucaagccaaaacauaacagaagaauuuuaccaaagcacauguuccgccguaucaaaaggauaucucucagcacuacguacuggaugguauacauccguaaucacaauugaacuaucaaacauuaaagaaaacaaaugcaauggaacagaugcgaaaguaaaacuaauaaaacaagaauuagauaaauauaaaaaugcaguaaccgaacuacaacuacuaaugcaaucaacucccgcugccgguagcggauccgccauagcaagcggaauugcuguauguaaaguccuacaucuugaaggcgaagucaacaaaaucaaaaaugcauuacucucgaccaacaaagcagucguaucacuaucaggaugcggagucucaguauuaacuuuuaaaguccuugaccuaaaaaacuacauagacaaacaacuacuaccaauucuaaauaaacaaaguugcagcauauccaauaucgaaacaguuauagaauuucaacaaaaaaacaaccgccuacuagaaaucacuagagaauuuucaguaaaugcaggcguaaccacaccagucucuaccuauaugcuuaccaacucugaauuauuaucacuuauaaacgacaugcccauaacaaaugaucaaaaaaaacuaaugagcaacaacguacaaauaguaagacaacaaagcuacagcauuauguguauaauaaaagaagaaguguuagcuuauguaguccaacuaccccucuauggcguuaucgauacaccaugcuggaaauuacacacaagcccucuaugcacaacuaacaccaaagaaggcucuaacauaugcuuaacaagaacagauagaggaugguauugcgauaacgcaggaucaguaucauucuuuccacaagcagaaacauguaaaguacaaucuaaccgaguauucugcgacacaaugaacucuagaacacuacccucagaaguuaaucucuguaauauugacauuuucaauccaaaauacgauugcaaaauaaugaccucuaaaaccgacguaucauccucaguuauaacguccuuaggagcaaucguaagcugcuauggcaaaacaaaauguaccgcaucaaacaaaugcagaggaauaauaaaaacauucucaaacggcugugacuacguaagcaauaaagguguugacacaguuucaguaggaaauacacuauacuauguaaauaaacaagaaggaaaaucucucuauguaaaaggagaacccauaauaaacuucuacgacccacucguauuuccaagcgaugaauuugaugcgagcauuucccagguaaaugaaaaaauaaaucaaucacuagcauucaucagaaaaagugaugaauuacuacacaauguuaacguaggaaaaucaacaacaaauaucaugauaacaacaaucauaauagucauaaucguaauauuacuauuacuaauagcaguagguuuauuucuauacuguaaagcaagguaaggacuaguguccaccugucccuccugggcugcuggauugucucguuuuccugccaaauaaacaggaucagcgcuuuacagaucuaaaaaaaaaaaaaaaaaaaaaaaaaaaaaaaaaaaaaaaaaaaaaaaaaaaaaaaaaaaaaaaaugcaucccccccccccccccccccccccccccccccaaaggcucuuuucagagccaccagaauu

SEQ ID NO: 17325 - RNA, 1817 nt, Artificial Sequence
  mRNA product Design b-2 comprising derived and/or modified sequence from HRSV(Memphis-37)__AIY60640.1__F-del_DSCav1_mut5 (opt11)
gggagagccucugcuggaguccggggaguggcguuggcugcuagagcgaagcuuaccauggaacuucccauccuaaaaaccaacgccauaacaacaauccucgcagcagucacccucugcuucgccucuucacaaaacaucaccgaagaauuuuaccaaucaaccugcuccgccguguccaaaggcuaccucucagcacugcgcacaggaugguauaccagcguaaucaccaucgaacucuccaacaucaaggaaaacaaaugcaacggcaccgaugccaaagucaaacucaucaagcaagaacuugacaaauacaaaaacgccgugaccgagcuacaacuccucaugcaguccacuccagccgccggcuccggcagcgccaucgccuccggcaucgccguaugcaaaguccuccaccucgaaggcgaaguaaacaaaaucaagaacgcacuccuaagcaccaacaaagccgucgucucacucuccgguugcggcgucagcguccuaacauucaaaguucucgaccucaaaaacuacauagacaaacaacuccuccccauccucaacaaacaauccugcuccauaucaaacaucgaaaccguuaucgaauuucaacaaaaaaacaaccgccuccuagaaaucacccgcgaauuuuccgucaacgcaggcgucaccacccccguuuccaccuauaugcucaccaacuccgaacuccucucccucaucaacgacaugcccauuaccaacgaccaaaagaaacuuaugagcaacaacguucaaaucguccgacaacaaucauacuccaucaugugcauuaucaaagaagaaguacucgccuacguaguacaauuaccccucuacggcguaaucgacaccccaugcuggaaacuacacaccuccccccucuguaccaccaacaccaaagaaggcucuaacaucugccucacccgcacagaccguggcugguauugcgauaacgcagggucugucuccuucuucccccaagccgaaacaugcaaaguccaauccaacagagucuucugcgacaccaugaacucgagaacccuccccuccgaagucaaccuaugcaacaucgacaucuucaacccaaaauacgacugcaaaaucaugacuucaaaaacagacgugagcucguccgucaucacaagccuaggagcuaucguauccugcuacggaaaaacaaaaugcacugcuuccaacaaaugccgcggaaucauaaaaaccuucuccaacggcugcgacuacgucagcaacaaaggcgucgacacagucuccguaggcaacacccuauacuacgucaauaaacaagaaggcaagucccuauaugucaaaggcgagcccaucaucaauuucuaugauccccucguuuucccauccgacgaauuugacgcauccaucucccaagucaacgaaaaaauaaaccaaagccucgcauucauccgcaaauccgacgaacuccuccacaacguaaacguaggaaaauccacaacuaacaucaugaucaccaccaucaucaucgucauuaucgucauccuacuccuccucauagcagucggccucuuccucuacugcaaagcacgcuagggacuaguguccaccugucccuccugggcugcuggauugucucguuuuccugccaaauaaacaggaucagcgcuuuacagaucuaaaaaaaaaaaaaaaaaaaaaaaaaaaaaaaaaaaaaaaaaaaaaaaaaaaaaaaaaaaaaaaaugcaucccccccccccccccccccccccccccccccaaaggcucuuuucagagccaccagaauu

SEQ ID NO: 17326 - RNA, 1837 nt, Artificial Sequence
  mRNA product Design b-3 comprising derived and/or modified sequence from HRSV(Memphis-37)__AIY60640.1__F-del_DSCav1_mut5 (opt1)
gggagagucccgcagucggcguccagcggcucugcuuguucgugugugugucguugcaggccuuauucaagcuuaccauggagcugcccauccucaagaccaacgccaucaccacgauccuggccgcggugacccugugcuucgccagcucccagaacaucaccgaggaguucuaccagagcacgugcuccgccgucagcaagggcuaccucuccgcccugcgcaccgggugguacaccagcgugaucaccaucgagcuguccaacaucaaggagaacaagugcaacggcaccgacgccaaggugaagcucaucaagcaggagcuggacaaguacaagaacgcggucacggagcugcagcuccugaugcagagcaccccggccgccggcuccgggagcgcgaucgccuccggcaucgccgucugcaaggugcugcaccucgagggcgaggugaacaagaucaagaacgcccugcuguccaccaacaaggccgucgugagccucuccggcugcggggugagcguccugaccuucaaggugcuggaccucaagaacuacaucgacaagcagcugcugcccauccugaacaagcagagcugcuccaucagcaacaucgagaccgucaucgaguuccagcagaagaacaaccgccuccuggagaucacgcgggaguucagcgugaacgcgggcgugaccacccccgucuccaccuacaugcugacgaacagcgagcuccugucccugaucaacgacaugccgaucaccaacgaccagaagaagcucaugagcaacaacgugcagaucgugcgccagcaguccuacagcaucaugugcaucaucaaggaggagguccuggccuacguggugcagcugccccucuacggggucaucgacacccccugcuggaagcugcacaccagcccccugugcacgaccaacaccaaggagggcuccaacaucugccucacccggacggaccgcgggugguacugcgacaacgccggcagcguguccuucuucccgcaggccgagaccugcaagguccagagcaaccggguguucugcgacaccaugaacucccggacccugcccagcgaggugaaccucugcaacaucgacaucuucaaccccaaguacgacugcaagaucaugacguccaagaccgacgucagcuccagcgugaucaccucccugggcgccaucgugagcugcuacgggaagaccaagugcacggcgagcaacaagugccgcggcaucaucaagaccuucuccaacgggugcgacuacgucagcaacaagggcguggacaccguguccgucggcaacacccuguacuacgugaacaagcaggagggcaagagccucuacgugaagggggagcccaucaucaacuucuacgacccgcuggucuuccccuccgacgaguucgacgccagcaucucccaggugaacgagaagaucaaccagagccuggccuucauccggaaguccgacgagcuccugcacaacgugaacgucggcaagagcaccacgaacaucaugaucaccaccaucaucaucgugaucaucgugauccugcugcuccugaucgccgucgggcuguuccucuacugcaaggcccgcugaggacuaguguccaccugucccuccugggcugcuggauugucucguuuuccugccaaauaaacaggaucagcgcuuuacagaucuaaaaaaaaaaaaaaaaaaaaaaaaaaaaaaaaaaaaaaaaaaaaaaaaaaaaaaaaaaaaaaaaugcaucccccccccccccccccccccccccccccccaaaggcucuuuucagagccaccagaauu

SEQ ID NO: 17327 - RNA, 1837 nt, Artificial Sequence
  mRNA product Design b-3 comprising derived and/or modified sequence from HRSV(Memphis-37)__AIY60640.1__F-del_DSCav1_mut5 (opt1)
gggagagucccgcagucggcguccagcggcucugcuuguucgugugugugucguugcaggccuuauucaagcuuaccauggagcugcccauccucaagaccaacgccaucaccacgauccuggccgcggugacccugugcuucgccagcucccagaacaucaccgaggaguucuaccagagcacgugcuccgccgucagcaagggcuaccucuccgcccugcgcaccgggugguacaccagcgugaucaccaucgagcuguccaacaucaaggagaacaagugcaacggcaccgacgccaaggugaagcucaucaagcaggagcuggacaaguacaagaacgcggucacggagcugcagcuccugaugcagagcaccccggccgccggguccggcagcgccaucgcguccgggaucgccgugugcaaggugcugcaccucgagggcgaggucaacaagaucaagaacgcccugcugagcaccaacaaggccguggugucccucagcggcugcggggucuccgugcugaccuucaaggugcuggaccucaagaacuacaucgacaagcagcugcugcccauccucaacaagcagagcugcuccaucagcaacaucgagacggucaucgaguuccagcagaagaacaaccggcugcuggagaucacccgcgaguucuccgugaacgccggcgugaccacccccgucagcacguacaugcucaccaacagcgagcugcugucccucaucaacgacaugcccaucaccaacgaccagaagaagcugaugagcaacaacgugcagaucgugcggcagcaguccuacagcaucaugugcaucaucaaggaggagguccuggcguacguggugcagcucccgcuguacggggucaucgacacccccugcuggaagcugcacacgagcccccucugcaccaccaacaccaaggagggcuccaacaucugccugacgcgcaccgaccgggggugguacugcgacaacgccggcuccgugagcuucuucccccaggccgagaccugcaaggugcaguccaaccgcgucuucugcgacaccaugaacagccggacgcucccguccgaggugaaccugugcaacaucgacaucuucaaccccaaguacgacugcaagaucaugaccagcaagaccgacgucuccagcuccgugaucaccagccugggcgccaucguguccugcuacgggaagacgaagugcaccgccagcaacaagugccggggcaucaucaagaccuucuccaacgggugcgacuacgucagcaacaagggcguggacaccgugagcgucggcaacacgcucuacuacgugaacaagcaggaggggaagucccuguacgugaagggcgagcccaucaucaacuucuacgacccccuggucuucccgagcgacgaguucgacgcguccaucagccaggugaacgagaagaucaaccagucccucgccuucauccgcaagagcgacgagcugcugcacaacgugaacgucgggaaguccaccaccaacaucaugaucaccaccaucaucaucgugaucaucgugauccuccugcugcucaucgccgucggccuguuccuguacugcaaggcccggugaggacuaguguccaccugucccuccugggcugcuggauugucucguuuuccugccaaauaaacaggaucagcgcuuuacagaucuaaaaaaaaaaaaaaaaaaaaaaaaaaaaaaaaaaaaaaaaaaaaaaaaaaaaaaaaaaaaaaaaugcaucccccccccccccccccccccccccccccccaaaggcucuuuucagagccaccagaauu

SEQ ID NO: 17328 - RNA, 1837 nt, Artificial Sequence
  mRNA product Design b-3 comprising derived and/or modified sequence from HRSV(Memphis-37)__AIY60640.1__F-del_DSCav1_mut5 (opt2)
gggagagucccgcagucggcguccagcggcucugcuuguucgugugugugucguugcaggccuuauucaagcuuaccauggagcuccccauccucaagaccaacgccaucaccaccauccucgccgccgucacccucugcuucgccuccucccagaacaucaccgaggaguucuaccaguccaccugcuccgccgucuccaagggcuaccucuccgcccuccgcaccggcugguacaccuccgucaucaccaucgagcucuccaacaucaaggagaacaagugcaacggcaccgacgccaaggucaagcucaucaagcaggagcucgacaaguacaagaacgccgucaccgagcuccagcuccucaugcaguccacccccgccgccggcuccggcuccgccaucgccuccggcaucgccgucugcaagguccuccaccucgagggcgaggucaacaagaucaagaacgcccuccucuccaccaacaaggccgucgucucccucuccggcugcggcgucuccguccucaccuucaagguccucgaccucaagaacuacaucgacaagcagcuccuccccauccucaacaagcaguccugcuccaucuccaacaucgagaccgucaucgaguuccagcagaagaacaaccgccuccucgagaucacccgcgaguucuccgucaacgccggcgucaccacccccgucuccaccuacaugcucaccaacuccgagcuccucucccucaucaacgacaugcccaucaccaacgaccagaagaagcucauguccaacaacguccagaucguccgccagcaguccuacuccaucaugugcaucaucaaggaggagguccucgccuacgucguccagcucccccucuacggcgucaucgacacccccugcuggaagcuccacaccuccccccucugcaccaccaacaccaaggagggcuccaacaucugccucacccgcaccgaccgcggcugguacugcgacaacgccggcuccgucuccuucuucccccaggccgagaccugcaagguccaguccaaccgcgucuucugcgacaccaugaacucccgcacccuccccuccgaggucaaccucugcaacaucgacaucuucaaccccaaguacgacugcaagaucaugaccuccaagaccgacgucuccuccuccgucaucaccucccucggcgccaucgucuccugcuacggcaagaccaagugcaccgccuccaacaagugccgcggcaucaucaagaccuucuccaacggcugcgacuacgucuccaacaagggcgucgacaccgucuccgucggcaacacccucuacuacgucaacaagcaggagggcaagucccucuacgucaagggcgagcccaucaucaacuucuacgacccccucgucuuccccuccgacgaguucgacgccuccaucucccaggucaacgagaagaucaaccagucccucgccuucauccgcaaguccgacgagcuccuccacaacgucaacgucggcaaguccaccaccaacaucaugaucaccaccaucaucaucgucaucaucgucauccuccuccuccucaucgccgucggccucuuccucuacugcaaggcccgcugaggacuaguguccaccugucccuccugggcugcuggauugucucguuuuccugccaaauaaacaggaucagcgcuuuacagaucuaaaaaaaaaaaaaaaaaaaaaaaaaaaaaaaaaaaaaaaaaaaaaaaaaaaaaaaaaaaaaaaaugcaucccccccccccccccccccccccccccccccaaaggcucuuuucagagccaccagaauu

SEQ ID NO: 17329 - RNA, 1837 nt, Artificial Sequence
  mRNA product Design b-3 comprising derived and/or modified sequence from HRSV(Memphis-37)__AIY60640.1__F-del_DSCav1_mut5 (opt3)
gggagagucccgcagucggcguccagcggcucugcuuguucgugugugugucguugcaggccuuauucaagcuuaccauggagcugcccauccucaagaccaacgccauuacaacuauacuugcugcagugacgcugugcuucgccagcucccagaauaucaccgaagaguuuuaccaaucuacauguucagcggucaguaaaggcuauuugagcgcuuuaagaacugggugguacaccuccguuauuacaaucgaacugucuaacauuaaggagaauaaaugcaacggaaccgacgccaaggugaaacuaaucaagcaggaacucgauaaguauaaaaaugcaguaacugagcugcagcuucugaugcagucgaccccugccgcugguucaggcagcgcaauagccagugggaucgcuguguguaaggucuugcaccucgagggagaagugaacaaaauuaagaaugcccugcuguccacaaacaaagcgguugugucucucagcggcugcggugucuccguguuaacguucaagguacuggaccuuaagaauuacaucgauaaacaauugcugccaauucuaaacaagcagucauguaguaucagcaauauagagacuguuauugaauuucagcagaaaaacaauaggcuccuggagaucacccgggaguucucugugaacgcaggggucacaacuccgguguccaccuauaugcuuacaaauucagaacuguugagccucauuaacgacaugcccaucaccaacgaucaaaagaaacugaugaguaauaacgugcagaucguccgccagcagucuuacuccauuaugugcauaaucaaggaggaaguuuuagccuaugugguacaacugccucucuacggagugauugacacgccauguuggaaacuucauacuagcccccugugcacaaccaauacuaaggagggcucgaacaucuguuugacacgaaccgaucguggcugguacugcgacaaugcugggucugucuccuuuuucccucaggccgaaacguguaaggugcagucaaacagaguguuuugcgauaccaugaauaguagaacacugccaagcgaggugaaccucugcaauauagacauuuucaaccccaaauaugauuguaagaucaugacuuccaaaaccgacgucucuagcucagugaucacaagucugggagcaauuguauccugcuacgguaagacuaaauguaccgcuagcaauaagugcaggggcaucauuaagacauuuucuaacgggugugauuauguuucaaauaaaggaguggacaccgucagugugggcaacacucuuuacuaugucaauaagcaagaggguaaaagccuguacgugaagggggaaccuauaaucaacuucuaugacccauugguuuuuccguccgaugaguucgacgccucuauuucgcagguuaacgagaaaaucaaucagagccucgcguuuauccggaaguccgaugaacuguuacacaacguaaaugucggaaagucaacgacaaacauuaugauaaccacuaucauuaucgugauuaucguuauacugcuacuccugaucgccgugggccuuuucuuguacugcaaagcacgcugaggacuaguguccaccugucccuccugggcugcuggauugucucguuuuccugccaaauaaacaggaucagcgcuuuacagaucuaaaaaaaaaaaaaaaaaaaaaaaaaaaaaaaaaaaaaaaaaaaaaaaaaaaaaaaaaaaaaaaaugcaucccccccccccccccccccccccccccccccaaaggcucuuuucagagccaccagaauu

SEQ ID NO: 17330 - RNA, 1837 nt, Artificial Sequence
  mRNA product Design b-3 comprising derived and/or modified sequence from HRSV(Memphis-37)__AIY60640.1__F-del_DSCav1_mut5 (opt4)
gggagagucccgcagucggcguccagcggcucugcuuguucgugugugugucguugcaggccuuauucaagcuuaccauggagcugcccauccugaagaccaacgccaucaccaccauccuggccgccgugacccugugcuucgccagcagccagaacaucaccgaggaguucuaccagagcaccugcagcgccgugagcaagggcuaccugagcgcccugagaaccggcugguacaccagcgugaucaccaucgagcugagcaacaucaaggagaacaagugcaacggcaccgacgccaaggugaagcugaucaagcaggagcuggacaaguacaagaacgccgugaccgagcugcagcugcugaugcagagcacccccgccgccggcagcggcagcgccaucgccagcggcaucgccgugugcaaggugcugcaccuggagggcgaggugaacaagaucaagaacgcccugcugagcaccaacaaggccguggugagccugagcggcugcggcgugagcgugcugaccuucaaggugcuggaccugaagaacuacaucgacaagcagcugcugcccauccugaacaagcagagcugcagcaucagcaacaucgagaccgugaucgaguuccagcagaagaacaacagacugcuggagaucaccagagaguucagcgugaacgccggcgugaccacccccgugagcaccuacaugcugaccaacagcgagcugcugagccugaucaacgacaugcccaucaccaacgaccagaagaagcugaugagcaacaacgugcagaucgugagacagcagagcuacagcaucaugugcaucaucaaggaggaggugcuggccuacguggugcagcugccccuguacggcgugaucgacacccccugcuggaagcugcacaccagcccccugugcaccaccaacaccaaggagggcagcaacaucugccugaccagaaccgacagaggcugguacugcgacaacgccggcagcgugagcuucuucccccaggccgagaccugcaaggugcagagcaacagaguguucugcgacaccaugaacagcagaacccugcccagcgaggugaaccugugcaacaucgacaucuucaaccccaaguacgacugcaagaucaugaccagcaagaccgacgugagcagcagcgugaucaccagccugggcgccaucgugagcugcuacggcaagaccaagugcaccgccagcaacaagugcagaggcaucaucaagaccuucagcaacggcugcgacuacgugagcaacaagggcguggacaccgugagcgugggcaacacccuguacuacgugaacaagcaggagggcaagagccuguacgugaagggcgagcccaucaucaacuucuacgacccccugguguuccccagcgacgaguucgacgccagcaucagccaggugaacgagaagaucaaccagagccuggccuucaucagaaagagcgacgagcugcugcacaacgugaacgugggcaagagcaccaccaacaucaugaucaccaccaucaucaucgugaucaucgugauccugcugcugcugaucgccgugggccuguuccuguacugcaaggccagaugaggacuaguguccaccugucccuccugggcugcuggauugucucguuuuccugccaaauaaacaggaucagcgcuuuacagaucuaaaaaaaaaaaaaaaaaaaaaaaaaaaaaaaaaaaaaaaaaaaaaaaaaaaaaaaaaaaaaaaaugcaucccccccccccccccccccccccccccccccaaaggcucuuuucagagccaccagaauu

SEQ ID NO: 17331 - RNA, 1837 nt, Artificial Sequence
  mRNA product Design b-3 comprising derived and/or modified sequence from HRSV(Memphis-37)__AIY60640.1__F-del_DSCav1_mut5 (opt5)
gggagagucccgcagucggcguccagcggcucugcuuguucgugugugugucguugcaggccuuauucaagcuuaccauggagcugcccauccucaagaccaacgccauuacaacgauccuggcugccgugacccuuugcuucgcgagcucccagaauauuacagaagaguuuuaccaaucuaccuguagcgcugucuccaaaggcuaucugucugcccucagaacagggugguacaccagcguuaucacaauugaacuguccaacaucaaggagaauaaaugcaacggaaccgacgccaaggugaaacuuaucaagcaggaacuggauaaguauaaaaaugcugugacggagcuccagcugcugaugcagucuaccccugccgcuggcagcggguccgccauugcgagcggaaucgccgucuguaaggugcuccaccuggagggcgaaguuaacaaaauuaagaaugcccuucugucuacaaacaaagcuguggucucccucagcgggugcggagugucuguucugaccuucaaggugcuugaccugaagaauuacaucgauaaacaacuccugccgauucugaacaagcaguccuguagcaucucuaauauugagacagucaucgaauuucagcagaaaaacaaucggcuccuggagaucacccgcgaguucuccgugaacgcuggcgugacgacacccgucagcaccuauaugcuuacaaauuccgaacugcucucucugauuaacgacaugccuaucaccaacgaucaaaagaaacuuaugagcaauaacguucagauugugagacagcaguccuacagcaucaugugcauuaucaaggaggaagugcuggccuaugucgugcaacucccccuguacggcguuaucgacaccccuuguuggaaacugcauacaucuccccucugcacgaccaauacaaaggagggguccaacauuugucugacccggacagaucgcggaugguacugcgacaaugcgggcagcgugagcuuuuucccucaggccgaaaccuguaagguccagucuaacagaguguuuugcgauacgaugaacuccagaacacugccgucugagguuaaucucugcaauaucgacauuuucaaccccaaauaugauuguaagaucaugaccagcaaaaccgacguguccagcucugucauuacaucccugggggcuaucgugagcugcuacggaaagaccaaauguacagccucuaauaagugccggggcaucauuaagacguuuuccaacgggugugauuaugucagcaauaaaggaguggacaccguuuccgugggcaacacacuuuacuaugucaauaagcaagagggcaaaucucuguacgugaagggggaaccuaucauuaacuucuaugacccccucguuuuuccuagcgaugaguucgacgcuuccaucucucaggugaacgagaaaauuaaucagagccuggccuuuauccgcaaguccgaugaacugcuccacaacgucaaugugggaaagagcaccacaaacauuaugaucaccacgaucauuaucgugauuaucguuauucugcuucugcucaucgccgucggccuguuccuguacugcaaagcuagaugaggacuaguguccaccugucccuccugggcugcuggauugucucguuuuccugccaaauaaacaggaucagcgcuuuacagaucuaaaaaaaaaaaaaaaaaaaaaaaaaaaaaaaaaaaaaaaaaaaaaaaaaaaaaaaaaaaaaaaaugcaucccccccccccccccccccccccccccccccaaaggcucuuuucagagccaccagaauu

SEQ ID NO: 17332 - RNA, 1837 nt, Artificial Sequence
  mRNA product Design b-3 comprising derived and/or modified sequence from HRSV(Memphis-37)__AIY60640.1__F-del_DSCav1_mut5 (opt6)
gggagagucccgcagucggcguccagcggcucugcuuguucgugugugugucguugcaggccuuauucaagcuuaccauggaauuacccaucuuaaaaacaaaugcaauaacaacaauacuagcagccguaacauuaugcuucgccucaagccaaaacauaacagaagaauuuuaccaaagcacauguuccgccguaucaaaaggauaucucucagcacuacguacuggaugguauacauccguaaucacaauugaacuaucaaacauuaaagaaaacaaaugcaauggaacagaugcgaaaguaaaacuaauaaaacaagaauuagauaaauauaaaaaugcaguaaccgaacuacaacuacuaaugcaaucaacucccgcugccgguagcggauccgccauagcaagcggaauugcuguauguaaaguccuacaucuugaaggcgaagucaacaaaaucaaaaaugcauuacucucgaccaacaaagcagucguaucacuaucaggaugcggagucucaguauuaacuuuuaaaguccuugaccuaaaaaacuacauagacaaacaacuacuaccaauucuaaauaaacaaaguugcagcauauccaauaucgaaacaguuauagaauuucaacaaaaaaacaaccgccuacuagaaaucacuagagaauuuucaguaaaugcaggcguaaccacaccagucucuaccuauaugcuuaccaacucugaauuauuaucacuuauaaacgacaugcccauaacaaaugaucaaaaaaaacuaaugagcaacaacguacaaauaguaagacaacaaagcuacagcauuauguguauaauaaaagaagaaguguuagcuuauguaguccaacuaccccucuauggcguuaucgauacaccaugcuggaaauuacacacaagcccucuaugcacaacuaacaccaaagaaggcucuaacauaugcuuaacaagaacagauagaggaugguauugcgauaacgcaggaucaguaucauucuuuccacaagcagaaacauguaaaguacaaucuaaccgaguauucugcgacacaaugaacucuagaacacuacccucagaaguuaaucucuguaauauugacauuuucaauccaaaauacgauugcaaaauaaugaccucuaaaaccgacguaucauccucaguuauaacguccuuaggagcaaucguaagcugcuauggcaaaacaaaauguaccgcaucaaacaaaugcagaggaauaauaaaaacauucucaaacggcugugacuacguaagcaauaaagguguugacacaguuucaguaggaaauacacuauacuauguaaauaaacaagaaggaaaaucucucuauguaaaaggagaacccauaauaaacuucuacgacccacucguauuuccaagcgaugaauuugaugcgagcauuucccagguaaaugaaaaaauaaaucaaucacuagcauucaucagaaaaagugaugaauuacuacacaauguuaacguaggaaaaucaacaacaaauaucaugauaacaacaaucauaauagucauaaucguaauauuacuauuacuaauagcaguagguuuauuucuauacuguaaagcaagguaaggacuaguguccaccugucccuccugggcugcuggauugucucguuuuccugccaaauaaacaggaucagcgcuuuacagaucuaaaaaaaaaaaaaaaaaaaaaaaaaaaaaaaaaaaaaaaaaaaaaaaaaaaaaaaaaaaaaaaaugcaucccccccccccccccccccccccccccccccaaaggcucuuuucagagccaccagaauu

SEQ ID NO: 17333 - RNA, 1837 nt, Artificial Sequence
  mRNA product Design b-3 comprising derived and/or modified sequence from HRSV(Memphis-37)__AIY60640.1__F-del_DSCav1_mut5 (opt11)
gggagagucccgcagucggcguccagcggcucugcuuguucgugugugugucguugcaggccuuauucaagcuuaccauggaacuucccauccuaaaaaccaacgccauaacaacaauccucgcagcagucacccucugcuucgccucuucacaaaacaucaccgaagaauuuuaccaaucaaccugcuccgccguguccaaaggcuaccucucagcacugcgcacaggaugguauaccagcguaaucaccaucgaacucuccaacaucaaggaaaacaaaugcaacggcaccgaugccaaagucaaacucaucaagcaagaacuugacaaauacaaaaacgccgugaccgagcuacaacuccucaugcaguccacuccagccgccggcuccggcagcgccaucgccuccggcaucgccguaugcaaaguccuccaccucgaaggcgaaguaaacaaaaucaagaacgcacuccuaagcaccaacaaagccgucgucucacucuccgguugcggcgucagcguccuaacauucaaaguucucgaccucaaaaacuacauagacaaacaacuccuccccauccucaacaaacaauccugcuccauaucaaacaucgaaaccguuaucgaauuucaacaaaaaaacaaccgccuccuagaaaucacccgcgaauuuuccgucaacgcaggcgucaccacccccguuuccaccuauaugcucaccaacuccgaacuccucucccucaucaacgacaugcccauuaccaacgaccaaaagaaacuuaugagcaacaacguucaaaucguccgacaacaaucauacuccaucaugugcauuaucaaagaagaaguacucgccuacguaguacaauuaccccucuacggcguaaucgacaccccaugcuggaaacuacacaccuccccccucuguaccaccaacaccaaagaaggcucuaacaucugccucacccgcacagaccguggcugguauugcgauaacgcagggucugucuccuucuucccccaagccgaaacaugcaaaguccaauccaacagagucuucugcgacaccaugaacucgagaacccuccccuccgaagucaaccuaugcaacaucgacaucuucaacccaaaauacgacugcaaaaucaugacuucaaaaacagacgugagcucguccgucaucacaagccuaggagcuaucguauccugcuacggaaaaacaaaaugcacugcuuccaacaaaugccgcggaaucauaaaaaccuucuccaacggcugcgacuacgucagcaacaaaggcgucgacacagucuccguaggcaacacccuauacuacgucaauaaacaagaaggcaagucccuauaugucaaaggcgagcccaucaucaauuucuaugauccccucguuuucccauccgacgaauuugacgcauccaucucccaagucaacgaaaaaauaaaccaaagccucgcauucauccgcaaauccgacgaacuccuccacaacguaaacguaggaaaauccacaacuaacaucaugaucaccaccaucaucaucgucauuaucgucauccuacuccuccucauagcagucggccucuuccucuacugcaaagcacgcuagggacuaguguccaccugucccuccugggcugcuggauugucucguuuuccugccaaauaaacaggaucagcgcuuuacagaucuaaaaaaaaaaaaaaaaaaaaaaaaaaaaaaaaaaaaaaaaaaaaaaaaaaaaaaaaaaaaaaaaugcaucccccccccccccccccccccccccccccccaaaggcucuuuucagagccaccagaauu

SEQ ID NO: 17334 - RNA, 1888 nt, Artificial Sequence
  mRNA product Design b-4 comprising derived and/or modified sequence from HRSV(Memphis-37)__AIY60640.1__F-del_DSCav1_mut5 (opt1)
gggagagucccgcagucggcguccagcggcucugcuuguucgugugugugucguugcaggccuuauucaagcuuaccauggagcugcccauccucaagaccaacgccaucaccacgauccuggccgcggugacccugugcuucgccagcucccagaacaucaccgaggaguucuaccagagcacgugcuccgccgucagcaagggcuaccucuccgcccugcgcaccgggugguacaccagcgugaucaccaucgagcuguccaacaucaaggagaacaagugcaacggcaccgacgccaaggugaagcucaucaagcaggagcuggacaaguacaagaacgcggucacggagcugcagcuccugaugcagagcaccccggccgccggcuccgggagcgcgaucgccuccggcaucgccgucugcaaggugcugcaccucgagggcgaggugaacaagaucaagaacgcccugcuguccaccaacaaggccgucgugagccucuccggcugcggggugagcguccugaccuucaaggugcuggaccucaagaacuacaucgacaagcagcugcugcccauccugaacaagcagagcugcuccaucagcaacaucgagaccgucaucgaguuccagcagaagaacaaccgccuccuggagaucacgcgggaguucagcgugaacgcgggcgugaccacccccgucuccaccuacaugcugacgaacagcgagcuccugucccugaucaacgacaugccgaucaccaacgaccagaagaagcucaugagcaacaacgugcagaucgugcgccagcaguccuacagcaucaugugcaucaucaaggaggagguccuggccuacguggugcagcugccccucuacggggucaucgacacccccugcuggaagcugcacaccagcccccugugcacgaccaacaccaaggagggcuccaacaucugccucacccggacggaccgcgggugguacugcgacaacgccggcagcguguccuucuucccgcaggccgagaccugcaagguccagagcaaccggguguucugcgacaccaugaacucccggacccugcccagcgaggugaaccucugcaacaucgacaucuucaaccccaaguacgacugcaagaucaugacguccaagaccgacgucagcuccagcgugaucaccucccugggcgccaucgugagcugcuacgggaagaccaagugcacggcgagcaacaagugccgcggcaucaucaagaccuucuccaacgggugcgacuacgucagcaacaagggcguggacaccguguccgucggcaacacccuguacuacgugaacaagcaggagggcaagagccucuacgugaagggggagcccaucaucaacuucuacgacccgcuggucuuccccuccgacgaguucgacgccagcaucucccaggugaacgagaagaucaaccagagccuggccuucauccggaaguccgacgagcuccugcacaacgugaacgucggcaagagcaccacgaacaucaugaucaccaccaucaucaucgugaucaucgugauccugcugcuccugaucgccgucgggcuguuccucuacugcaaggcccgcugaggacuaguaauaaggaaacuguaugaaugucugugggcaggaagugaagagauccuucuguaaagguuuuuggaauuaugucugcugaauaauaaacuuuuuugaaauaauaaaucugguagaaaaaugagaucuaaaaaaaaaaaaaaaaaaaaaaaaaaaaaaaaaaaaaaaaaaaaaaaaaaaaaaaaaaaaaaaaugcaucccccccccccccccccccccccccccccccaaaggcucuuuucagagccaccagaauu

SEQ ID NO: 17335 - RNA, 1888 nt, Artificial Sequence
  mRNA product Design b-4 comprising derived and/or modified sequence from HRSV(Memphis-37)__AIY60640.1__F-del_DSCav1_mut5 (opt1)
gggagagucccgcagucggcguccagcggcucugcuuguucgugugugugucguugcaggccuuauucaagcuuaccauggagcugcccauccucaagaccaacgccaucaccacgauccuggccgcggugacccugugcuucgccagcucccagaacaucaccgaggaguucuaccagagcacgugcuccgccgucagcaagggcuaccucuccgcccugcgcaccgggugguacaccagcgugaucaccaucgagcuguccaacaucaaggagaacaagugcaacggcaccgacgccaaggugaagcucaucaagcaggagcuggacaaguacaagaacgcggucacggagcugcagcuccugaugcagagcaccccggccgccggguccggcagcgccaucgcguccgggaucgccgugugcaaggugcugcaccucgagggcgaggucaacaagaucaagaacgcccugcugagcaccaacaaggccguggugucccucagcggcugcggggucuccgugcugaccuucaaggugcuggaccucaagaacuacaucgacaagcagcugcugcccauccucaacaagcagagcugcuccaucagcaacaucgagacggucaucgaguuccagcagaagaacaaccggcugcuggagaucacccgcgaguucuccgugaacgccggcgugaccacccccgucagcacguacaugcucaccaacagcgagcugcugucccucaucaacgacaugcccaucaccaacgaccagaagaagcugaugagcaacaacgugcagaucgugcggcagcaguccuacagcaucaugugcaucaucaaggaggagguccuggcguacguggugcagcucccgcuguacggggucaucgacacccccugcuggaagcugcacacgagcccccucugcaccaccaacaccaaggagggcuccaacaucugccugacgcgcaccgaccgggggugguacugcgacaacgccggcuccgugagcuucuucccccaggccgagaccugcaaggugcaguccaaccgcgucuucugcgacaccaugaacagccggacgcucccguccgaggugaaccugugcaacaucgacaucuucaaccccaaguacgacugcaagaucaugaccagcaagaccgacgucuccagcuccgugaucaccagccugggcgccaucguguccugcuacgggaagacgaagugcaccgccagcaacaagugccggggcaucaucaagaccuucuccaacgggugcgacuacgucagcaacaagggcguggacaccgugagcgucggcaacacgcucuacuacgugaacaagcaggaggggaagucccuguacgugaagggcgagcccaucaucaacuucuacgacccccuggucuucccgagcgacgaguucgacgcguccaucagccaggugaacgagaagaucaaccagucccucgccuucauccgcaagagcgacgagcugcugcacaacgugaacgucgggaaguccaccaccaacaucaugaucaccaccaucaucaucgugaucaucgugauccuccugcugcucaucgccgucggccuguuccuguacugcaaggcccggugaggacuaguaauaaggaaacuguaugaaugucugugggcaggaagugaagagauccuucuguaaagguuuuuggaauuaugucugcugaauaauaaacuuuuuugaaauaauaaaucugguagaaaaaugagaucuaaaaaaaaaaaaaaaaaaaaaaaaaaaaaaaaaaaaaaaaaaaaaaaaaaaaaaaaaaaaaaaaugcaucccccccccccccccccccccccccccccccaaaggcucuuuucagagccaccagaauu

SEQ ID NO: 17336 - RNA, 1888 nt, Artificial Sequence
  mRNA product Design b-4 comprising derived and/or modified sequence from HRSV(Memphis-37)__AIY60640.1__F-del_DSCav1_mut5 (opt2)
gggagagucccgcagucggcguccagcggcucugcuuguucgugugugugucguugcaggccuuauucaagcuuaccauggagcuccccauccucaagaccaacgccaucaccaccauccucgccgccgucacccucugcuucgccuccucccagaacaucaccgaggaguucuaccaguccaccugcuccgccgucuccaagggcuaccucuccgcccuccgcaccggcugguacaccuccgucaucaccaucgagcucuccaacaucaaggagaacaagugcaacggcaccgacgccaaggucaagcucaucaagcaggagcucgacaaguacaagaacgccgucaccgagcuccagcuccucaugcaguccacccccgccgccggcuccggcuccgccaucgccuccggcaucgccgucugcaagguccuccaccucgagggcgaggucaacaagaucaagaacgcccuccucuccaccaacaaggccgucgucucccucuccggcugcggcgucuccguccucaccuucaagguccucgaccucaagaacuacaucgacaagcagcuccuccccauccucaacaagcaguccugcuccaucuccaacaucgagaccgucaucgaguuccagcagaagaacaaccgccuccucgagaucacccgcgaguucuccgucaacgccggcgucaccacccccgucuccaccuacaugcucaccaacuccgagcuccucucccucaucaacgacaugcccaucaccaacgaccagaagaagcucauguccaacaacguccagaucguccgccagcaguccuacuccaucaugugcaucaucaaggaggagguccucgccuacgucguccagcucccccucuacggcgucaucgacacccccugcuggaagcuccacaccuccccccucugcaccaccaacaccaaggagggcuccaacaucugccucacccgcaccgaccgcggcugguacugcgacaacgccggcuccgucuccuucuucccccaggccgagaccugcaagguccaguccaaccgcgucuucugcgacaccaugaacucccgcacccuccccuccgaggucaaccucugcaacaucgacaucuucaaccccaaguacgacugcaagaucaugaccuccaagaccgacgucuccuccuccgucaucaccucccucggcgccaucgucuccugcuacggcaagaccaagugcaccgccuccaacaagugccgcggcaucaucaagaccuucuccaacggcugcgacuacgucuccaacaagggcgucgacaccgucuccgucggcaacacccucuacuacgucaacaagcaggagggcaagucccucuacgucaagggcgagcccaucaucaacuucuacgacccccucgucuuccccuccgacgaguucgacgccuccaucucccaggucaacgagaagaucaaccagucccucgccuucauccgcaaguccgacgagcuccuccacaacgucaacgucggcaaguccaccaccaacaucaugaucaccaccaucaucaucgucaucaucgucauccuccuccuccucaucgccgucggccucuuccucuacugcaaggcccgcugaggacuaguaauaaggaaacuguaugaaugucugugggcaggaagugaagagauccuucuguaaagguuuuuggaauuaugucugcugaauaauaaacuuuuuugaaauaauaaaucugguagaaaaaugagaucuaaaaaaaaaaaaaaaaaaaaaaaaaaaaaaaaaaaaaaaaaaaaaaaaaaaaaaaaaaaaaaaaugcaucccccccccccccccccccccccccccccccaaaggcucuuuucagagccaccagaauu

SEQ ID NO: 17337 - RNA, 1888 nt, Artificial Sequence
  mRNA product Design b-4 comprising derived and/or modified sequence from HRSV(Memphis-37)__AIY60640.1__F-del_DSCav1_mut5 (opt3)
gggagagucccgcagucggcguccagcggcucugcuuguucgugugugugucguugcaggccuuauucaagcuuaccauggagcugcccauccucaagaccaacgccauuacaacuauacuugcugcagugacgcugugcuucgccagcucccagaauaucaccgaagaguuuuaccaaucuacauguucagcggucaguaaaggcuauuugagcgcuuuaagaacugggugguacaccuccguuauuacaaucgaacugucuaacauuaaggagaauaaaugcaacggaaccgacgccaaggugaaacuaaucaagcaggaacucgauaaguauaaaaaugcaguaacugagcugcagcuucugaugcagucgaccccugccgcugguucaggcagcgcaauagccagugggaucgcuguguguaaggucuugcaccucgagggagaagugaacaaaauuaagaaugcccugcuguccacaaacaaagcgguugugucucucagcggcugcggugucuccguguuaacguucaagguacuggaccuuaagaauuacaucgauaaacaauugcugccaauucuaaacaagcagucauguaguaucagcaauauagagacuguuauugaauuucagcagaaaaacaauaggcuccuggagaucacccgggaguucucugugaacgcaggggucacaacuccgguguccaccuauaugcuuacaaauucagaacuguugagccucauuaacgacaugcccaucaccaacgaucaaaagaaacugaugaguaauaacgugcagaucguccgccagcagucuuacuccauuaugugcauaaucaaggaggaaguuuuagccuaugugguacaacugccucucuacggagugauugacacgccauguuggaaacuucauacuagcccccugugcacaaccaauacuaaggagggcucgaacaucuguuugacacgaaccgaucguggcugguacugcgacaaugcugggucugucuccuuuuucccucaggccgaaacguguaaggugcagucaaacagaguguuuugcgauaccaugaauaguagaacacugccaagcgaggugaaccucugcaauauagacauuuucaaccccaaauaugauuguaagaucaugacuuccaaaaccgacgucucuagcucagugaucacaagucugggagcaauuguauccugcuacgguaagacuaaauguaccgcuagcaauaagugcaggggcaucauuaagacauuuucuaacgggugugauuauguuucaaauaaaggaguggacaccgucagugugggcaacacucuuuacuaugucaauaagcaagaggguaaaagccuguacgugaagggggaaccuauaaucaacuucuaugacccauugguuuuuccguccgaugaguucgacgccucuauuucgcagguuaacgagaaaaucaaucagagccucgcguuuauccggaaguccgaugaacuguuacacaacguaaaugucggaaagucaacgacaaacauuaugauaaccacuaucauuaucgugauuaucguuauacugcuacuccugaucgccgugggccuuuucuuguacugcaaagcacgcugaggacuaguaauaaggaaacuguaugaaugucugugggcaggaagugaagagauccuucuguaaagguuuuuggaauuaugucugcugaauaauaaacuuuuuugaaauaauaaaucugguagaaaaaugagaucuaaaaaaaaaaaaaaaaaaaaaaaaaaaaaaaaaaaaaaaaaaaaaaaaaaaaaaaaaaaaaaaaugcaucccccccccccccccccccccccccccccccaaaggcucuuuucagagccaccagaauu

SEQ ID NO: 17338 - RNA, 1888 nt, Artificial Sequence
  mRNA product Design b-4 comprising derived and/or modified sequence from HRSV(Memphis-37)__AIY60640.1__F-del_DSCav1_mut5 (opt4)
gggagagucccgcagucggcguccagcggcucugcuuguucgugugugugucguugcaggccuuauucaagcuuaccauggagcugcccauccugaagaccaacgccaucaccaccauccuggccgccgugacccugugcuucgccagcagccagaacaucaccgaggaguucuaccagagcaccugcagcgccgugagcaagggcuaccugagcgcccugagaaccggcugguacaccagcgugaucaccaucgagcugagcaacaucaaggagaacaagugcaacggcaccgacgccaaggugaagcugaucaagcaggagcuggacaaguacaagaacgccgugaccgagcugcagcugcugaugcagagcacccccgccgccggcagcggcagcgccaucgccagcggcaucgccgugugcaaggugcugcaccuggagggcgaggugaacaagaucaagaacgcccugcugagcaccaacaaggccguggugagccugagcggcugcggcgugagcgugcugaccuucaaggugcuggaccugaagaacuacaucgacaagcagcugcugcccauccugaacaagcagagcugcagcaucagcaacaucgagaccgugaucgaguuccagcagaagaacaacagacugcuggagaucaccagagaguucagcgugaacgccggcgugaccacccccgugagcaccuacaugcugaccaacagcgagcugcugagccugaucaacgacaugcccaucaccaacgaccagaagaagcugaugagcaacaacgugcagaucgugagacagcagagcuacagcaucaugugcaucaucaaggaggaggugcuggccuacguggugcagcugccccuguacggcgugaucgacacccccugcuggaagcugcacaccagcccccugugcaccaccaacaccaaggagggcagcaacaucugccugaccagaaccgacagaggcugguacugcgacaacgccggcagcgugagcuucuucccccaggccgagaccugcaaggugcagagcaacagaguguucugcgacaccaugaacagcagaacccugcccagcgaggugaaccugugcaacaucgacaucuucaaccccaaguacgacugcaagaucaugaccagcaagaccgacgugagcagcagcgugaucaccagccugggcgccaucgugagcugcuacggcaagaccaagugcaccgccagcaacaagugcagaggcaucaucaagaccuucagcaacggcugcgacuacgugagcaacaagggcguggacaccgugagcgugggcaacacccuguacuacgugaacaagcaggagggcaagagccuguacgugaagggcgagcccaucaucaacuucuacgacccccugguguuccccagcgacgaguucgacgccagcaucagccaggugaacgagaagaucaaccagagccuggccuucaucagaaagagcgacgagcugcugcacaacgugaacgugggcaagagcaccaccaacaucaugaucaccaccaucaucaucgugaucaucgugauccugcugcugcugaucgccgugggccuguuccuguacugcaaggccagaugaggacuaguaauaaggaaacuguaugaaugucugugggcaggaagugaagagauccuucuguaaagguuuuuggaauuaugucugcugaauaauaaacuuuuuugaaauaauaaaucugguagaaaaaugagaucuaaaaaaaaaaaaaaaaaaaaaaaaaaaaaaaaaaaaaaaaaaaaaaaaaaaaaaaaaaaaaaaaugcaucccccccccccccccccccccccccccccccaaaggcucuuuucagagccaccagaauu

SEQ ID NO: 17339 - RNA, 1888 nt, Artificial Sequence
  mRNA product Design b-4 comprising derived and/or modified sequence from HRSV(Memphis-37)__AIY60640.1__F-del_DSCav1_mut5 (opt5)
gggagagucccgcagucggcguccagcggcucugcuuguucgugugugugucguugcaggccuuauucaagcuuaccauggagcugcccauccucaagaccaacgccauuacaacgauccuggcugccgugacccuuugcuucgcgagcucccagaauauuacagaagaguuuuaccaaucuaccuguagcgcugucuccaaaggcuaucugucugcccucagaacagggugguacaccagcguuaucacaauugaacuguccaacaucaaggagaauaaaugcaacggaaccgacgccaaggugaaacuuaucaagcaggaacuggauaaguauaaaaaugcugugacggagcuccagcugcugaugcagucuaccccugccgcuggcagcggguccgccauugcgagcggaaucgccgucuguaaggugcuccaccuggagggcgaaguuaacaaaauuaagaaugcccuucugucuacaaacaaagcuguggucucccucagcgggugcggagugucuguucugaccuucaaggugcuugaccugaagaauuacaucgauaaacaacuccugccgauucugaacaagcaguccuguagcaucucuaauauugagacagucaucgaauuucagcagaaaaacaaucggcuccuggagaucacccgcgaguucuccgugaacgcuggcgugacgacacccgucagcaccuauaugcuuacaaauuccgaacugcucucucugauuaacgacaugccuaucaccaacgaucaaaagaaacuuaugagcaauaacguucagauugugagacagcaguccuacagcaucaugugcauuaucaaggaggaagugcuggccuaugucgugcaacucccccuguacggcguuaucgacaccccuuguuggaaacugcauacaucuccccucugcacgaccaauacaaaggagggguccaacauuugucugacccggacagaucgcggaugguacugcgacaaugcgggcagcgugagcuuuuucccucaggccgaaaccuguaagguccagucuaacagaguguuuugcgauacgaugaacuccagaacacugccgucugagguuaaucucugcaauaucgacauuuucaaccccaaauaugauuguaagaucaugaccagcaaaaccgacguguccagcucugucauuacaucccugggggcuaucgugagcugcuacggaaagaccaaauguacagccucuaauaagugccggggcaucauuaagacguuuuccaacgggugugauuaugucagcaauaaaggaguggacaccguuuccgugggcaacacacuuuacuaugucaauaagcaagagggcaaaucucuguacgugaagggggaaccuaucauuaacuucuaugacccccucguuuuuccuagcgaugaguucgacgcuuccaucucucaggugaacgagaaaauuaaucagagccuggccuuuauccgcaaguccgaugaacugcuccacaacgucaaugugggaaagagcaccacaaacauuaugaucaccacgaucauuaucgugauuaucguuauucugcuucugcucaucgccgucggccuguuccuguacugcaaagcuagaugaggacuaguaauaaggaaacuguaugaaugucugugggcaggaagugaagagauccuucuguaaagguuuuuggaauuaugucugcugaauaauaaacuuuuuugaaauaauaaaucugguagaaaaaugagaucuaaaaaaaaaaaaaaaaaaaaaaaaaaaaaaaaaaaaaaaaaaaaaaaaaaaaaaaaaaaaaaaaugcaucccccccccccccccccccccccccccccccaaaggcucuuuucagagccaccagaauu

SEQ ID NO: 17340 - RNA, 1888 nt, Artificial Sequence
  mRNA product Design b-4 comprising derived and/or modified sequence from HRSV(Memphis-37)__AIY60640.1__F-del_DSCav1_mut5 (opt6)
gggagagucccgcagucggcguccagcggcucugcuuguucgugugugugucguugcaggccuuauucaagcuuaccauggaauuacccaucuuaaaaacaaaugcaauaacaacaauacuagcagccguaacauuaugcuucgccucaagccaaaacauaacagaagaauuuuaccaaagcacauguuccgccguaucaaaaggauaucucucagcacuacguacuggaugguauacauccguaaucacaauugaacuaucaaacauuaaagaaaacaaaugcaauggaacagaugcgaaaguaaaacuaauaaaacaagaauuagauaaauauaaaaaugcaguaaccgaacuacaacuacuaaugcaaucaacucccgcugccgguagcggauccgccauagcaagcggaauugcuguauguaaaguccuacaucuugaaggcgaagucaacaaaaucaaaaaugcauuacucucgaccaacaaagcagucguaucacuaucaggaugcggagucucaguauuaacuuuuaaaguccuugaccuaaaaaacuacauagacaaacaacuacuaccaauucuaaauaaacaaaguugcagcauauccaauaucgaaacaguuauagaauuucaacaaaaaaacaaccgccuacuagaaaucacuagagaauuuucaguaaaugcaggcguaaccacaccagucucuaccuauaugcuuaccaacucugaauuauuaucacuuauaaacgacaugcccauaacaaaugaucaaaaaaaacuaaugagcaacaacguacaaauaguaagacaacaaagcuacagcauuauguguauaauaaaagaagaaguguuagcuuauguaguccaacuaccccucuauggcguuaucgauacaccaugcuggaaauuacacacaagcccucuaugcacaacuaacaccaaagaaggcucuaacauaugcuuaacaagaacagauagaggaugguauugcgauaacgcaggaucaguaucauucuuuccacaagcagaaacauguaaaguacaaucuaaccgaguauucugcgacacaaugaacucuagaacacuacccucagaaguuaaucucuguaauauugacauuuucaauccaaaauacgauugcaaaauaaugaccucuaaaaccgacguaucauccucaguuauaacguccuuaggagcaaucguaagcugcuauggcaaaacaaaauguaccgcaucaaacaaaugcagaggaauaauaaaaacauucucaaacggcugugacuacguaagcaauaaagguguugacacaguuucaguaggaaauacacuauacuauguaaauaaacaagaaggaaaaucucucuauguaaaaggagaacccauaauaaacuucuacgacccacucguauuuccaagcgaugaauuugaugcgagcauuucccagguaaaugaaaaaauaaaucaaucacuagcauucaucagaaaaagugaugaauuacuacacaauguuaacguaggaaaaucaacaacaaauaucaugauaacaacaaucauaauagucauaaucguaauauuacuauuacuaauagcaguagguuuauuucuauacuguaaagcaagguaaggacuaguaauaaggaaacuguaugaaugucugugggcaggaagugaagagauccuucuguaaagguuuuuggaauuaugucugcugaauaauaaacuuuuuugaaauaauaaaucugguagaaaaaugagaucuaaaaaaaaaaaaaaaaaaaaaaaaaaaaaaaaaaaaaaaaaaaaaaaaaaaaaaaaaaaaaaaaugcaucccccccccccccccccccccccccccccccaaaggcucuuuucagagccaccagaauu

SEQ ID NO: 17341 - RNA, 1888 nt, Artificial Sequence
  mRNA product Design b-4 comprising derived and/or modified sequence from HRSV(Memphis-37)__AIY60640.1__F-del_DSCav1_mut5 (opt11)
gggagagucccgcagucggcguccagcggcucugcuuguucgugugugugucguugcaggccuuauucaagcuuaccauggaacuucccauccuaaaaaccaacgccauaacaacaauccucgcagcagucacccucugcuucgccucuucacaaaacaucaccgaagaauuuuaccaaucaaccugcuccgccguguccaaaggcuaccucucagcacugcgcacaggaugguauaccagcguaaucaccaucgaacucuccaacaucaaggaaaacaaaugcaacggcaccgaugccaaagucaaacucaucaagcaagaacuugacaaauacaaaaacgccgugaccgagcuacaacuccucaugcaguccacuccagccgccggcuccggcagcgccaucgccuccggcaucgccguaugcaaaguccuccaccucgaaggcgaaguaaacaaaaucaagaacgcacuccuaagcaccaacaaagccgucgucucacucuccgguugcggcgucagcguccuaacauucaaaguucucgaccucaaaaacuacauagacaaacaacuccuccccauccucaacaaacaauccugcuccauaucaaacaucgaaaccguuaucgaauuucaacaaaaaaacaaccgccuccuagaaaucacccgcgaauuuuccgucaacgcaggcgucaccacccccguuuccaccuauaugcucaccaacuccgaacuccucucccucaucaacgacaugcccauuaccaacgaccaaaagaaacuuaugagcaacaacguucaaaucguccgacaacaaucauacuccaucaugugcauuaucaaagaagaaguacucgccuacguaguacaauuaccccucuacggcguaaucgacaccccaugcuggaaacuacacaccuccccccucuguaccaccaacaccaaagaaggcucuaacaucugccucacccgcacagaccguggcugguauugcgauaacgcagggucugucuccuucuucccccaagccgaaacaugcaaaguccaauccaacagagucuucugcgacaccaugaacucgagaacccuccccuccgaagucaaccuaugcaacaucgacaucuucaacccaaaauacgacugcaaaaucaugacuucaaaaacagacgugagcucguccgucaucacaagccuaggagcuaucguauccugcuacggaaaaacaaaaugcacugcuuccaacaaaugccgcggaaucauaaaaaccuucuccaacggcugcgacuacgucagcaacaaaggcgucgacacagucuccguaggcaacacccuauacuacgucaauaaacaagaaggcaagucccuauaugucaaaggcgagcccaucaucaauuucuaugauccccucguuuucccauccgacgaauuugacgcauccaucucccaagucaacgaaaaaauaaaccaaagccucgcauucauccgcaaauccgacgaacuccuccacaacguaaacguaggaaaauccacaacuaacaucaugaucaccaccaucaucaucgucauuaucgucauccuacuccuccucauagcagucggccucuuccucuacugcaaagcacgcuagggacuaguaauaaggaaacuguaugaaugucugugggcaggaagugaagagauccuucuguaaagguuuuuggaauuaugucugcugaauaauaaacuuuuuugaaauaauaaaucugguagaaaaaugagaucuaaaaaaaaaaaaaaaaaaaaaaaaaaaaaaaaaaaaaaaaaaaaaaaaaaaaaaaaaaaaaaaaugcaucccccccccccccccccccccccccccccccaaaggcucuuuucagagccaccagaauu

SEQ ID NO: 17342 - RNA, 1950 nt, Artificial Sequence
  mRNA product Design b-5 comprising derived and/or modified sequence from HRSV(Memphis-37)__AIY60640.1__F-del_DSCav1_mut5 (opt1)
gggagacuccugucgggcggaaguaggaggaguagaguuuaaaaacaguacucuuuuuccgguucgggacguaguugaagcaacgacaagccggauaaccgcucuugagacaggaagcuuaccauggagcugcccauccucaagaccaacgccaucaccacgauccuggccgcggugacccugugcuucgccagcucccagaacaucaccgaggaguucuaccagagcacgugcuccgccgucagcaagggcuaccucuccgcccugcgcaccgggugguacaccagcgugaucaccaucgagcuguccaacaucaaggagaacaagugcaacggcaccgacgccaaggugaagcucaucaagcaggagcuggacaaguacaagaacgcggucacggagcugcagcuccugaugcagagcaccccggccgccggcuccgggagcgcgaucgccuccggcaucgccgucugcaaggugcugcaccucgagggcgaggugaacaagaucaagaacgcccugcuguccaccaacaaggccgucgugagccucuccggcugcggggugagcguccugaccuucaaggugcuggaccucaagaacuacaucgacaagcagcugcugcccauccugaacaagcagagcugcuccaucagcaacaucgagaccgucaucgaguuccagcagaagaacaaccgccuccuggagaucacgcgggaguucagcgugaacgcgggcgugaccacccccgucuccaccuacaugcugacgaacagcgagcuccugucccugaucaacgacaugccgaucaccaacgaccagaagaagcucaugagcaacaacgugcagaucgugcgccagcaguccuacagcaucaugugcaucaucaaggaggagguccuggccuacguggugcagcugccccucuacggggucaucgacacccccugcuggaagcugcacaccagcccccugugcacgaccaacaccaaggagggcuccaacaucugccucacccggacggaccgcgggugguacugcgacaacgccggcagcguguccuucuucccgcaggccgagaccugcaagguccagagcaaccggguguucugcgacaccaugaacucccggacccugcccagcgaggugaaccucugcaacaucgacaucuucaaccccaaguacgacugcaagaucaugacguccaagaccgacgucagcuccagcgugaucaccucccugggcgccaucgugagcugcuacgggaagaccaagugcacggcgagcaacaagugccgcggcaucaucaagaccuucuccaacgggugcgacuacgucagcaacaagggcguggacaccguguccgucggcaacacccuguacuacgugaacaagcaggagggcaagagccucuacgugaagggggagcccaucaucaacuucuacgacccgcuggucuuccccuccgacgaguucgacgccagcaucucccaggugaacgagaagaucaaccagagccuggccuucauccggaaguccgacgagcuccugcacaacgugaacgucggcaagagcaccacgaacaucaugaucaccaccaucaucaucgugaucaucgugauccugcugcuccugaucgccgucgggcuguuccucuacugcaaggcccgcugaggacuaguacuggcugcaucucccuuuccucuguccuccauccuucucccaggauggugaagggggaccugguacccagugauccccaccccaggauccuaaaucaugacuuaccugcuaauaaaaacucauuggaaaagugagaagaucuaaaaaaaaaaaaaaaaaaaaaaaaaaaaaaaaaaaaaaaaaaaaaaaaaaaaaaaaaaaaaaaaugcaucccccccccccccccccccccccccccccccaaaggcucuuuucagagccaccagaauu

SEQ ID NO: 17343 - RNA, 1950 nt, Artificial Sequence
  mRNA product Design b-5 comprising derived and/or modified sequence from HRSV(Memphis-37)__AIY60640.1__F-del_DSCav1_mut5 (opt1)
gggagacuccugucgggcggaaguaggaggaguagaguuuaaaaacaguacucuuuuuccgguucgggacguaguugaagcaacgacaagccggauaaccgcucuugagacaggaagcuuaccauggagcugcccauccucaagaccaacgccaucaccacgauccuggccgcggugacccugugcuucgccagcucccagaacaucaccgaggaguucuaccagagcacgugcuccgccgucagcaagggcuaccucuccgcccugcgcaccgggugguacaccagcgugaucaccaucgagcuguccaacaucaaggagaacaagugcaacggcaccgacgccaaggugaagcucaucaagcaggagcuggacaaguacaagaacgcggucacggagcugcagcuccugaugcagagcaccccggccgccggguccggcagcgccaucgcguccgggaucgccgugugcaaggugcugcaccucgagggcgaggucaacaagaucaagaacgcccugcugagcaccaacaaggccguggugucccucagcggcugcggggucuccgugcugaccuucaaggugcuggaccucaagaacuacaucgacaagcagcugcugcccauccucaacaagcagagcugcuccaucagcaacaucgagacggucaucgaguuccagcagaagaacaaccggcugcuggagaucacccgcgaguucuccgugaacgccggcgugaccacccccgucagcacguacaugcucaccaacagcgagcugcugucccucaucaacgacaugcccaucaccaacgaccagaagaagcugaugagcaacaacgugcagaucgugcggcagcaguccuacagcaucaugugcaucaucaaggaggagguccuggcguacguggugcagcucccgcuguacggggucaucgacacccccugcuggaagcugcacacgagcccccucugcaccaccaacaccaaggagggcuccaacaucugccugacgcgcaccgaccgggggugguacugcgacaacgccggcuccgugagcuucuucccccaggccgagaccugcaaggugcaguccaaccgcgucuucugcgacaccaugaacagccggacgcucccguccgaggugaaccugugcaacaucgacaucuucaaccccaaguacgacugcaagaucaugaccagcaagaccgacgucuccagcuccgugaucaccagccugggcgccaucguguccugcuacgggaagacgaagugcaccgccagcaacaagugccggggcaucaucaagaccuucuccaacgggugcgacuacgucagcaacaagggcguggacaccgugagcgucggcaacacgcucuacuacgugaacaagcaggaggggaagucccuguacgugaagggcgagcccaucaucaacuucuacgacccccuggucuucccgagcgacgaguucgacgcguccaucagccaggugaacgagaagaucaaccagucccucgccuucauccgcaagagcgacgagcugcugcacaacgugaacgucgggaaguccaccaccaacaucaugaucaccaccaucaucaucgugaucaucgugauccuccugcugcucaucgccgucggccuguuccuguacugcaaggcccggugaggacuaguacuggcugcaucucccuuuccucuguccuccauccuucucccaggauggugaagggggaccugguacccagugauccccaccccaggauccuaaaucaugacuuaccugcuaauaaaaacucauuggaaaagugagaagaucuaaaaaaaaaaaaaaaaaaaaaaaaaaaaaaaaaaaaaaaaaaaaaaaaaaaaaaaaaaaaaaaaugcaucccccccccccccccccccccccccccccccaaaggcucuuuucagagccaccagaauu

SEQ ID NO: 17344 - RNA, 1950 nt, Artificial Sequence
  mRNA product Design b-5 comprising derived and/or modified sequence from HRSV(Memphis-37)__AIY60640.1__F-del_DSCav1_mut5 (opt2)
gggagacuccugucgggcggaaguaggaggaguagaguuuaaaaacaguacucuuuuuccgguucgggacguaguugaagcaacgacaagccggauaaccgcucuugagacaggaagcuuaccauggagcuccccauccucaagaccaacgccaucaccaccauccucgccgccgucacccucugcuucgccuccucccagaacaucaccgaggaguucuaccaguccaccugcuccgccgucuccaagggcuaccucuccgcccuccgcaccggcugguacaccuccgucaucaccaucgagcucuccaacaucaaggagaacaagugcaacggcaccgacgccaaggucaagcucaucaagcaggagcucgacaaguacaagaacgccgucaccgagcuccagcuccucaugcaguccacccccgccgccggcuccggcuccgccaucgccuccggcaucgccgucugcaagguccuccaccucgagggcgaggucaacaagaucaagaacgcccuccucuccaccaacaaggccgucgucucccucuccggcugcggcgucuccguccucaccuucaagguccucgaccucaagaacuacaucgacaagcagcuccuccccauccucaacaagcaguccugcuccaucuccaacaucgagaccgucaucgaguuccagcagaagaacaaccgccuccucgagaucacccgcgaguucuccgucaacgccggcgucaccacccccgucuccaccuacaugcucaccaacuccgagcuccucucccucaucaacgacaugcccaucaccaacgaccagaagaagcucauguccaacaacguccagaucguccgccagcaguccuacuccaucaugugcaucaucaaggaggagguccucgccuacgucguccagcucccccucuacggcgucaucgacacccccugcuggaagcuccacaccuccccccucugcaccaccaacaccaaggagggcuccaacaucugccucacccgcaccgaccgcggcugguacugcgacaacgccggcuccgucuccuucuucccccaggccgagaccugcaagguccaguccaaccgcgucuucugcgacaccaugaacucccgcacccuccccuccgaggucaaccucugcaacaucgacaucuucaaccccaaguacgacugcaagaucaugaccuccaagaccgacgucuccuccuccgucaucaccucccucggcgccaucgucuccugcuacggcaagaccaagugcaccgccuccaacaagugccgcggcaucaucaagaccuucuccaacggcugcgacuacgucuccaacaagggcgucgacaccgucuccgucggcaacacccucuacuacgucaacaagcaggagggcaagucccucuacgucaagggcgagcccaucaucaacuucuacgacccccucgucuuccccuccgacgaguucgacgccuccaucucccaggucaacgagaagaucaaccagucccucgccuucauccgcaaguccgacgagcuccuccacaacgucaacgucggcaaguccaccaccaacaucaugaucaccaccaucaucaucgucaucaucgucauccuccuccuccucaucgccgucggccucuuccucuacugcaaggcccgcugaggacuaguacuggcugcaucucccuuuccucuguccuccauccuucucccaggauggugaagggggaccugguacccagugauccccaccccaggauccuaaaucaugacuuaccugcuaauaaaaacucauuggaaaagugagaagaucuaaaaaaaaaaaaaaaaaaaaaaaaaaaaaaaaaaaaaaaaaaaaaaaaaaaaaaaaaaaaaaaaugcaucccccccccccccccccccccccccccccccaaaggcucuuuucagagccaccagaauu

SEQ ID NO: 17345 - RNA, 1950 nt, Artificial Sequence
  mRNA product Design b-5 comprising derived and/or modified sequence from HRSV(Memphis-37)__AIY60640.1__F-del_DSCav1_mut5 (opt3)
gggagacuccugucgggcggaaguaggaggaguagaguuuaaaaacaguacucuuuuuccgguucgggacguaguugaagcaacgacaagccggauaaccgcucuugagacaggaagcuuaccauggagcugcccauccucaagaccaacgccauuacaacuauacuugcugcagugacgcugugcuucgccagcucccagaauaucaccgaagaguuuuaccaaucuacauguucagcggucaguaaaggcuauuugagcgcuuuaagaacugggugguacaccuccguuauuacaaucgaacugucuaacauuaaggagaauaaaugcaacggaaccgacgccaaggugaaacuaaucaagcaggaacucgauaaguauaaaaaugcaguaacugagcugcagcuucugaugcagucgaccccugccgcugguucaggcagcgcaauagccagugggaucgcuguguguaaggucuugcaccucgagggagaagugaacaaaauuaagaaugcccugcuguccacaaacaaagcgguugugucucucagcggcugcggugucuccguguuaacguucaagguacuggaccuuaagaauuacaucgauaaacaauugcugccaauucuaaacaagcagucauguaguaucagcaauauagagacuguuauugaauuucagcagaaaaacaauaggcuccuggagaucacccgggaguucucugugaacgcaggggucacaacuccgguguccaccuauaugcuuacaaauucagaacuguugagccucauuaacgacaugcccaucaccaacgaucaaaagaaacugaugaguaauaacgugcagaucguccgccagcagucuuacuccauuaugugcauaaucaaggaggaaguuuuagccuaugugguacaacugccucucuacggagugauugacacgccauguuggaaacuucauacuagcccccugugcacaaccaauacuaaggagggcucgaacaucuguuugacacgaaccgaucguggcugguacugcgacaaugcugggucugucuccuuuuucccucaggccgaaacguguaaggugcagucaaacagaguguuuugcgauaccaugaauaguagaacacugccaagcgaggugaaccucugcaauauagacauuuucaaccccaaauaugauuguaagaucaugacuuccaaaaccgacgucucuagcucagugaucacaagucugggagcaauuguauccugcuacgguaagacuaaauguaccgcuagcaauaagugcaggggcaucauuaagacauuuucuaacgggugugauuauguuucaaauaaaggaguggacaccgucagugugggcaacacucuuuacuaugucaauaagcaagaggguaaaagccuguacgugaagggggaaccuauaaucaacuucuaugacccauugguuuuuccguccgaugaguucgacgccucuauuucgcagguuaacgagaaaaucaaucagagccucgcguuuauccggaaguccgaugaacuguuacacaacguaaaugucggaaagucaacgacaaacauuaugauaaccacuaucauuaucgugauuaucguuauacugcuacuccugaucgccgugggccuuuucuuguacugcaaagcacgcugaggacuaguacuggcugcaucucccuuuccucuguccuccauccuucucccaggauggugaagggggaccugguacccagugauccccaccccaggauccuaaaucaugacuuaccugcuaauaaaaacucauuggaaaagugagaagaucuaaaaaaaaaaaaaaaaaaaaaaaaaaaaaaaaaaaaaaaaaaaaaaaaaaaaaaaaaaaaaaaaugcaucccccccccccccccccccccccccccccccaaaggcucuuuucagagccaccagaauu

SEQ ID NO: 17346 - RNA, 1950 nt, Artificial Sequence
  mRNA product Design b-5 comprising derived and/or modified sequence from HRSV(Memphis-37)__AIY60640.1__F-del_DSCav1_mut5 (opt4)
gggagacuccugucgggcggaaguaggaggaguagaguuuaaaaacaguacucuuuuuccgguucgggacguaguugaagcaacgacaagccggauaaccgcucuugagacaggaagcuuaccauggagcugcccauccugaagaccaacgccaucaccaccauccuggccgccgugacccugugcuucgccagcagccagaacaucaccgaggaguucuaccagagcaccugcagcgccgugagcaagggcuaccugagcgcccugagaaccggcugguacaccagcgugaucaccaucgagcugagcaacaucaaggagaacaagugcaacggcaccgacgccaaggugaagcugaucaagcaggagcuggacaaguacaagaacgccgugaccgagcugcagcugcugaugcagagcacccccgccgccggcagcggcagcgccaucgccagcggcaucgccgugugcaaggugcugcaccuggagggcgaggugaacaagaucaagaacgcccugcugagcaccaacaaggccguggugagccugagcggcugcggcgugagcgugcugaccuucaaggugcuggaccugaagaacuacaucgacaagcagcugcugcccauccugaacaagcagagcugcagcaucagcaacaucgagaccgugaucgaguuccagcagaagaacaacagacugcuggagaucaccagagaguucagcgugaacgccggcgugaccacccccgugagcaccuacaugcugaccaacagcgagcugcugagccugaucaacgacaugcccaucaccaacgaccagaagaagcugaugagcaacaacgugcagaucgugagacagcagagcuacagcaucaugugcaucaucaaggaggaggugcuggccuacguggugcagcugccccuguacggcgugaucgacacccccugcuggaagcugcacaccagcccccugugcaccaccaacaccaaggagggcagcaacaucugccugaccagaaccgacagaggcugguacugcgacaacgccggcagcgugagcuucuucccccaggccgagaccugcaaggugcagagcaacagaguguucugcgacaccaugaacagcagaacccugcccagcgaggugaaccugugcaacaucgacaucuucaaccccaaguacgacugcaagaucaugaccagcaagaccgacgugagcagcagcgugaucaccagccugggcgccaucgugagcugcuacggcaagaccaagugcaccgccagcaacaagugcagaggcaucaucaagaccuucagcaacggcugcgacuacgugagcaacaagggcguggacaccgugagcgugggcaacacccuguacuacgugaacaagcaggagggcaagagccuguacgugaagggcgagcccaucaucaacuucuacgacccccugguguuccccagcgacgaguucgacgccagcaucagccaggugaacgagaagaucaaccagagccuggccuucaucagaaagagcgacgagcugcugcacaacgugaacgugggcaagagcaccaccaacaucaugaucaccaccaucaucaucgugaucaucgugauccugcugcugcugaucgccgugggccuguuccuguacugcaaggccagaugaggacuaguacuggcugcaucucccuuuccucuguccuccauccuucucccaggauggugaagggggaccugguacccagugauccccaccccaggauccuaaaucaugacuuaccugcuaauaaaaacucauuggaaaagugagaagaucuaaaaaaaaaaaaaaaaaaaaaaaaaaaaaaaaaaaaaaaaaaaaaaaaaaaaaaaaaaaaaaaaugcaucccccccccccccccccccccccccccccccaaaggcucuuuucagagccaccagaauu

SEQ ID NO: 17347 - RNA, 1950 nt, Artificial Sequence
  mRNA product Design b-5 comprising derived and/or modified sequence from HRSV(Memphis-37)__AIY60640.1__F-del_DSCav1_mut5 (opt5)
gggagacuccugucgggcggaaguaggaggaguagaguuuaaaaacaguacucuuuuuccgguucgggacguaguugaagcaacgacaagccggauaaccgcucuugagacaggaagcuuaccauggagcugcccauccucaagaccaacgccauuacaacgauccuggcugccgugacccuuugcuucgcgagcucccagaauauuacagaagaguuuuaccaaucuaccuguagcgcugucuccaaaggcuaucugucugcccucagaacagggugguacaccagcguuaucacaauugaacuguccaacaucaaggagaauaaaugcaacggaaccgacgccaaggugaaacuuaucaagcaggaacuggauaaguauaaaaaugcugugacggagcuccagcugcugaugcagucuaccccugccgcuggcagcggguccgccauugcgagcggaaucgccgucuguaaggugcuccaccuggagggcgaaguuaacaaaauuaagaaugcccuucugucuacaaacaaagcuguggucucccucagcgggugcggagugucuguucugaccuucaaggugcuugaccugaagaauuacaucgauaaacaacuccugccgauucugaacaagcaguccuguagcaucucuaauauugagacagucaucgaauuucagcagaaaaacaaucggcuccuggagaucacccgcgaguucuccgugaacgcuggcgugacgacacccgucagcaccuauaugcuuacaaauuccgaacugcucucucugauuaacgacaugccuaucaccaacgaucaaaagaaacuuaugagcaauaacguucagauugugagacagcaguccuacagcaucaugugcauuaucaaggaggaagugcuggccuaugucgugcaacucccccuguacggcguuaucgacaccccuuguuggaaacugcauacaucuccccucugcacgaccaauacaaaggagggguccaacauuugucugacccggacagaucgcggaugguacugcgacaaugcgggcagcgugagcuuuuucccucaggccgaaaccuguaagguccagucuaacagaguguuuugcgauacgaugaacuccagaacacugccgucugagguuaaucucugcaauaucgacauuuucaaccccaaauaugauuguaagaucaugaccagcaaaaccgacguguccagcucugucauuacaucccugggggcuaucgugagcugcuacggaaagaccaaauguacagccucuaauaagugccggggcaucauuaagacguuuuccaacgggugugauuaugucagcaauaaaggaguggacaccguuuccgugggcaacacacuuuacuaugucaauaagcaagagggcaaaucucuguacgugaagggggaaccuaucauuaacuucuaugacccccucguuuuuccuagcgaugaguucgacgcuuccaucucucaggugaacgagaaaauuaaucagagccuggccuuuauccgcaaguccgaugaacugcuccacaacgucaaugugggaaagagcaccacaaacauuaugaucaccacgaucauuaucgugauuaucguuauucugcuucugcucaucgccgucggccuguuccuguacugcaaagcuagaugaggacuaguacuggcugcaucucccuuuccucuguccuccauccuucucccaggauggugaagggggaccugguacccagugauccccaccccaggauccuaaaucaugacuuaccugcuaauaaaaacucauuggaaaagugagaagaucuaaaaaaaaaaaaaaaaaaaaaaaaaaaaaaaaaaaaaaaaaaaaaaaaaaaaaaaaaaaaaaaaugcaucccccccccccccccccccccccccccccccaaaggcucuuuucagagccaccagaauu

SEQ ID NO: 17348 - RNA, 1950 nt, Artificial Sequence
  mRNA product Design b-5 comprising derived and/or modified sequence from HRSV(Memphis-37)__AIY60640.1__F-del_DSCav1_mut5 (opt6)
gggagacuccugucgggcggaaguaggaggaguagaguuuaaaaacaguacucuuuuuccgguucgggacguaguugaagcaacgacaagccggauaaccgcucuugagacaggaagcuuaccauggaauuacccaucuuaaaaacaaaugcaauaacaacaauacuagcagccguaacauuaugcuucgccucaagccaaaacauaacagaagaauuuuaccaaagcacauguuccgccguaucaaaaggauaucucucagcacuacguacuggaugguauacauccguaaucacaauugaacuaucaaacauuaaagaaaacaaaugcaauggaacagaugcgaaaguaaaacuaauaaaacaagaauuagauaaauauaaaaaugcaguaaccgaacuacaacuacuaaugcaaucaacucccgcugccgguagcggauccgccauagcaagcggaauugcuguauguaaaguccuacaucuugaaggcgaagucaacaaaaucaaaaaugcauuacucucgaccaacaaagcagucguaucacuaucaggaugcggagucucaguauuaacuuuuaaaguccuugaccuaaaaaacuacauagacaaacaacuacuaccaauucuaaauaaacaaaguugcagcauauccaauaucgaaacaguuauagaauuucaacaaaaaaacaaccgccuacuagaaaucacuagagaauuuucaguaaaugcaggcguaaccacaccagucucuaccuauaugcuuaccaacucugaauuauuaucacuuauaaacgacaugcccauaacaaaugaucaaaaaaaacuaaugagcaacaacguacaaauaguaagacaacaaagcuacagcauuauguguauaauaaaagaagaaguguuagcuuauguaguccaacuaccccucuauggcguuaucgauacaccaugcuggaaauuacacacaagcccucuaugcacaacuaacaccaaagaaggcucuaacauaugcuuaacaagaacagauagaggaugguauugcgauaacgcaggaucaguaucauucuuuccacaagcagaaacauguaaaguacaaucuaaccgaguauucugcgacacaaugaacucuagaacacuacccucagaaguuaaucucuguaauauugacauuuucaauccaaaauacgauugcaaaauaaugaccucuaaaaccgacguaucauccucaguuauaacguccuuaggagcaaucguaagcugcuauggcaaaacaaaauguaccgcaucaaacaaaugcagaggaauaauaaaaacauucucaaacggcugugacuacguaagcaauaaagguguugacacaguuucaguaggaaauacacuauacuauguaaauaaacaagaaggaaaaucucucuauguaaaaggagaacccauaauaaacuucuacgacccacucguauuuccaagcgaugaauuugaugcgagcauuucccagguaaaugaaaaaauaaaucaaucacuagcauucaucagaaaaagugaugaauuacuacacaauguuaacguaggaaaaucaacaacaaauaucaugauaacaacaaucauaauagucauaaucguaauauuacuauuacuaauagcaguagguuuauuucuauacuguaaagcaagguaaggacuaguacuggcugcaucucccuuuccucuguccuccauccuucucccaggauggugaagggggaccugguacccagugauccccaccccaggauccuaaaucaugacuuaccugcuaauaaaaacucauuggaaaagugagaagaucuaaaaaaaaaaaaaaaaaaaaaaaaaaaaaaaaaaaaaaaaaaaaaaaaaaaaaaaaaaaaaaaaugcaucccccccccccccccccccccccccccccccaaaggcucuuuucagagccaccagaauu

SEQ ID NO: 17349 - RNA, 1950 nt, Artificial Sequence
  mRNA product Design b-5 comprising derived and/or modified sequence from HRSV(Memphis-37)__AIY60640.1__F-del_DSCav1_mut5 (opt11)
gggagacuccugucgggcggaaguaggaggaguagaguuuaaaaacaguacucuuuuuccgguucgggacguaguugaagcaacgacaagccggauaaccgcucuugagacaggaagcuuaccauggaacuucccauccuaaaaaccaacgccauaacaacaauccucgcagcagucacccucugcuucgccucuucacaaaacaucaccgaagaauuuuaccaaucaaccugcuccgccguguccaaaggcuaccucucagcacugcgcacaggaugguauaccagcguaaucaccaucgaacucuccaacaucaaggaaaacaaaugcaacggcaccgaugccaaagucaaacucaucaagcaagaacuugacaaauacaaaaacgccgugaccgagcuacaacuccucaugcaguccacuccagccgccggcuccggcagcgccaucgccuccggcaucgccguaugcaaaguccuccaccucgaaggcgaaguaaacaaaaucaagaacgcacuccuaagcaccaacaaagccgucgucucacucuccgguugcggcgucagcguccuaacauucaaaguucucgaccucaaaaacuacauagacaaacaacuccuccccauccucaacaaacaauccugcuccauaucaaacaucgaaaccguuaucgaauuucaacaaaaaaacaaccgccuccuagaaaucacccgcgaauuuuccgucaacgcaggcgucaccacccccguuuccaccuauaugcucaccaacuccgaacuccucucccucaucaacgacaugcccauuaccaacgaccaaaagaaacuuaugagcaacaacguucaaaucguccgacaacaaucauacuccaucaugugcauuaucaaagaagaaguacucgccuacguaguacaauuaccccucuacggcguaaucgacaccccaugcuggaaacuacacaccuccccccucuguaccaccaacaccaaagaaggcucuaacaucugccucacccgcacagaccguggcugguauugcgauaacgcagggucugucuccuucuucccccaagccgaaacaugcaaaguccaauccaacagagucuucugcgacaccaugaacucgagaacccuccccuccgaagucaaccuaugcaacaucgacaucuucaacccaaaauacgacugcaaaaucaugacuucaaaaacagacgugagcucguccgucaucacaagccuaggagcuaucguauccugcuacggaaaaacaaaaugcacugcuuccaacaaaugccgcggaaucauaaaaaccuucuccaacggcugcgacuacgucagcaacaaaggcgucgacacagucuccguaggcaacacccuauacuacgucaauaaacaagaaggcaagucccuauaugucaaaggcgagcccaucaucaauuucuaugauccccucguuuucccauccgacgaauuugacgcauccaucucccaagucaacgaaaaaauaaaccaaagccucgcauucauccgcaaauccgacgaacuccuccacaacguaaacguaggaaaauccacaacuaacaucaugaucaccaccaucaucaucgucauuaucgucauccuacuccuccucauagcagucggccucuuccucuacugcaaagcacgcuagggacuaguacuggcugcaucucccuuuccucuguccuccauccuucucccaggauggugaagggggaccugguacccagugauccccaccccaggauccuaaaucaugacuuaccugcuaauaaaaacucauuggaaaagugagaagaucuaaaaaaaaaaaaaaaaaaaaaaaaaaaaaaaaaaaaaaaaaaaaaaaaaaaaaaaaaaaaaaaaugcaucccccccccccccccccccccccccccccccaaaggcucuuuucagagccaccagaauu

SEQ ID NO: 17350 - RNA, 1856 nt, Artificial Sequence
  mRNA product Design c-1 comprising derived and/or modified sequence from HRSV(Memphis-37)__AIY60640.1__F-del_DSCav1_mut5 (opt1)
gggagaguccgcucagccagguugcagaagcggcuuagcguguguccuaaucuucucucugcguguagguaggccugugccgcaaacaagcuuaccauggagcugcccauccucaagaccaacgccaucaccacgauccuggccgcggugacccugugcuucgccagcucccagaacaucaccgaggaguucuaccagagcacgugcuccgccgucagcaagggcuaccucuccgcccugcgcaccgggugguacaccagcgugaucaccaucgagcuguccaacaucaaggagaacaagugcaacggcaccgacgccaaggugaagcucaucaagcaggagcuggacaaguacaagaacgcggucacggagcugcagcuccugaugcagagcaccccggccgccggcuccgggagcgcgaucgccuccggcaucgccgucugcaaggugcugcaccucgagggcgaggugaacaagaucaagaacgcccugcuguccaccaacaaggccgucgugagccucuccggcugcggggugagcguccugaccuucaaggugcuggaccucaagaacuacaucgacaagcagcugcugcccauccugaacaagcagagcugcuccaucagcaacaucgagaccgucaucgaguuccagcagaagaacaaccgccuccuggagaucacgcgggaguucagcgugaacgcgggcgugaccacccccgucuccaccuacaugcugacgaacagcgagcuccugucccugaucaacgacaugccgaucaccaacgaccagaagaagcucaugagcaacaacgugcagaucgugcgccagcaguccuacagcaucaugugcaucaucaaggaggagguccuggccuacguggugcagcugccccucuacggggucaucgacacccccugcuggaagcugcacaccagcccccugugcacgaccaacaccaaggagggcuccaacaucugccucacccggacggaccgcgggugguacugcgacaacgccggcagcguguccuucuucccgcaggccgagaccugcaagguccagagcaaccggguguucugcgacaccaugaacucccggacccugcccagcgaggugaaccucugcaacaucgacaucuucaaccccaaguacgacugcaagaucaugacguccaagaccgacgucagcuccagcgugaucaccucccugggcgccaucgugagcugcuacgggaagaccaagugcacggcgagcaacaagugccgcggcaucaucaagaccuucuccaacgggugcgacuacgucagcaacaagggcguggacaccguguccgucggcaacacccuguacuacgugaacaagcaggagggcaagagccucuacgugaagggggagcccaucaucaacuucuacgacccgcuggucuuccccuccgacgaguucgacgccagcaucucccaggugaacgagaagaucaaccagagccuggccuucauccggaaguccgacgagcuccugcacaacgugaacgucggcaagagcaccacgaacaucaugaucaccaccaucaucaucgugaucaucgugauccugcugcuccugaucgccgucgggcuguuccucuacugcaaggcccgcugaggacuaguguccaccugucccuccugggcugcuggauugucucguuuuccugccaaauaaacaggaucagcgcuuuacagaucuaaaaaaaaaaaaaaaaaaaaaaaaaaaaaaaaaaaaaaaaaaaaaaaaaaaaaaaaaaaaaaaaugcaucccccccccccccccccccccccccccccccaaaggcucuuuucagagccaccagaauu

SEQ ID NO: 17351 - RNA, 1856 nt, Artificial Sequence
  mRNA product Design c-1 comprising derived and/or modified sequence from HRSV(Memphis-37)__AIY60640.1__F-del_DSCav1_mut5 (opt1)
gggagaguccgcucagccagguugcagaagcggcuuagcguguguccuaaucuucucucugcguguagguaggccugugccgcaaacaagcuuaccauggagcugcccauccucaagaccaacgccaucaccacgauccuggccgcggugacccugugcuucgccagcucccagaacaucaccgaggaguucuaccagagcacgugcuccgccgucagcaagggcuaccucuccgcccugcgcaccgggugguacaccagcgugaucaccaucgagcuguccaacaucaaggagaacaagugcaacggcaccgacgccaaggugaagcucaucaagcaggagcuggacaaguacaagaacgcggucacggagcugcagcuccugaugcagagcaccccggccgccggguccggcagcgccaucgcguccgggaucgccgugugcaaggugcugcaccucgagggcgaggucaacaagaucaagaacgcccugcugagcaccaacaaggccguggugucccucagcggcugcggggucuccgugcugaccuucaaggugcuggaccucaagaacuacaucgacaagcagcugcugcccauccucaacaagcagagcugcuccaucagcaacaucgagacggucaucgaguuccagcagaagaacaaccggcugcuggagaucacccgcgaguucuccgugaacgccggcgugaccacccccgucagcacguacaugcucaccaacagcgagcugcugucccucaucaacgacaugcccaucaccaacgaccagaagaagcugaugagcaacaacgugcagaucgugcggcagcaguccuacagcaucaugugcaucaucaaggaggagguccuggcguacguggugcagcucccgcuguacggggucaucgacacccccugcuggaagcugcacacgagcccccucugcaccaccaacaccaaggagggcuccaacaucugccugacgcgcaccgaccgggggugguacugcgacaacgccggcuccgugagcuucuucccccaggccgagaccugcaaggugcaguccaaccgcgucuucugcgacaccaugaacagccggacgcucccguccgaggugaaccugugcaacaucgacaucuucaaccccaaguacgacugcaagaucaugaccagcaagaccgacgucuccagcuccgugaucaccagccugggcgccaucguguccugcuacgggaagacgaagugcaccgccagcaacaagugccggggcaucaucaagaccuucuccaacgggugcgacuacgucagcaacaagggcguggacaccgugagcgucggcaacacgcucuacuacgugaacaagcaggaggggaagucccuguacgugaagggcgagcccaucaucaacuucuacgacccccuggucuucccgagcgacgaguucgacgcguccaucagccaggugaacgagaagaucaaccagucccucgccuucauccgcaagagcgacgagcugcugcacaacgugaacgucgggaaguccaccaccaacaucaugaucaccaccaucaucaucgugaucaucgugauccuccugcugcucaucgccgucggccuguuccuguacugcaaggcccggugaggacuaguguccaccugucccuccugggcugcuggauugucucguuuuccugccaaauaaacaggaucagcgcuuuacagaucuaaaaaaaaaaaaaaaaaaaaaaaaaaaaaaaaaaaaaaaaaaaaaaaaaaaaaaaaaaaaaaaaugcaucccccccccccccccccccccccccccccccaaaggcucuuuucagagccaccagaauu

SEQ ID NO: 17352 - RNA, 1856 nt, Artificial Sequence
  mRNA product Design c-1 comprising derived and/or modified sequence from HRSV(Memphis-37)__AIY60640.1__F-del_DSCav1_mut5 (opt2)
gggagaguccgcucagccagguugcagaagcggcuuagcguguguccuaaucuucucucugcguguagguaggccugugccgcaaacaagcuuaccauggagcuccccauccucaagaccaacgccaucaccaccauccucgccgccgucacccucugcuucgccuccucccagaacaucaccgaggaguucuaccaguccaccugcuccgccgucuccaagggcuaccucuccgcccuccgcaccggcugguacaccuccgucaucaccaucgagcucuccaacaucaaggagaacaagugcaacggcaccgacgccaaggucaagcucaucaagcaggagcucgacaaguacaagaacgccgucaccgagcuccagcuccucaugcaguccacccccgccgccggcuccggcuccgccaucgccuccggcaucgccgucugcaagguccuccaccucgagggcgaggucaacaagaucaagaacgcccuccucuccaccaacaaggccgucgucucccucuccggcugcggcgucuccguccucaccuucaagguccucgaccucaagaacuacaucgacaagcagcuccuccccauccucaacaagcaguccugcuccaucuccaacaucgagaccgucaucgaguuccagcagaagaacaaccgccuccucgagaucacccgcgaguucuccgucaacgccggcgucaccacccccgucuccaccuacaugcucaccaacuccgagcuccucucccucaucaacgacaugcccaucaccaacgaccagaagaagcucauguccaacaacguccagaucguccgccagcaguccuacuccaucaugugcaucaucaaggaggagguccucgccuacgucguccagcucccccucuacggcgucaucgacacccccugcuggaagcuccacaccuccccccucugcaccaccaacaccaaggagggcuccaacaucugccucacccgcaccgaccgcggcugguacugcgacaacgccggcuccgucuccuucuucccccaggccgagaccugcaagguccaguccaaccgcgucuucugcgacaccaugaacucccgcacccuccccuccgaggucaaccucugcaacaucgacaucuucaaccccaaguacgacugcaagaucaugaccuccaagaccgacgucuccuccuccgucaucaccucccucggcgccaucgucuccugcuacggcaagaccaagugcaccgccuccaacaagugccgcggcaucaucaagaccuucuccaacggcugcgacuacgucuccaacaagggcgucgacaccgucuccgucggcaacacccucuacuacgucaacaagcaggagggcaagucccucuacgucaagggcgagcccaucaucaacuucuacgacccccucgucuuccccuccgacgaguucgacgccuccaucucccaggucaacgagaagaucaaccagucccucgccuucauccgcaaguccgacgagcuccuccacaacgucaacgucggcaaguccaccaccaacaucaugaucaccaccaucaucaucgucaucaucgucauccuccuccuccucaucgccgucggccucuuccucuacugcaaggcccgcugaggacuaguguccaccugucccuccugggcugcuggauugucucguuuuccugccaaauaaacaggaucagcgcuuuacagaucuaaaaaaaaaaaaaaaaaaaaaaaaaaaaaaaaaaaaaaaaaaaaaaaaaaaaaaaaaaaaaaaaugcaucccccccccccccccccccccccccccccccaaaggcucuuuucagagccaccagaauu

SEQ ID NO: 17353 - RNA, 1856 nt, Artificial Sequence
  mRNA product Design c-1 comprising derived and/or modified sequence from HRSV(Memphis-37)__AIY60640.1__F-del_DSCav1_mut5 (opt3)
gggagaguccgcucagccagguugcagaagcggcuuagcguguguccuaaucuucucucugcguguagguaggccugugccgcaaacaagcuuaccauggagcugcccauccucaagaccaacgccauuacaacuauacuugcugcagugacgcugugcuucgccagcucccagaauaucaccgaagaguuuuaccaaucuacauguucagcggucaguaaaggcuauuugagcgcuuuaagaacugggugguacaccuccguuauuacaaucgaacugucuaacauuaaggagaauaaaugcaacggaaccgacgccaaggugaaacuaaucaagcaggaacucgauaaguauaaaaaugcaguaacugagcugcagcuucugaugcagucgaccccugccgcugguucaggcagcgcaauagccagugggaucgcuguguguaaggucuugcaccucgagggagaagugaacaaaauuaagaaugcccugcuguccacaaacaaagcgguugugucucucagcggcugcggugucuccguguuaacguucaagguacuggaccuuaagaauuacaucgauaaacaauugcugccaauucuaaacaagcagucauguaguaucagcaauauagagacuguuauugaauuucagcagaaaaacaauaggcuccuggagaucacccgggaguucucugugaacgcaggggucacaacuccgguguccaccuauaugcuuacaaauucagaacuguugagccucauuaacgacaugcccaucaccaacgaucaaaagaaacugaugaguaauaacgugcagaucguccgccagcagucuuacuccauuaugugcauaaucaaggaggaaguuuuagccuaugugguacaacugccucucuacggagugauugacacgccauguuggaaacuucauacuagcccccugugcacaaccaauacuaaggagggcucgaacaucuguuugacacgaaccgaucguggcugguacugcgacaaugcugggucugucuccuuuuucccucaggccgaaacguguaaggugcagucaaacagaguguuuugcgauaccaugaauaguagaacacugccaagcgaggugaaccucugcaauauagacauuuucaaccccaaauaugauuguaagaucaugacuuccaaaaccgacgucucuagcucagugaucacaagucugggagcaauuguauccugcuacgguaagacuaaauguaccgcuagcaauaagugcaggggcaucauuaagacauuuucuaacgggugugauuauguuucaaauaaaggaguggacaccgucagugugggcaacacucuuuacuaugucaauaagcaagaggguaaaagccuguacgugaagggggaaccuauaaucaacuucuaugacccauugguuuuuccguccgaugaguucgacgccucuauuucgcagguuaacgagaaaaucaaucagagccucgcguuuauccggaaguccgaugaacuguuacacaacguaaaugucggaaagucaacgacaaacauuaugauaaccacuaucauuaucgugauuaucguuauacugcuacuccugaucgccgugggccuuuucuuguacugcaaagcacgcugaggacuaguguccaccugucccuccugggcugcuggauugucucguuuuccugccaaauaaacaggaucagcgcuuuacagaucuaaaaaaaaaaaaaaaaaaaaaaaaaaaaaaaaaaaaaaaaaaaaaaaaaaaaaaaaaaaaaaaaugcaucccccccccccccccccccccccccccccccaaaggcucuuuucagagccaccagaauu

SEQ ID NO: 17354 - RNA, 1856 nt, Artificial Sequence
  mRNA product Design c-1 comprising derived and/or modified sequence from HRSV(Memphis-37)__AIY60640.1__F-del_DSCav1_mut5 (opt4)
gggagaguccgcucagccagguugcagaagcggcuuagcguguguccuaaucuucucucugcguguagguaggccugugccgcaaacaagcuuaccauggagcugcccauccugaagaccaacgccaucaccaccauccuggccgccgugacccugugcuucgccagcagccagaacaucaccgaggaguucuaccagagcaccugcagcgccgugagcaagggcuaccugagcgcccugagaaccggcugguacaccagcgugaucaccaucgagcugagcaacaucaaggagaacaagugcaacggcaccgacgccaaggugaagcugaucaagcaggagcuggacaaguacaagaacgccgugaccgagcugcagcugcugaugcagagcacccccgccgccggcagcggcagcgccaucgccagcggcaucgccgugugcaaggugcugcaccuggagggcgaggugaacaagaucaagaacgcccugcugagcaccaacaaggccguggugagccugagcggcugcggcgugagcgugcugaccuucaaggugcuggaccugaagaacuacaucgacaagcagcugcugcccauccugaacaagcagagcugcagcaucagcaacaucgagaccgugaucgaguuccagcagaagaacaacagacugcuggagaucaccagagaguucagcgugaacgccggcgugaccacccccgugagcaccuacaugcugaccaacagcgagcugcugagccugaucaacgacaugcccaucaccaacgaccagaagaagcugaugagcaacaacgugcagaucgugagacagcagagcuacagcaucaugugcaucaucaaggaggaggugcuggccuacguggugcagcugccccuguacggcgugaucgacacccccugcuggaagcugcacaccagcccccugugcaccaccaacaccaaggagggcagcaacaucugccugaccagaaccgacagaggcugguacugcgacaacgccggcagcgugagcuucuucccccaggccgagaccugcaaggugcagagcaacagaguguucugcgacaccaugaacagcagaacccugcccagcgaggugaaccugugcaacaucgacaucuucaaccccaaguacgacugcaagaucaugaccagcaagaccgacgugagcagcagcgugaucaccagccugggcgccaucgugagcugcuacggcaagaccaagugcaccgccagcaacaagugcagaggcaucaucaagaccuucagcaacggcugcgacuacgugagcaacaagggcguggacaccgugagcgugggcaacacccuguacuacgugaacaagcaggagggcaagagccuguacgugaagggcgagcccaucaucaacuucuacgacccccugguguuccccagcgacgaguucgacgccagcaucagccaggugaacgagaagaucaaccagagccuggccuucaucagaaagagcgacgagcugcugcacaacgugaacgugggcaagagcaccaccaacaucaugaucaccaccaucaucaucgugaucaucgugauccugcugcugcugaucgccgugggccuguuccuguacugcaaggccagaugaggacuaguguccaccugucccuccugggcugcuggauugucucguuuuccugccaaauaaacaggaucagcgcuuuacagaucuaaaaaaaaaaaaaaaaaaaaaaaaaaaaaaaaaaaaaaaaaaaaaaaaaaaaaaaaaaaaaaaaugcaucccccccccccccccccccccccccccccccaaaggcucuuuucagagccaccagaauu

SEQ ID NO: 17355 - RNA, 1856 nt, Artificial Sequence
  mRNA product Design c-1 comprising derived and/or modified sequence from HRSV(Memphis-37)__AIY60640.1__F-del_DSCav1_mut5 (opt5)
gggagaguccgcucagccagguugcagaagcggcuuagcguguguccuaaucuucucucugcguguagguaggccugugccgcaaacaagcuuaccauggagcugcccauccucaagaccaacgccauuacaacgauccuggcugccgugacccuuugcuucgcgagcucccagaauauuacagaagaguuuuaccaaucuaccuguagcgcugucuccaaaggcuaucugucugcccucagaacagggugguacaccagcguuaucacaauugaacuguccaacaucaaggagaauaaaugcaacggaaccgacgccaaggugaaacuuaucaagcaggaacuggauaaguauaaaaaugcugugacggagcuccagcugcugaugcagucuaccccugccgcuggcagcggguccgccauugcgagcggaaucgccgucuguaaggugcuccaccuggagggcgaaguuaacaaaauuaagaaugcccuucugucuacaaacaaagcuguggucucccucagcgggugcggagugucuguucugaccuucaaggugcuugaccugaagaauuacaucgauaaacaacuccugccgauucugaacaagcaguccuguagcaucucuaauauugagacagucaucgaauuucagcagaaaaacaaucggcuccuggagaucacccgcgaguucuccgugaacgcuggcgugacgacacccgucagcaccuauaugcuuacaaauuccgaacugcucucucugauuaacgacaugccuaucaccaacgaucaaaagaaacuuaugagcaauaacguucagauugugagacagcaguccuacagcaucaugugcauuaucaaggaggaagugcuggccuaugucgugcaacucccccuguacggcguuaucgacaccccuuguuggaaacugcauacaucuccccucugcacgaccaauacaaaggagggguccaacauuugucugacccggacagaucgcggaugguacugcgacaaugcgggcagcgugagcuuuuucccucaggccgaaaccuguaagguccagucuaacagaguguuuugcgauacgaugaacuccagaacacugccgucugagguuaaucucugcaauaucgacauuuucaaccccaaauaugauuguaagaucaugaccagcaaaaccgacguguccagcucugucauuacaucccugggggcuaucgugagcugcuacggaaagaccaaauguacagccucuaauaagugccggggcaucauuaagacguuuuccaacgggugugauuaugucagcaauaaaggaguggacaccguuuccgugggcaacacacuuuacuaugucaauaagcaagagggcaaaucucuguacgugaagggggaaccuaucauuaacuucuaugacccccucguuuuuccuagcgaugaguucgacgcuuccaucucucaggugaacgagaaaauuaaucagagccuggccuuuauccgcaaguccgaugaacugcuccacaacgucaaugugggaaagagcaccacaaacauuaugaucaccacgaucauuaucgugauuaucguuauucugcuucugcucaucgccgucggccuguuccuguacugcaaagcuagaugaggacuaguguccaccugucccuccugggcugcuggauugucucguuuuccugccaaauaaacaggaucagcgcuuuacagaucuaaaaaaaaaaaaaaaaaaaaaaaaaaaaaaaaaaaaaaaaaaaaaaaaaaaaaaaaaaaaaaaaugcaucccccccccccccccccccccccccccccccaaaggcucuuuucagagccaccagaauu

SEQ ID NO: 17356 - RNA, 1856 nt, Artificial Sequence
  mRNA product Design c-1 comprising derived and/or modified sequence from HRSV(Memphis-37)__AIY60640.1__F-del_DSCav1_mut5 (opt6)
gggagaguccgcucagccagguugcagaagcggcuuagcguguguccuaaucuucucucugcguguagguaggccugugccgcaaacaagcuuaccauggaauuacccaucuuaaaaacaaaugcaauaacaacaauacuagcagccguaacauuaugcuucgccucaagccaaaacauaacagaagaauuuuaccaaagcacauguuccgccguaucaaaaggauaucucucagcacuacguacuggaugguauacauccguaaucacaauugaacuaucaaacauuaaagaaaacaaaugcaauggaacagaugcgaaaguaaaacuaauaaaacaagaauuagauaaauauaaaaaugcaguaaccgaacuacaacuacuaaugcaaucaacucccgcugccgguagcggauccgccauagcaagcggaauugcuguauguaaaguccuacaucuugaaggcgaagucaacaaaaucaaaaaugcauuacucucgaccaacaaagcagucguaucacuaucaggaugcggagucucaguauuaacuuuuaaaguccuugaccuaaaaaacuacauagacaaacaacuacuaccaauucuaaauaaacaaaguugcagcauauccaauaucgaaacaguuauagaauuucaacaaaaaaacaaccgccuacuagaaaucacuagagaauuuucaguaaaugcaggcguaaccacaccagucucuaccuauaugcuuaccaacucugaauuauuaucacuuauaaacgacaugcccauaacaaaugaucaaaaaaaacuaaugagcaacaacguacaaauaguaagacaacaaagcuacagcauuauguguauaauaaaagaagaaguguuagcuuauguaguccaacuaccccucuauggcguuaucgauacaccaugcuggaaauuacacacaagcccucuaugcacaacuaacaccaaagaaggcucuaacauaugcuuaacaagaacagauagaggaugguauugcgauaacgcaggaucaguaucauucuuuccacaagcagaaacauguaaaguacaaucuaaccgaguauucugcgacacaaugaacucuagaacacuacccucagaaguuaaucucuguaauauugacauuuucaauccaaaauacgauugcaaaauaaugaccucuaaaaccgacguaucauccucaguuauaacguccuuaggagcaaucguaagcugcuauggcaaaacaaaauguaccgcaucaaacaaaugcagaggaauaauaaaaacauucucaaacggcugugacuacguaagcaauaaagguguugacacaguuucaguaggaaauacacuauacuauguaaauaaacaagaaggaaaaucucucuauguaaaaggagaacccauaauaaacuucuacgacccacucguauuuccaagcgaugaauuugaugcgagcauuucccagguaaaugaaaaaauaaaucaaucacuagcauucaucagaaaaagugaugaauuacuacacaauguuaacguaggaaaaucaacaacaaauaucaugauaacaacaaucauaauagucauaaucguaauauuacuauuacuaauagcaguagguuuauuucuauacuguaaagcaagguaaggacuaguguccaccugucccuccugggcugcuggauugucucguuuuccugccaaauaaacaggaucagcgcuuuacagaucuaaaaaaaaaaaaaaaaaaaaaaaaaaaaaaaaaaaaaaaaaaaaaaaaaaaaaaaaaaaaaaaaugcaucccccccccccccccccccccccccccccccaaaggcucuuuucagagccaccagaauu

SEQ ID NO: 17357 - RNA, 1856 nt, Artificial Sequence
  mRNA product Design c-1 comprising derived and/or modified sequence from HRSV(Memphis-37)__AIY60640.1__F-del_DSCav1_mut5 (opt11)
gggagaguccgcucagccagguugcagaagcggcuuagcguguguccuaaucuucucucugcguguagguaggccugugccgcaaacaagcuuaccauggaacuucccauccuaaaaaccaacgccauaacaacaauccucgcagcagucacccucugcuucgccucuucacaaaacaucaccgaagaauuuuaccaaucaaccugcuccgccguguccaaaggcuaccucucagcacugcgcacaggaugguauaccagcguaaucaccaucgaacucuccaacaucaaggaaaacaaaugcaacggcaccgaugccaaagucaaacucaucaagcaagaacuugacaaauacaaaaacgccgugaccgagcuacaacuccucaugcaguccacuccagccgccggcuccggcagcgccaucgccuccggcaucgccguaugcaaaguccuccaccucgaaggcgaaguaaacaaaaucaagaacgcacuccuaagcaccaacaaagccgucgucucacucuccgguugcggcgucagcguccuaacauucaaaguucucgaccucaaaaacuacauagacaaacaacuccuccccauccucaacaaacaauccugcuccauaucaaacaucgaaaccguuaucgaauuucaacaaaaaaacaaccgccuccuagaaaucacccgcgaauuuuccgucaacgcaggcgucaccacccccguuuccaccuauaugcucaccaacuccgaacuccucucccucaucaacgacaugcccauuaccaacgaccaaaagaaacuuaugagcaacaacguucaaaucguccgacaacaaucauacuccaucaugugcauuaucaaagaagaaguacucgccuacguaguacaauuaccccucuacggcguaaucgacaccccaugcuggaaacuacacaccuccccccucuguaccaccaacaccaaagaaggcucuaacaucugccucacccgcacagaccguggcugguauugcgauaacgcagggucugucuccuucuucccccaagccgaaacaugcaaaguccaauccaacagagucuucugcgacaccaugaacucgagaacccuccccuccgaagucaaccuaugcaacaucgacaucuucaacccaaaauacgacugcaaaaucaugacuucaaaaacagacgugagcucguccgucaucacaagccuaggagcuaucguauccugcuacggaaaaacaaaaugcacugcuuccaacaaaugccgcggaaucauaaaaaccuucuccaacggcugcgacuacgucagcaacaaaggcgucgacacagucuccguaggcaacacccuauacuacgucaauaaacaagaaggcaagucccuauaugucaaaggcgagcccaucaucaauuucuaugauccccucguuuucccauccgacgaauuugacgcauccaucucccaagucaacgaaaaaauaaaccaaagccucgcauucauccgcaaauccgacgaacuccuccacaacguaaacguaggaaaauccacaacuaacaucaugaucaccaccaucaucaucgucauuaucgucauccuacuccuccucauagcagucggccucuuccucuacugcaaagcacgcuagggacuaguguccaccugucccuccugggcugcuggauugucucguuuuccugccaaauaaacaggaucagcgcuuuacagaucuaaaaaaaaaaaaaaaaaaaaaaaaaaaaaaaaaaaaaaaaaaaaaaaaaaaaaaaaaaaaaaaaugcaucccccccccccccccccccccccccccccccaaaggcucuuuucagagccaccagaauu

SEQ ID NO: 17358 - RNA, 1946 nt, Artificial Sequence
  mRNA product Design c-2 comprising derived and/or modified sequence from HRSV(Memphis-37)__AIY60640.1__F-del_DSCav1_mut5 (opt1)
gggagacuccugucgggcggaaguaggaggaguagaguuuaaaaacaguacucuuuuuccgguucgggacguaguugaagcaacgacaagccggauaaccgcucuugagacaggaagcuuaccauggagcugcccauccucaagaccaacgccaucaccacgauccuggccgcggugacccugugcuucgccagcucccagaacaucaccgaggaguucuaccagagcacgugcuccgccgucagcaagggcuaccucuccgcccugcgcaccgggugguacaccagcgugaucaccaucgagcuguccaacaucaaggagaacaagugcaacggcaccgacgccaaggugaagcucaucaagcaggagcuggacaaguacaagaacgcggucacggagcugcagcuccugaugcagagcaccccggccgccggcuccgggagcgcgaucgccuccggcaucgccgucugcaaggugcugcaccucgagggcgaggugaacaagaucaagaacgcccugcuguccaccaacaaggccgucgugagccucuccggcugcggggugagcguccugaccuucaaggugcuggaccucaagaacuacaucgacaagcagcugcugcccauccugaacaagcagagcugcuccaucagcaacaucgagaccgucaucgaguuccagcagaagaacaaccgccuccuggagaucacgcgggaguucagcgugaacgcgggcgugaccacccccgucuccaccuacaugcugacgaacagcgagcuccugucccugaucaacgacaugccgaucaccaacgaccagaagaagcucaugagcaacaacgugcagaucgugcgccagcaguccuacagcaucaugugcaucaucaaggaggagguccuggccuacguggugcagcugccccucuacggggucaucgacacccccugcuggaagcugcacaccagcccccugugcacgaccaacaccaaggagggcuccaacaucugccucacccggacggaccgcgggugguacugcgacaacgccggcagcguguccuucuucccgcaggccgagaccugcaagguccagagcaaccggguguucugcgacaccaugaacucccggacccugcccagcgaggugaaccucugcaacaucgacaucuucaaccccaaguacgacugcaagaucaugacguccaagaccgacgucagcuccagcgugaucaccucccugggcgccaucgugagcugcuacgggaagaccaagugcacggcgagcaacaagugccgcggcaucaucaagaccuucuccaacgggugcgacuacgucagcaacaagggcguggacaccguguccgucggcaacacccuguacuacgugaacaagcaggagggcaagagccucuacgugaagggggagcccaucaucaacuucuacgacccgcuggucuuccccuccgacgaguucgacgccagcaucucccaggugaacgagaagaucaaccagagccuggccuucauccggaaguccgacgagcuccugcacaacgugaacgucggcaagagcaccacgaacaucaugaucaccaccaucaucaucgugaucaucgugauccugcugcuccugaucgccgucgggcuguuccucuacugcaaggcccgcugaggacuaguggaagcauuuuccuggcugauuaaaagaaauuacucagcuauggucaucuguuccuguuagaaggcuaugcagcauauuauauacuaugcgcauguuaugaaaugcauaauaaaaaauuuuaaaaaaucuaaaagaucuaaaaaaaaaaaaaaaaaaaaaaaaaaaaaaaaaaaaaaaaaaaaaaaaaaaaaaaaaaaaaaaaugcaucccccccccccccccccccccccccccccccaaaggcucuuuucagagccaccagaauu

SEQ ID NO: 17359 - RNA, 1946 nt, Artificial Sequence
  mRNA product Design c-2 comprising derived and/or modified sequence from HRSV(Memphis-37)__AIY60640.1__F-del_DSCav1_mut5 (opt1)
gggagacuccugucgggcggaaguaggaggaguagaguuuaaaaacaguacucuuuuuccgguucgggacguaguugaagcaacgacaagccggauaaccgcucuugagacaggaagcuuaccauggagcugcccauccucaagaccaacgccaucaccacgauccuggccgcggugacccugugcuucgccagcucccagaacaucaccgaggaguucuaccagagcacgugcuccgccgucagcaagggcuaccucuccgcccugcgcaccgggugguacaccagcgugaucaccaucgagcuguccaacaucaaggagaacaagugcaacggcaccgacgccaaggugaagcucaucaagcaggagcuggacaaguacaagaacgcggucacggagcugcagcuccugaugcagagcaccccggccgccggguccggcagcgccaucgcguccgggaucgccgugugcaaggugcugcaccucgagggcgaggucaacaagaucaagaacgcccugcugagcaccaacaaggccguggugucccucagcggcugcggggucuccgugcugaccuucaaggugcuggaccucaagaacuacaucgacaagcagcugcugcccauccucaacaagcagagcugcuccaucagcaacaucgagacggucaucgaguuccagcagaagaacaaccggcugcuggagaucacccgcgaguucuccgugaacgccggcgugaccacccccgucagcacguacaugcucaccaacagcgagcugcugucccucaucaacgacaugcccaucaccaacgaccagaagaagcugaugagcaacaacgugcagaucgugcggcagcaguccuacagcaucaugugcaucaucaaggaggagguccuggcguacguggugcagcucccgcuguacggggucaucgacacccccugcuggaagcugcacacgagcccccucugcaccaccaacaccaaggagggcuccaacaucugccugacgcgcaccgaccgggggugguacugcgacaacgccggcuccgugagcuucuucccccaggccgagaccugcaaggugcaguccaaccgcgucuucugcgacaccaugaacagccggacgcucccguccgaggugaaccugugcaacaucgacaucuucaaccccaaguacgacugcaagaucaugaccagcaagaccgacgucuccagcuccgugaucaccagccugggcgccaucguguccugcuacgggaagacgaagugcaccgccagcaacaagugccggggcaucaucaagaccuucuccaacgggugcgacuacgucagcaacaagggcguggacaccgugagcgucggcaacacgcucuacuacgugaacaagcaggaggggaagucccuguacgugaagggcgagcccaucaucaacuucuacgacccccuggucuucccgagcgacgaguucgacgcguccaucagccaggugaacgagaagaucaaccagucccucgccuucauccgcaagagcgacgagcugcugcacaacgugaacgucgggaaguccaccaccaacaucaugaucaccaccaucaucaucgugaucaucgugauccuccugcugcucaucgccgucggccuguuccuguacugcaaggcccggugaggacuaguggaagcauuuuccuggcugauuaaaagaaauuacucagcuauggucaucuguuccuguuagaaggcuaugcagcauauuauauacuaugcgcauguuaugaaaugcauaauaaaaaauuuuaaaaaaucuaaaagaucuaaaaaaaaaaaaaaaaaaaaaaaaaaaaaaaaaaaaaaaaaaaaaaaaaaaaaaaaaaaaaaaaugcaucccccccccccccccccccccccccccccccaaaggcucuuuucagagccaccagaauu

SEQ ID NO: 17360 - RNA, 1946 nt, Artificial Sequence
  mRNA product Design c-2 comprising derived and/or modified sequence from HRSV(Memphis-37)__AIY60640.1__F-del_DSCav1_mut5 (opt2)
gggagacuccugucgggcggaaguaggaggaguagaguuuaaaaacaguacucuuuuuccgguucgggacguaguugaagcaacgacaagccggauaaccgcucuugagacaggaagcuuaccauggagcuccccauccucaagaccaacgccaucaccaccauccucgccgccgucacccucugcuucgccuccucccagaacaucaccgaggaguucuaccaguccaccugcuccgccgucuccaagggcuaccucuccgcccuccgcaccggcugguacaccuccgucaucaccaucgagcucuccaacaucaaggagaacaagugcaacggcaccgacgccaaggucaagcucaucaagcaggagcucgacaaguacaagaacgccgucaccgagcuccagcuccucaugcaguccacccccgccgccggcuccggcuccgccaucgccuccggcaucgccgucugcaagguccuccaccucgagggcgaggucaacaagaucaagaacgcccuccucuccaccaacaaggccgucgucucccucuccggcugcggcgucuccguccucaccuucaagguccucgaccucaagaacuacaucgacaagcagcuccuccccauccucaacaagcaguccugcuccaucuccaacaucgagaccgucaucgaguuccagcagaagaacaaccgccuccucgagaucacccgcgaguucuccgucaacgccggcgucaccacccccgucuccaccuacaugcucaccaacuccgagcuccucucccucaucaacgacaugcccaucaccaacgaccagaagaagcucauguccaacaacguccagaucguccgccagcaguccuacuccaucaugugcaucaucaaggaggagguccucgccuacgucguccagcucccccucuacggcgucaucgacacccccugcuggaagcuccacaccuccccccucugcaccaccaacaccaaggagggcuccaacaucugccucacccgcaccgaccgcggcugguacugcgacaacgccggcuccgucuccuucuucccccaggccgagaccugcaagguccaguccaaccgcgucuucugcgacaccaugaacucccgcacccuccccuccgaggucaaccucugcaacaucgacaucuucaaccccaaguacgacugcaagaucaugaccuccaagaccgacgucuccuccuccgucaucaccucccucggcgccaucgucuccugcuacggcaagaccaagugcaccgccuccaacaagugccgcggcaucaucaagaccuucuccaacggcugcgacuacgucuccaacaagggcgucgacaccgucuccgucggcaacacccucuacuacgucaacaagcaggagggcaagucccucuacgucaagggcgagcccaucaucaacuucuacgacccccucgucuuccccuccgacgaguucgacgccuccaucucccaggucaacgagaagaucaaccagucccucgccuucauccgcaaguccgacgagcuccuccacaacgucaacgucggcaaguccaccaccaacaucaugaucaccaccaucaucaucgucaucaucgucauccuccuccuccucaucgccgucggccucuuccucuacugcaaggcccgcugaggacuaguggaagcauuuuccuggcugauuaaaagaaauuacucagcuauggucaucuguuccuguuagaaggcuaugcagcauauuauauacuaugcgcauguuaugaaaugcauaauaaaaaauuuuaaaaaaucuaaaagaucuaaaaaaaaaaaaaaaaaaaaaaaaaaaaaaaaaaaaaaaaaaaaaaaaaaaaaaaaaaaaaaaaugcaucccccccccccccccccccccccccccccccaaaggcucuuuucagagccaccagaauu

SEQ ID NO: 17361 - RNA, 1946 nt, Artificial Sequence
  mRNA product Design c-2 comprising derived and/or modified sequence from HRSV(Memphis-37)__AIY60640.1__F-del_DSCav1_mut5 (opt3)
gggagacuccugucgggcggaaguaggaggaguagaguuuaaaaacaguacucuuuuuccgguucgggacguaguugaagcaacgacaagccggauaaccgcucuugagacaggaagcuuaccauggagcugcccauccucaagaccaacgccauuacaacuauacuugcugcagugacgcugugcuucgccagcucccagaauaucaccgaagaguuuuaccaaucuacauguucagcggucaguaaaggcuauuugagcgcuuuaagaacugggugguacaccuccguuauuacaaucgaacugucuaacauuaaggagaauaaaugcaacggaaccgacgccaaggugaaacuaaucaagcaggaacucgauaaguauaaaaaugcaguaacugagcugcagcuucugaugcagucgaccccugccgcugguucaggcagcgcaauagccagugggaucgcuguguguaaggucuugcaccucgagggagaagugaacaaaauuaagaaugcccugcuguccacaaacaaagcgguugugucucucagcggcugcggugucuccguguuaacguucaagguacuggaccuuaagaauuacaucgauaaacaauugcugccaauucuaaacaagcagucauguaguaucagcaauauagagacuguuauugaauuucagcagaaaaacaauaggcuccuggagaucacccgggaguucucugugaacgcaggggucacaacuccgguguccaccuauaugcuuacaaauucagaacuguugagccucauuaacgacaugcccaucaccaacgaucaaaagaaacugaugaguaauaacgugcagaucguccgccagcagucuuacuccauuaugugcauaaucaaggaggaaguuuuagccuaugugguacaacugccucucuacggagugauugacacgccauguuggaaacuucauacuagcccccugugcacaaccaauacuaaggagggcucgaacaucuguuugacacgaaccgaucguggcugguacugcgacaaugcugggucugucuccuuuuucccucaggccgaaacguguaaggugcagucaaacagaguguuuugcgauaccaugaauaguagaacacugccaagcgaggugaaccucugcaauauagacauuuucaaccccaaauaugauuguaagaucaugacuuccaaaaccgacgucucuagcucagugaucacaagucugggagcaauuguauccugcuacgguaagacuaaauguaccgcuagcaauaagugcaggggcaucauuaagacauuuucuaacgggugugauuauguuucaaauaaaggaguggacaccgucagugugggcaacacucuuuacuaugucaauaagcaagaggguaaaagccuguacgugaagggggaaccuauaaucaacuucuaugacccauugguuuuuccguccgaugaguucgacgccucuauuucgcagguuaacgagaaaaucaaucagagccucgcguuuauccggaaguccgaugaacuguuacacaacguaaaugucggaaagucaacgacaaacauuaugauaaccacuaucauuaucgugauuaucguuauacugcuacuccugaucgccgugggccuuuucuuguacugcaaagcacgcugaggacuaguggaagcauuuuccuggcugauuaaaagaaauuacucagcuauggucaucuguuccuguuagaaggcuaugcagcauauuauauacuaugcgcauguuaugaaaugcauaauaaaaaauuuuaaaaaaucuaaaagaucuaaaaaaaaaaaaaaaaaaaaaaaaaaaaaaaaaaaaaaaaaaaaaaaaaaaaaaaaaaaaaaaaugcaucccccccccccccccccccccccccccccccaaaggcucuuuucagagccaccagaauu

SEQ ID NO: 17362 - RNA, 1946 nt, Artificial Sequence
  mRNA product Design c-2 comprising derived and/or modified sequence from HRSV(Memphis-37)__AIY60640.1__F-del_DSCav1_mut5 (opt4)
gggagacuccugucgggcggaaguaggaggaguagaguuuaaaaacaguacucuuuuuccgguucgggacguaguugaagcaacgacaagccggauaaccgcucuugagacaggaagcuuaccauggagcugcccauccugaagaccaacgccaucaccaccauccuggccgccgugacccugugcuucgccagcagccagaacaucaccgaggaguucuaccagagcaccugcagcgccgugagcaagggcuaccugagcgcccugagaaccggcugguacaccagcgugaucaccaucgagcugagcaacaucaaggagaacaagugcaacggcaccgacgccaaggugaagcugaucaagcaggagcuggacaaguacaagaacgccgugaccgagcugcagcugcugaugcagagcacccccgccgccggcagcggcagcgccaucgccagcggcaucgccgugugcaaggugcugcaccuggagggcgaggugaacaagaucaagaacgcccugcugagcaccaacaaggccguggugagccugagcggcugcggcgugagcgugcugaccuucaaggugcuggaccugaagaacuacaucgacaagcagcugcugcccauccugaacaagcagagcugcagcaucagcaacaucgagaccgugaucgaguuccagcagaagaacaacagacugcuggagaucaccagagaguucagcgugaacgccggcgugaccacccccgugagcaccuacaugcugaccaacagcgagcugcugagccugaucaacgacaugcccaucaccaacgaccagaagaagcugaugagcaacaacgugcagaucgugagacagcagagcuacagcaucaugugcaucaucaaggaggaggugcuggccuacguggugcagcugccccuguacggcgugaucgacacccccugcuggaagcugcacaccagcccccugugcaccaccaacaccaaggagggcagcaacaucugccugaccagaaccgacagaggcugguacugcgacaacgccggcagcgugagcuucuucccccaggccgagaccugcaaggugcagagcaacagaguguucugcgacaccaugaacagcagaacccugcccagcgaggugaaccugugcaacaucgacaucuucaaccccaaguacgacugcaagaucaugaccagcaagaccgacgugagcagcagcgugaucaccagccugggcgccaucgugagcugcuacggcaagaccaagugcaccgccagcaacaagugcagaggcaucaucaagaccuucagcaacggcugcgacuacgugagcaacaagggcguggacaccgugagcgugggcaacacccuguacuacgugaacaagcaggagggcaagagccuguacgugaagggcgagcccaucaucaacuucuacgacccccugguguuccccagcgacgaguucgacgccagcaucagccaggugaacgagaagaucaaccagagccuggccuucaucagaaagagcgacgagcugcugcacaacgugaacgugggcaagagcaccaccaacaucaugaucaccaccaucaucaucgugaucaucgugauccugcugcugcugaucgccgugggccuguuccuguacugcaaggccagaugaggacuaguggaagcauuuuccuggcugauuaaaagaaauuacucagcuauggucaucuguuccuguuagaaggcuaugcagcauauuauauacuaugcgcauguuaugaaaugcauaauaaaaaauuuuaaaaaaucuaaaagaucuaaaaaaaaaaaaaaaaaaaaaaaaaaaaaaaaaaaaaaaaaaaaaaaaaaaaaaaaaaaaaaaaugcaucccccccccccccccccccccccccccccccaaaggcucuuuucagagccaccagaauu

SEQ ID NO: 17363 - RNA, 1946 nt, Artificial Sequence
  mRNA product Design c-2 comprising derived and/or modified sequence from HRSV(Memphis-37)__AIY60640.1__F-del_DSCav1_mut5 (opt5)
gggagacuccugucgggcggaaguaggaggaguagaguuuaaaaacaguacucuuuuuccgguucgggacguaguugaagcaacgacaagccggauaaccgcucuugagacaggaagcuuaccauggagcugcccauccucaagaccaacgccauuacaacgauccuggcugccgugacccuuugcuucgcgagcucccagaauauuacagaagaguuuuaccaaucuaccuguagcgcugucuccaaaggcuaucugucugcccucagaacagggugguacaccagcguuaucacaauugaacuguccaacaucaaggagaauaaaugcaacggaaccgacgccaaggugaaacuuaucaagcaggaacuggauaaguauaaaaaugcugugacggagcuccagcugcugaugcagucuaccccugccgcuggcagcggguccgccauugcgagcggaaucgccgucuguaaggugcuccaccuggagggcgaaguuaacaaaauuaagaaugcccuucugucuacaaacaaagcuguggucucccucagcgggugcggagugucuguucugaccuucaaggugcuugaccugaagaauuacaucgauaaacaacuccugccgauucugaacaagcaguccuguagcaucucuaauauugagacagucaucgaauuucagcagaaaaacaaucggcuccuggagaucacccgcgaguucuccgugaacgcuggcgugacgacacccgucagcaccuauaugcuuacaaauuccgaacugcucucucugauuaacgacaugccuaucaccaacgaucaaaagaaacuuaugagcaauaacguucagauugugagacagcaguccuacagcaucaugugcauuaucaaggaggaagugcuggccuaugucgugcaacucccccuguacggcguuaucgacaccccuuguuggaaacugcauacaucuccccucugcacgaccaauacaaaggagggguccaacauuugucugacccggacagaucgcggaugguacugcgacaaugcgggcagcgugagcuuuuucccucaggccgaaaccuguaagguccagucuaacagaguguuuugcgauacgaugaacuccagaacacugccgucugagguuaaucucugcaauaucgacauuuucaaccccaaauaugauuguaagaucaugaccagcaaaaccgacguguccagcucugucauuacaucccugggggcuaucgugagcugcuacggaaagaccaaauguacagccucuaauaagugccggggcaucauuaagacguuuuccaacgggugugauuaugucagcaauaaaggaguggacaccguuuccgugggcaacacacuuuacuaugucaauaagcaagagggcaaaucucuguacgugaagggggaaccuaucauuaacuucuaugacccccucguuuuuccuagcgaugaguucgacgcuuccaucucucaggugaacgagaaaauuaaucagagccuggccuuuauccgcaaguccgaugaacugcuccacaacgucaaugugggaaagagcaccacaaacauuaugaucaccacgaucauuaucgugauuaucguuauucugcuucugcucaucgccgucggccuguuccuguacugcaaagcuagaugaggacuaguggaagcauuuuccuggcugauuaaaagaaauuacucagcuauggucaucuguuccuguuagaaggcuaugcagcauauuauauacuaugcgcauguuaugaaaugcauaauaaaaaauuuuaaaaaaucuaaaagaucuaaaaaaaaaaaaaaaaaaaaaaaaaaaaaaaaaaaaaaaaaaaaaaaaaaaaaaaaaaaaaaaaugcaucccccccccccccccccccccccccccccccaaaggcucuuuucagagccaccagaauu

SEQ ID NO: 17364 - RNA, 1946 nt, Artificial Sequence
  mRNA product Design c-2 comprising derived and/or modified sequence from HRSV(Memphis-37)__AIY60640.1__F-del_DSCav1_mut5 (opt6)
gggagacuccugucgggcggaaguaggaggaguagaguuuaaaaacaguacucuuuuuccgguucgggacguaguugaagcaacgacaagccggauaaccgcucuugagacaggaagcuuaccauggaauuacccaucuuaaaaacaaaugcaauaacaacaauacuagcagccguaacauuaugcuucgccucaagccaaaacauaacagaagaauuuuaccaaagcacauguuccgccguaucaaaaggauaucucucagcacuacguacuggaugguauacauccguaaucacaauugaacuaucaaacauuaaagaaaacaaaugcaauggaacagaugcgaaaguaaaacuaauaaaacaagaauuagauaaauauaaaaaugcaguaaccgaacuacaacuacuaaugcaaucaacucccgcugccgguagcggauccgccauagcaagcggaauugcuguauguaaaguccuacaucuugaaggcgaagucaacaaaaucaaaaaugcauuacucucgaccaacaaagcagucguaucacuaucaggaugcggagucucaguauuaacuuuuaaaguccuugaccuaaaaaacuacauagacaaacaacuacuaccaauucuaaauaaacaaaguugcagcauauccaauaucgaaacaguuauagaauuucaacaaaaaaacaaccgccuacuagaaaucacuagagaauuuucaguaaaugcaggcguaaccacaccagucucuaccuauaugcuuaccaacucugaauuauuaucacuuauaaacgacaugcccauaacaaaugaucaaaaaaaacuaaugagcaacaacguacaaauaguaagacaacaaagcuacagcauuauguguauaauaaaagaagaaguguuagcuuauguaguccaacuaccccucuauggcguuaucgauacaccaugcuggaaauuacacacaagcccucuaugcacaacuaacaccaaagaaggcucuaacauaugcuuaacaagaacagauagaggaugguauugcgauaacgcaggaucaguaucauucuuuccacaagcagaaacauguaaaguacaaucuaaccgaguauucugcgacacaaugaacucuagaacacuacccucagaaguuaaucucuguaauauugacauuuucaauccaaaauacgauugcaaaauaaugaccucuaaaaccgacguaucauccucaguuauaacguccuuaggagcaaucguaagcugcuauggcaaaacaaaauguaccgcaucaaacaaaugcagaggaauaauaaaaacauucucaaacggcugugacuacguaagcaauaaagguguugacacaguuucaguaggaaauacacuauacuauguaaauaaacaagaaggaaaaucucucuauguaaaaggagaacccauaauaaacuucuacgacccacucguauuuccaagcgaugaauuugaugcgagcauuucccagguaaaugaaaaaauaaaucaaucacuagcauucaucagaaaaagugaugaauuacuacacaauguuaacguaggaaaaucaacaacaaauaucaugauaacaacaaucauaauagucauaaucguaauauuacuauuacuaauagcaguagguuuauuucuauacuguaaagcaagguaaggacuaguggaagcauuuuccuggcugauuaaaagaaauuacucagcuauggucaucuguuccuguuagaaggcuaugcagcauauuauauacuaugcgcauguuaugaaaugcauaauaaaaaauuuuaaaaaaucuaaaagaucuaaaaaaaaaaaaaaaaaaaaaaaaaaaaaaaaaaaaaaaaaaaaaaaaaaaaaaaaaaaaaaaaugcaucccccccccccccccccccccccccccccccaaaggcucuuuucagagccaccagaauu

SEQ ID NO: 17365 - RNA, 1946 nt, Artificial Sequence
  mRNA product Design c-2 comprising derived and/or modified sequence from HRSV(Memphis-37)__AIY60640.1__F-del_DSCav1_mut5 (opt11)
gggagacuccugucgggcggaaguaggaggaguagaguuuaaaaacaguacucuuuuuccgguucgggacguaguugaagcaacgacaagccggauaaccgcucuugagacaggaagcuuaccauggaacuucccauccuaaaaaccaacgccauaacaacaauccucgcagcagucacccucugcuucgccucuucacaaaacaucaccgaagaauuuuaccaaucaaccugcuccgccguguccaaaggcuaccucucagcacugcgcacaggaugguauaccagcguaaucaccaucgaacucuccaacaucaaggaaaacaaaugcaacggcaccgaugccaaagucaaacucaucaagcaagaacuugacaaauacaaaaacgccgugaccgagcuacaacuccucaugcaguccacuccagccgccggcuccggcagcgccaucgccuccggcaucgccguaugcaaaguccuccaccucgaaggcgaaguaaacaaaaucaagaacgcacuccuaagcaccaacaaagccgucgucucacucuccgguugcggcgucagcguccuaacauucaaaguucucgaccucaaaaacuacauagacaaacaacuccuccccauccucaacaaacaauccugcuccauaucaaacaucgaaaccguuaucgaauuucaacaaaaaaacaaccgccuccuagaaaucacccgcgaauuuuccgucaacgcaggcgucaccacccccguuuccaccuauaugcucaccaacuccgaacuccucucccucaucaacgacaugcccauuaccaacgaccaaaagaaacuuaugagcaacaacguucaaaucguccgacaacaaucauacuccaucaugugcauuaucaaagaagaaguacucgccuacguaguacaauuaccccucuacggcguaaucgacaccccaugcuggaaacuacacaccuccccccucuguaccaccaacaccaaagaaggcucuaacaucugccucacccgcacagaccguggcugguauugcgauaacgcagggucugucuccuucuucccccaagccgaaacaugcaaaguccaauccaacagagucuucugcgacaccaugaacucgagaacccuccccuccgaagucaaccuaugcaacaucgacaucuucaacccaaaauacgacugcaaaaucaugacuucaaaaacagacgugagcucguccgucaucacaagccuaggagcuaucguauccugcuacggaaaaacaaaaugcacugcuuccaacaaaugccgcggaaucauaaaaaccuucuccaacggcugcgacuacgucagcaacaaaggcgucgacacagucuccguaggcaacacccuauacuacgucaauaaacaagaaggcaagucccuauaugucaaaggcgagcccaucaucaauuucuaugauccccucguuuucccauccgacgaauuugacgcauccaucucccaagucaacgaaaaaauaaaccaaagccucgcauucauccgcaaauccgacgaacuccuccacaacguaaacguaggaaaauccacaacuaacaucaugaucaccaccaucaucaucgucauuaucgucauccuacuccuccucauagcagucggccucuuccucuacugcaaagcacgcuagggacuaguggaagcauuuuccuggcugauuaaaagaaauuacucagcuauggucaucuguuccuguuagaaggcuaugcagcauauuauauacuaugcgcauguuaugaaaugcauaauaaaaaauuuuaaaaaaucuaaaagaucuaaaaaaaaaaaaaaaaaaaaaaaaaaaaaaaaaaaaaaaaaaaaaaaaaaaaaaaaaaaaaaaaugcaucccccccccccccccccccccccccccccccaaaggcucuuuucagagccaccagaauu

SEQ ID NO: 17366 - RNA, 1923 nt, Artificial Sequence
  mRNA product Design c-3 comprising derived and/or modified sequence from HRSV(Memphis-37)__AIY60640.1__F-del_DSCav1_mut5 (opt1)
gggagaguccgcucagccagguugcagaagcggcuuagcguguguccuaaucuucucucugcguguagguaggccugugccgcaaacaagcuuaccauggagcugcccauccucaagaccaacgccaucaccacgauccuggccgcggugacccugugcuucgccagcucccagaacaucaccgaggaguucuaccagagcacgugcuccgccgucagcaagggcuaccucuccgcccugcgcaccgggugguacaccagcgugaucaccaucgagcuguccaacaucaaggagaacaagugcaacggcaccgacgccaaggugaagcucaucaagcaggagcuggacaaguacaagaacgcggucacggagcugcagcuccugaugcagagcaccccggccgccggcuccgggagcgcgaucgccuccggcaucgccgucugcaaggugcugcaccucgagggcgaggugaacaagaucaagaacgcccugcuguccaccaacaaggccgucgugagccucuccggcugcggggugagcguccugaccuucaaggugcuggaccucaagaacuacaucgacaagcagcugcugcccauccugaacaagcagagcugcuccaucagcaacaucgagaccgucaucgaguuccagcagaagaacaaccgccuccuggagaucacgcgggaguucagcgugaacgcgggcgugaccacccccgucuccaccuacaugcugacgaacagcgagcuccugucccugaucaacgacaugccgaucaccaacgaccagaagaagcucaugagcaacaacgugcagaucgugcgccagcaguccuacagcaucaugugcaucaucaaggaggagguccuggccuacguggugcagcugccccucuacggggucaucgacacccccugcuggaagcugcacaccagcccccugugcacgaccaacaccaaggagggcuccaacaucugccucacccggacggaccgcgggugguacugcgacaacgccggcagcguguccuucuucccgcaggccgagaccugcaagguccagagcaaccggguguucugcgacaccaugaacucccggacccugcccagcgaggugaaccucugcaacaucgacaucuucaaccccaaguacgacugcaagaucaugacguccaagaccgacgucagcuccagcgugaucaccucccugggcgccaucgugagcugcuacgggaagaccaagugcacggcgagcaacaagugccgcggcaucaucaagaccuucuccaacgggugcgacuacgucagcaacaagggcguggacaccguguccgucggcaacacccuguacuacgugaacaagcaggagggcaagagccucuacgugaagggggagcccaucaucaacuucuacgacccgcuggucuuccccuccgacgaguucgacgccagcaucucccaggugaacgagaagaucaaccagagccuggccuucauccggaaguccgacgagcuccugcacaacgugaacgucggcaagagcaccacgaacaucaugaucaccaccaucaucaucgugaucaucgugauccugcugcuccugaucgccgucgggcuguuccucuacugcaaggcccgcugaggacuaguacuggcugcaucucccuuuccucuguccuccauccuucucccaggauggugaagggggaccugguacccagugauccccaccccaggauccuaaaucaugacuuaccugcuaauaaaaacucauuggaaaagugagaagaucuaaaaaaaaaaaaaaaaaaaaaaaaaaaaaaaaaaaaaaaaaaaaaaaaaaaaaaaaaaaaaaaaugcaucccccccccccccccccccccccccccccccaaaggcucuuuucagagccaccagaauu

SEQ ID NO: 17367 - RNA, 1923 nt, Artificial Sequence
  mRNA product Design c-3 comprising derived and/or modified sequence from HRSV(Memphis-37)__AIY60640.1__F-del_DSCav1_mut5 (opt1)
gggagaguccgcucagccagguugcagaagcggcuuagcguguguccuaaucuucucucugcguguagguaggccugugccgcaaacaagcuuaccauggagcugcccauccucaagaccaacgccaucaccacgauccuggccgcggugacccugugcuucgccagcucccagaacaucaccgaggaguucuaccagagcacgugcuccgccgucagcaagggcuaccucuccgcccugcgcaccgggugguacaccagcgugaucaccaucgagcuguccaacaucaaggagaacaagugcaacggcaccgacgccaaggugaagcucaucaagcaggagcuggacaaguacaagaacgcggucacggagcugcagcuccugaugcagagcaccccggccgccggguccggcagcgccaucgcguccgggaucgccgugugcaaggugcugcaccucgagggcgaggucaacaagaucaagaacgcccugcugagcaccaacaaggccguggugucccucagcggcugcggggucuccgugcugaccuucaaggugcuggaccucaagaacuacaucgacaagcagcugcugcccauccucaacaagcagagcugcuccaucagcaacaucgagacggucaucgaguuccagcagaagaacaaccggcugcuggagaucacccgcgaguucuccgugaacgccggcgugaccacccccgucagcacguacaugcucaccaacagcgagcugcugucccucaucaacgacaugcccaucaccaacgaccagaagaagcugaugagcaacaacgugcagaucgugcggcagcaguccuacagcaucaugugcaucaucaaggaggagguccuggcguacguggugcagcucccgcuguacggggucaucgacacccccugcuggaagcugcacacgagcccccucugcaccaccaacaccaaggagggcuccaacaucugccugacgcgcaccgaccgggggugguacugcgacaacgccggcuccgugagcuucuucccccaggccgagaccugcaaggugcaguccaaccgcgucuucugcgacaccaugaacagccggacgcucccguccgaggugaaccugugcaacaucgacaucuucaaccccaaguacgacugcaagaucaugaccagcaagaccgacgucuccagcuccgugaucaccagccugggcgccaucguguccugcuacgggaagacgaagugcaccgccagcaacaagugccggggcaucaucaagaccuucuccaacgggugcgacuacgucagcaacaagggcguggacaccgugagcgucggcaacacgcucuacuacgugaacaagcaggaggggaagucccuguacgugaagggcgagcccaucaucaacuucuacgacccccuggucuucccgagcgacgaguucgacgcguccaucagccaggugaacgagaagaucaaccagucccucgccuucauccgcaagagcgacgagcugcugcacaacgugaacgucgggaaguccaccaccaacaucaugaucaccaccaucaucaucgugaucaucgugauccuccugcugcucaucgccgucggccuguuccuguacugcaaggcccggugaggacuaguacuggcugcaucucccuuuccucuguccuccauccuucucccaggauggugaagggggaccugguacccagugauccccaccccaggauccuaaaucaugacuuaccugcuaauaaaaacucauuggaaaagugagaagaucuaaaaaaaaaaaaaaaaaaaaaaaaaaaaaaaaaaaaaaaaaaaaaaaaaaaaaaaaaaaaaaaaugcaucccccccccccccccccccccccccccccccaaaggcucuuuucagagccaccagaauu

SEQ ID NO: 17368 - RNA, 1923 nt, Artificial Sequence
  mRNA product Design c-3 comprising derived and/or modified sequence from HRSV(Memphis-37)__AIY60640.1__F-del_DSCav1_mut5 (opt2)
gggagaguccgcucagccagguugcagaagcggcuuagcguguguccuaaucuucucucugcguguagguaggccugugccgcaaacaagcuuaccauggagcuccccauccucaagaccaacgccaucaccaccauccucgccgccgucacccucugcuucgccuccucccagaacaucaccgaggaguucuaccaguccaccugcuccgccgucuccaagggcuaccucuccgcccuccgcaccggcugguacaccuccgucaucaccaucgagcucuccaacaucaaggagaacaagugcaacggcaccgacgccaaggucaagcucaucaagcaggagcucgacaaguacaagaacgccgucaccgagcuccagcuccucaugcaguccacccccgccgccggcuccggcuccgccaucgccuccggcaucgccgucugcaagguccuccaccucgagggcgaggucaacaagaucaagaacgcccuccucuccaccaacaaggccgucgucucccucuccggcugcggcgucuccguccucaccuucaagguccucgaccucaagaacuacaucgacaagcagcuccuccccauccucaacaagcaguccugcuccaucuccaacaucgagaccgucaucgaguuccagcagaagaacaaccgccuccucgagaucacccgcgaguucuccgucaacgccggcgucaccacccccgucuccaccuacaugcucaccaacuccgagcuccucucccucaucaacgacaugcccaucaccaacgaccagaagaagcucauguccaacaacguccagaucguccgccagcaguccuacuccaucaugugcaucaucaaggaggagguccucgccuacgucguccagcucccccucuacggcgucaucgacacccccugcuggaagcuccacaccuccccccucugcaccaccaacaccaaggagggcuccaacaucugccucacccgcaccgaccgcggcugguacugcgacaacgccggcuccgucuccuucuucccccaggccgagaccugcaagguccaguccaaccgcgucuucugcgacaccaugaacucccgcacccuccccuccgaggucaaccucugcaacaucgacaucuucaaccccaaguacgacugcaagaucaugaccuccaagaccgacgucuccuccuccgucaucaccucccucggcgccaucgucuccugcuacggcaagaccaagugcaccgccuccaacaagugccgcggcaucaucaagaccuucuccaacggcugcgacuacgucuccaacaagggcgucgacaccgucuccgucggcaacacccucuacuacgucaacaagcaggagggcaagucccucuacgucaagggcgagcccaucaucaacuucuacgacccccucgucuuccccuccgacgaguucgacgccuccaucucccaggucaacgagaagaucaaccagucccucgccuucauccgcaaguccgacgagcuccuccacaacgucaacgucggcaaguccaccaccaacaucaugaucaccaccaucaucaucgucaucaucgucauccuccuccuccucaucgccgucggccucuuccucuacugcaaggcccgcugaggacuaguacuggcugcaucucccuuuccucuguccuccauccuucucccaggauggugaagggggaccugguacccagugauccccaccccaggauccuaaaucaugacuuaccugcuaauaaaaacucauuggaaaagugagaagaucuaaaaaaaaaaaaaaaaaaaaaaaaaaaaaaaaaaaaaaaaaaaaaaaaaaaaaaaaaaaaaaaaugcaucccccccccccccccccccccccccccccccaaaggcucuuuucagagccaccagaauu

SEQ ID NO: 17369 - RNA, 1923 nt, Artificial Sequence
  mRNA product Design c-3 comprising derived and/or modified sequence from HRSV(Memphis-37)__AIY60640.1__F-del_DSCav1_mut5 (opt3)
gggagaguccgcucagccagguugcagaagcggcuuagcguguguccuaaucuucucucugcguguagguaggccugugccgcaaacaagcuuaccauggagcugcccauccucaagaccaacgccauuacaacuauacuugcugcagugacgcugugcuucgccagcucccagaauaucaccgaagaguuuuaccaaucuacauguucagcggucaguaaaggcuauuugagcgcuuuaagaacugggugguacaccuccguuauuacaaucgaacugucuaacauuaaggagaauaaaugcaacggaaccgacgccaaggugaaacuaaucaagcaggaacucgauaaguauaaaaaugcaguaacugagcugcagcuucugaugcagucgaccccugccgcugguucaggcagcgcaauagccagugggaucgcuguguguaaggucuugcaccucgagggagaagugaacaaaauuaagaaugcccugcuguccacaaacaaagcgguugugucucucagcggcugcggugucuccguguuaacguucaagguacuggaccuuaagaauuacaucgauaaacaauugcugccaauucuaaacaagcagucauguaguaucagcaauauagagacuguuauugaauuucagcagaaaaacaauaggcuccuggagaucacccgggaguucucugugaacgcaggggucacaacuccgguguccaccuauaugcuuacaaauucagaacuguugagccucauuaacgacaugcccaucaccaacgaucaaaagaaacugaugaguaauaacgugcagaucguccgccagcagucuuacuccauuaugugcauaaucaaggaggaaguuuuagccuaugugguacaacugccucucuacggagugauugacacgccauguuggaaacuucauacuagcccccugugcacaaccaauacuaaggagggcucgaacaucuguuugacacgaaccgaucguggcugguacugcgacaaugcugggucugucuccuuuuucccucaggccgaaacguguaaggugcagucaaacagaguguuuugcgauaccaugaauaguagaacacugccaagcgaggugaaccucugcaauauagacauuuucaaccccaaauaugauuguaagaucaugacuuccaaaaccgacgucucuagcucagugaucacaagucugggagcaauuguauccugcuacgguaagacuaaauguaccgcuagcaauaagugcaggggcaucauuaagacauuuucuaacgggugugauuauguuucaaauaaaggaguggacaccgucagugugggcaacacucuuuacuaugucaauaagcaagaggguaaaagccuguacgugaagggggaaccuauaaucaacuucuaugacccauugguuuuuccguccgaugaguucgacgccucuauuucgcagguuaacgagaaaaucaaucagagccucgcguuuauccggaaguccgaugaacuguuacacaacguaaaugucggaaagucaacgacaaacauuaugauaaccacuaucauuaucgugauuaucguuauacugcuacuccugaucgccgugggccuuuucuuguacugcaaagcacgcugaggacuaguacuggcugcaucucccuuuccucuguccuccauccuucucccaggauggugaagggggaccugguacccagugauccccaccccaggauccuaaaucaugacuuaccugcuaauaaaaacucauuggaaaagugagaagaucuaaaaaaaaaaaaaaaaaaaaaaaaaaaaaaaaaaaaaaaaaaaaaaaaaaaaaaaaaaaaaaaaugcaucccccccccccccccccccccccccccccccaaaggcucuuuucagagccaccagaauu

SEQ ID NO: 17370 - RNA, 1923 nt, Artificial Sequence
  mRNA product Design c-3 comprising derived and/or modified sequence from HRSV(Memphis-37)__AIY60640.1__F-del_DSCav1_mut5 (opt4)
gggagaguccgcucagccagguugcagaagcggcuuagcguguguccuaaucuucucucugcguguagguaggccugugccgcaaacaagcuuaccauggagcugcccauccugaagaccaacgccaucaccaccauccuggccgccgugacccugugcuucgccagcagccagaacaucaccgaggaguucuaccagagcaccugcagcgccgugagcaagggcuaccugagcgcccugagaaccggcugguacaccagcgugaucaccaucgagcugagcaacaucaaggagaacaagugcaacggcaccgacgccaaggugaagcugaucaagcaggagcuggacaaguacaagaacgccgugaccgagcugcagcugcugaugcagagcacccccgccgccggcagcggcagcgccaucgccagcggcaucgccgugugcaaggugcugcaccuggagggcgaggugaacaagaucaagaacgcccugcugagcaccaacaaggccguggugagccugagcggcugcggcgugagcgugcugaccuucaaggugcuggaccugaagaacuacaucgacaagcagcugcugcccauccugaacaagcagagcugcagcaucagcaacaucgagaccgugaucgaguuccagcagaagaacaacagacugcuggagaucaccagagaguucagcgugaacgccggcgugaccacccccgugagcaccuacaugcugaccaacagcgagcugcugagccugaucaacgacaugcccaucaccaacgaccagaagaagcugaugagcaacaacgugcagaucgugagacagcagagcuacagcaucaugugcaucaucaaggaggaggugcuggccuacguggugcagcugccccuguacggcgugaucgacacccccugcuggaagcugcacaccagcccccugugcaccaccaacaccaaggagggcagcaacaucugccugaccagaaccgacagaggcugguacugcgacaacgccggcagcgugagcuucuucccccaggccgagaccugcaaggugcagagcaacagaguguucugcgacaccaugaacagcagaacccugcccagcgaggugaaccugugcaacaucgacaucuucaaccccaaguacgacugcaagaucaugaccagcaagaccgacgugagcagcagcgugaucaccagccugggcgccaucgugagcugcuacggcaagaccaagugcaccgccagcaacaagugcagaggcaucaucaagaccuucagcaacggcugcgacuacgugagcaacaagggcguggacaccgugagcgugggcaacacccuguacuacgugaacaagcaggagggcaagagccuguacgugaagggcgagcccaucaucaacuucuacgacccccugguguuccccagcgacgaguucgacgccagcaucagccaggugaacgagaagaucaaccagagccuggccuucaucagaaagagcgacgagcugcugcacaacgugaacgugggcaagagcaccaccaacaucaugaucaccaccaucaucaucgugaucaucgugauccugcugcugcugaucgccgugggccuguuccuguacugcaaggccagaugaggacuaguacuggcugcaucucccuuuccucuguccuccauccuucucccaggauggugaagggggaccugguacccagugauccccaccccaggauccuaaaucaugacuuaccugcuaauaaaaacucauuggaaaagugagaagaucuaaaaaaaaaaaaaaaaaaaaaaaaaaaaaaaaaaaaaaaaaaaaaaaaaaaaaaaaaaaaaaaaugcaucccccccccccccccccccccccccccccccaaaggcucuuuucagagccaccagaauu

SEQ ID NO: 17371 - RNA, 1923 nt, Artificial Sequence
  mRNA product Design c-3 comprising derived and/or modified sequence from HRSV(Memphis-37)__AIY60640.1__F-del_DSCav1_mut5 (opt5)
gggagaguccgcucagccagguugcagaagcggcuuagcguguguccuaaucuucucucugcguguagguaggccugugccgcaaacaagcuuaccauggagcugcccauccucaagaccaacgccauuacaacgauccuggcugccgugacccuuugcuucgcgagcucccagaauauuacagaagaguuuuaccaaucuaccuguagcgcugucuccaaaggcuaucugucugcccucagaacagggugguacaccagcguuaucacaauugaacuguccaacaucaaggagaauaaaugcaacggaaccgacgccaaggugaaacuuaucaagcaggaacuggauaaguauaaaaaugcugugacggagcuccagcugcugaugcagucuaccccugccgcuggcagcggguccgccauugcgagcggaaucgccgucuguaaggugcuccaccuggagggcgaaguuaacaaaauuaagaaugcccuucugucuacaaacaaagcuguggucucccucagcgggugcggagugucuguucugaccuucaaggugcuugaccugaagaauuacaucgauaaacaacuccugccgauucugaacaagcaguccuguagcaucucuaauauugagacagucaucgaauuucagcagaaaaacaaucggcuccuggagaucacccgcgaguucuccgugaacgcuggcgugacgacacccgucagcaccuauaugcuuacaaauuccgaacugcucucucugauuaacgacaugccuaucaccaacgaucaaaagaaacuuaugagcaauaacguucagauugugagacagcaguccuacagcaucaugugcauuaucaaggaggaagugcuggccuaugucgugcaacucccccuguacggcguuaucgacaccccuuguuggaaacugcauacaucuccccucugcacgaccaauacaaaggagggguccaacauuugucugacccggacagaucgcggaugguacugcgacaaugcgggcagcgugagcuuuuucccucaggccgaaaccuguaagguccagucuaacagaguguuuugcgauacgaugaacuccagaacacugccgucugagguuaaucucugcaauaucgacauuuucaaccccaaauaugauuguaagaucaugaccagcaaaaccgacguguccagcucugucauuacaucccugggggcuaucgugagcugcuacggaaagaccaaauguacagccucuaauaagugccggggcaucauuaagacguuuuccaacgggugugauuaugucagcaauaaaggaguggacaccguuuccgugggcaacacacuuuacuaugucaauaagcaagagggcaaaucucuguacgugaagggggaaccuaucauuaacuucuaugacccccucguuuuuccuagcgaugaguucgacgcuuccaucucucaggugaacgagaaaauuaaucagagccuggccuuuauccgcaaguccgaugaacugcuccacaacgucaaugugggaaagagcaccacaaacauuaugaucaccacgaucauuaucgugauuaucguuauucugcuucugcucaucgccgucggccuguuccuguacugcaaagcuagaugaggacuaguacuggcugcaucucccuuuccucuguccuccauccuucucccaggauggugaagggggaccugguacccagugauccccaccccaggauccuaaaucaugacuuaccugcuaauaaaaacucauuggaaaagugagaagaucuaaaaaaaaaaaaaaaaaaaaaaaaaaaaaaaaaaaaaaaaaaaaaaaaaaaaaaaaaaaaaaaaugcaucccccccccccccccccccccccccccccccaaaggcucuuuucagagccaccagaauu

SEQ ID NO: 17372 - RNA, 1923 nt, Artificial Sequence
  mRNA product Design c-3 comprising derived and/or modified sequence from HRSV(Memphis-37)__AIY60640.1__F-del_DSCav1_mut5 (opt6)
gggagaguccgcucagccagguugcagaagcggcuuagcguguguccuaaucuucucucugcguguagguaggccugugccgcaaacaagcuuaccauggaauuacccaucuuaaaaacaaaugcaauaacaacaauacuagcagccguaacauuaugcuucgccucaagccaaaacauaacagaagaauuuuaccaaagcacauguuccgccguaucaaaaggauaucucucagcacuacguacuggaugguauacauccguaaucacaauugaacuaucaaacauuaaagaaaacaaaugcaauggaacagaugcgaaaguaaaacuaauaaaacaagaauuagauaaauauaaaaaugcaguaaccgaacuacaacuacuaaugcaaucaacucccgcugccgguagcggauccgccauagcaagcggaauugcuguauguaaaguccuacaucuugaaggcgaagucaacaaaaucaaaaaugcauuacucucgaccaacaaagcagucguaucacuaucaggaugcggagucucaguauuaacuuuuaaaguccuugaccuaaaaaacuacauagacaaacaacuacuaccaauucuaaauaaacaaaguugcagcauauccaauaucgaaacaguuauagaauuucaacaaaaaaacaaccgccuacuagaaaucacuagagaauuuucaguaaaugcaggcguaaccacaccagucucuaccuauaugcuuaccaacucugaauuauuaucacuuauaaacgacaugcccauaacaaaugaucaaaaaaaacuaaugagcaacaacguacaaauaguaagacaacaaagcuacagcauuauguguauaauaaaagaagaaguguuagcuuauguaguccaacuaccccucuauggcguuaucgauacaccaugcuggaaauuacacacaagcccucuaugcacaacuaacaccaaagaaggcucuaacauaugcuuaacaagaacagauagaggaugguauugcgauaacgcaggaucaguaucauucuuuccacaagcagaaacauguaaaguacaaucuaaccgaguauucugcgacacaaugaacucuagaacacuacccucagaaguuaaucucuguaauauugacauuuucaauccaaaauacgauugcaaaauaaugaccucuaaaaccgacguaucauccucaguuauaacguccuuaggagcaaucguaagcugcuauggcaaaacaaaauguaccgcaucaaacaaaugcagaggaauaauaaaaacauucucaaacggcugugacuacguaagcaauaaagguguugacacaguuucaguaggaaauacacuauacuauguaaauaaacaagaaggaaaaucucucuauguaaaaggagaacccauaauaaacuucuacgacccacucguauuuccaagcgaugaauuugaugcgagcauuucccagguaaaugaaaaaauaaaucaaucacuagcauucaucagaaaaagugaugaauuacuacacaauguuaacguaggaaaaucaacaacaaauaucaugauaacaacaaucauaauagucauaaucguaauauuacuauuacuaauagcaguagguuuauuucuauacuguaaagcaagguaaggacuaguacuggcugcaucucccuuuccucuguccuccauccuucucccaggauggugaagggggaccugguacccagugauccccaccccaggauccuaaaucaugacuuaccugcuaauaaaaacucauuggaaaagugagaagaucuaaaaaaaaaaaaaaaaaaaaaaaaaaaaaaaaaaaaaaaaaaaaaaaaaaaaaaaaaaaaaaaaugcaucccccccccccccccccccccccccccccccaaaggcucuuuucagagccaccagaauu

SEQ ID NO: 17373 - RNA, 1923 nt, Artificial Sequence
  mRNA product Design c-3 comprising derived and/or modified sequence from HRSV(Memphis-37)__AIY60640.1__F-del_DSCav1_mut5 (opt11)
gggagaguccgcucagccagguugcagaagcggcuuagcguguguccuaaucuucucucugcguguagguaggccugugccgcaaacaagcuuaccauggaacuucccauccuaaaaaccaacgccauaacaacaauccucgcagcagucacccucugcuucgccucuucacaaaacaucaccgaagaauuuuaccaaucaaccugcuccgccguguccaaaggcuaccucucagcacugcgcacaggaugguauaccagcguaaucaccaucgaacucuccaacaucaaggaaaacaaaugcaacggcaccgaugccaaagucaaacucaucaagcaagaacuugacaaauacaaaaacgccgugaccgagcuacaacuccucaugcaguccacuccagccgccggcuccggcagcgccaucgccuccggcaucgccguaugcaaaguccuccaccucgaaggcgaaguaaacaaaaucaagaacgcacuccuaagcaccaacaaagccgucgucucacucuccgguugcggcgucagcguccuaacauucaaaguucucgaccucaaaaacuacauagacaaacaacuccuccccauccucaacaaacaauccugcuccauaucaaacaucgaaaccguuaucgaauuucaacaaaaaaacaaccgccuccuagaaaucacccgcgaauuuuccgucaacgcaggcgucaccacccccguuuccaccuauaugcucaccaacuccgaacuccucucccucaucaacgacaugcccauuaccaacgaccaaaagaaacuuaugagcaacaacguucaaaucguccgacaacaaucauacuccaucaugugcauuaucaaagaagaaguacucgccuacguaguacaauuaccccucuacggcguaaucgacaccccaugcuggaaacuacacaccuccccccucuguaccaccaacaccaaagaaggcucuaacaucugccucacccgcacagaccguggcugguauugcgauaacgcagggucugucuccuucuucccccaagccgaaacaugcaaaguccaauccaacagagucuucugcgacaccaugaacucgagaacccuccccuccgaagucaaccuaugcaacaucgacaucuucaacccaaaauacgacugcaaaaucaugacuucaaaaacagacgugagcucguccgucaucacaagccuaggagcuaucguauccugcuacggaaaaacaaaaugcacugcuuccaacaaaugccgcggaaucauaaaaaccuucuccaacggcugcgacuacgucagcaacaaaggcgucgacacagucuccguaggcaacacccuauacuacgucaauaaacaagaaggcaagucccuauaugucaaaggcgagcccaucaucaauuucuaugauccccucguuuucccauccgacgaauuugacgcauccaucucccaagucaacgaaaaaauaaaccaaagccucgcauucauccgcaaauccgacgaacuccuccacaacguaaacguaggaaaauccacaacuaacaucaugaucaccaccaucaucaucgucauuaucgucauccuacuccuccucauagcagucggccucuuccucuacugcaaagcacgcuagggacuaguacuggcugcaucucccuuuccucuguccuccauccuucucccaggauggugaagggggaccugguacccagugauccccaccccaggauccuaaaucaugacuuaccugcuaauaaaaacucauuggaaaagugagaagaucuaaaaaaaaaaaaaaaaaaaaaaaaaaaaaaaaaaaaaaaaaaaaaaaaaaaaaaaaaaaaaaaaugcaucccccccccccccccccccccccccccccccaaaggcucuuuucagagccaccagaauu

SEQ ID NO: 17374 - RNA, 1919 nt, Artificial Sequence
  mRNA product Design c-4 comprising derived and/or modified sequence from HRSV(Memphis-37)__AIY60640.1__F-del_DSCav1_mut5 (opt1)
gggagaguccgcucagccagguugcagaagcggcuuagcguguguccuaaucuucucucugcguguagguaggccugugccgcaaacaagcuuaccauggagcugcccauccucaagaccaacgccaucaccacgauccuggccgcggugacccugugcuucgccagcucccagaacaucaccgaggaguucuaccagagcacgugcuccgccgucagcaagggcuaccucuccgcccugcgcaccgggugguacaccagcgugaucaccaucgagcuguccaacaucaaggagaacaagugcaacggcaccgacgccaaggugaagcucaucaagcaggagcuggacaaguacaagaacgcggucacggagcugcagcuccugaugcagagcaccccggccgccggcuccgggagcgcgaucgccuccggcaucgccgucugcaaggugcugcaccucgagggcgaggugaacaagaucaagaacgcccugcuguccaccaacaaggccgucgugagccucuccggcugcggggugagcguccugaccuucaaggugcuggaccucaagaacuacaucgacaagcagcugcugcccauccugaacaagcagagcugcuccaucagcaacaucgagaccgucaucgaguuccagcagaagaacaaccgccuccuggagaucacgcgggaguucagcgugaacgcgggcgugaccacccccgucuccaccuacaugcugacgaacagcgagcuccugucccugaucaacgacaugccgaucaccaacgaccagaagaagcucaugagcaacaacgugcagaucgugcgccagcaguccuacagcaucaugugcaucaucaaggaggagguccuggccuacguggugcagcugccccucuacggggucaucgacacccccugcuggaagcugcacaccagcccccugugcacgaccaacaccaaggagggcuccaacaucugccucacccggacggaccgcgggugguacugcgacaacgccggcagcguguccuucuucccgcaggccgagaccugcaagguccagagcaaccggguguucugcgacaccaugaacucccggacccugcccagcgaggugaaccucugcaacaucgacaucuucaaccccaaguacgacugcaagaucaugacguccaagaccgacgucagcuccagcgugaucaccucccugggcgccaucgugagcugcuacgggaagaccaagugcacggcgagcaacaagugccgcggcaucaucaagaccuucuccaacgggugcgacuacgucagcaacaagggcguggacaccguguccgucggcaacacccuguacuacgugaacaagcaggagggcaagagccucuacgugaagggggagcccaucaucaacuucuacgacccgcuggucuuccccuccgacgaguucgacgccagcaucucccaggugaacgagaagaucaaccagagccuggccuucauccggaaguccgacgagcuccugcacaacgugaacgucggcaagagcaccacgaacaucaugaucaccaccaucaucaucgugaucaucgugauccugcugcuccugaucgccgucgggcuguuccucuacugcaaggcccgcugaggacuaguggaagcauuuuccuggcugauuaaaagaaauuacucagcuauggucaucuguuccuguuagaaggcuaugcagcauauuauauacuaugcgcauguuaugaaaugcauaauaaaaaauuuuaaaaaaucuaaaagaucuaaaaaaaaaaaaaaaaaaaaaaaaaaaaaaaaaaaaaaaaaaaaaaaaaaaaaaaaaaaaaaaaugcaucccccccccccccccccccccccccccccccaaaggcucuuuucagagccaccagaauu

SEQ ID NO: 17375 - RNA, 1919 nt, Artificial Sequence
  mRNA product Design c-4 comprising derived and/or modified sequence from HRSV(Memphis-37)__AIY60640.1__F-del_DSCav1_mut5 (opt1)
gggagaguccgcucagccagguugcagaagcggcuuagcguguguccuaaucuucucucugcguguagguaggccugugccgcaaacaagcuuaccauggagcugcccauccucaagaccaacgccaucaccacgauccuggccgcggugacccugugcuucgccagcucccagaacaucaccgaggaguucuaccagagcacgugcuccgccgucagcaagggcuaccucuccgcccugcgcaccgggugguacaccagcgugaucaccaucgagcuguccaacaucaaggagaacaagugcaacggcaccgacgccaaggugaagcucaucaagcaggagcuggacaaguacaagaacgcggucacggagcugcagcuccugaugcagagcaccccggccgccggguccggcagcgccaucgcguccgggaucgccgugugcaaggugcugcaccucgagggcgaggucaacaagaucaagaacgcccugcugagcaccaacaaggccguggugucccucagcggcugcggggucuccgugcugaccuucaaggugcuggaccucaagaacuacaucgacaagcagcugcugcccauccucaacaagcagagcugcuccaucagcaacaucgagacggucaucgaguuccagcagaagaacaaccggcugcuggagaucacccgcgaguucuccgugaacgccggcgugaccacccccgucagcacguacaugcucaccaacagcgagcugcugucccucaucaacgacaugcccaucaccaacgaccagaagaagcugaugagcaacaacgugcagaucgugcggcagcaguccuacagcaucaugugcaucaucaaggaggagguccuggcguacguggugcagcucccgcuguacggggucaucgacacccccugcuggaagcugcacacgagcccccucugcaccaccaacaccaaggagggcuccaacaucugccugacgcgcaccgaccgggggugguacugcgacaacgccggcuccgugagcuucuucccccaggccgagaccugcaaggugcaguccaaccgcgucuucugcgacaccaugaacagccggacgcucccguccgaggugaaccugugcaacaucgacaucuucaaccccaaguacgacugcaagaucaugaccagcaagaccgacgucuccagcuccgugaucaccagccugggcgccaucguguccugcuacgggaagacgaagugcaccgccagcaacaagugccggggcaucaucaagaccuucuccaacgggugcgacuacgucagcaacaagggcguggacaccgugagcgucggcaacacgcucuacuacgugaacaagcaggaggggaagucccuguacgugaagggcgagcccaucaucaacuucuacgacccccuggucuucccgagcgacgaguucgacgcguccaucagccaggugaacgagaagaucaaccagucccucgccuucauccgcaagagcgacgagcugcugcacaacgugaacgucgggaaguccaccaccaacaucaugaucaccaccaucaucaucgugaucaucgugauccuccugcugcucaucgccgucggccuguuccuguacugcaaggcccggugaggacuaguggaagcauuuuccuggcugauuaaaagaaauuacucagcuauggucaucuguuccuguuagaaggcuaugcagcauauuauauacuaugcgcauguuaugaaaugcauaauaaaaaauuuuaaaaaaucuaaaagaucuaaaaaaaaaaaaaaaaaaaaaaaaaaaaaaaaaaaaaaaaaaaaaaaaaaaaaaaaaaaaaaaaugcaucccccccccccccccccccccccccccccccaaaggcucuuuucagagccaccagaauu

SEQ ID NO: 17376 - RNA, 1919 nt, Artificial Sequence
  mRNA product Design c-4 comprising derived and/or modified sequence from HRSV(Memphis-37)__AIY60640.1__F-del_DSCav1_mut5 (opt2)
gggagaguccgcucagccagguugcagaagcggcuuagcguguguccuaaucuucucucugcguguagguaggccugugccgcaaacaagcuuaccauggagcuccccauccucaagaccaacgccaucaccaccauccucgccgccgucacccucugcuucgccuccucccagaacaucaccgaggaguucuaccaguccaccugcuccgccgucuccaagggcuaccucuccgcccuccgcaccggcugguacaccuccgucaucaccaucgagcucuccaacaucaaggagaacaagugcaacggcaccgacgccaaggucaagcucaucaagcaggagcucgacaaguacaagaacgccgucaccgagcuccagcuccucaugcaguccacccccgccgccggcuccggcuccgccaucgccuccggcaucgccgucugcaagguccuccaccucgagggcgaggucaacaagaucaagaacgcccuccucuccaccaacaaggccgucgucucccucuccggcugcggcgucuccguccucaccuucaagguccucgaccucaagaacuacaucgacaagcagcuccuccccauccucaacaagcaguccugcuccaucuccaacaucgagaccgucaucgaguuccagcagaagaacaaccgccuccucgagaucacccgcgaguucuccgucaacgccggcgucaccacccccgucuccaccuacaugcucaccaacuccgagcuccucucccucaucaacgacaugcccaucaccaacgaccagaagaagcucauguccaacaacguccagaucguccgccagcaguccuacuccaucaugugcaucaucaaggaggagguccucgccuacgucguccagcucccccucuacggcgucaucgacacccccugcuggaagcuccacaccuccccccucugcaccaccaacaccaaggagggcuccaacaucugccucacccgcaccgaccgcggcugguacugcgacaacgccggcuccgucuccuucuucccccaggccgagaccugcaagguccaguccaaccgcgucuucugcgacaccaugaacucccgcacccuccccuccgaggucaaccucugcaacaucgacaucuucaaccccaaguacgacugcaagaucaugaccuccaagaccgacgucuccuccuccgucaucaccucccucggcgccaucgucuccugcuacggcaagaccaagugcaccgccuccaacaagugccgcggcaucaucaagaccuucuccaacggcugcgacuacgucuccaacaagggcgucgacaccgucuccgucggcaacacccucuacuacgucaacaagcaggagggcaagucccucuacgucaagggcgagcccaucaucaacuucuacgacccccucgucuuccccuccgacgaguucgacgccuccaucucccaggucaacgagaagaucaaccagucccucgccuucauccgcaaguccgacgagcuccuccacaacgucaacgucggcaaguccaccaccaacaucaugaucaccaccaucaucaucgucaucaucgucauccuccuccuccucaucgccgucggccucuuccucuacugcaaggcccgcugaggacuaguggaagcauuuuccuggcugauuaaaagaaauuacucagcuauggucaucuguuccuguuagaaggcuaugcagcauauuauauacuaugcgcauguuaugaaaugcauaauaaaaaauuuuaaaaaaucuaaaagaucuaaaaaaaaaaaaaaaaaaaaaaaaaaaaaaaaaaaaaaaaaaaaaaaaaaaaaaaaaaaaaaaaugcaucccccccccccccccccccccccccccccccaaaggcucuuuucagagccaccagaauu

SEQ ID NO: 17377 - RNA, 1919 nt, Artificial Sequence
  mRNA product Design c-4 comprising derived and/or modified sequence from HRSV(Memphis-37)__AIY60640.1__F-del_DSCav1_mut5 (opt3)
gggagaguccgcucagccagguugcagaagcggcuuagcguguguccuaaucuucucucugcguguagguaggccugugccgcaaacaagcuuaccauggagcugcccauccucaagaccaacgccauuacaacuauacuugcugcagugacgcugugcuucgccagcucccagaauaucaccgaagaguuuuaccaaucuacauguucagcggucaguaaaggcuauuugagcgcuuuaagaacugggugguacaccuccguuauuacaaucgaacugucuaacauuaaggagaauaaaugcaacggaaccgacgccaaggugaaacuaaucaagcaggaacucgauaaguauaaaaaugcaguaacugagcugcagcuucugaugcagucgaccccugccgcugguucaggcagcgcaauagccagugggaucgcuguguguaaggucuugcaccucgagggagaagugaacaaaauuaagaaugcccugcuguccacaaacaaagcgguugugucucucagcggcugcggugucuccguguuaacguucaagguacuggaccuuaagaauuacaucgauaaacaauugcugccaauucuaaacaagcagucauguaguaucagcaauauagagacuguuauugaauuucagcagaaaaacaauaggcuccuggagaucacccgggaguucucugugaacgcaggggucacaacuccgguguccaccuauaugcuuacaaauucagaacuguugagccucauuaacgacaugcccaucaccaacgaucaaaagaaacugaugaguaauaacgugcagaucguccgccagcagucuuacuccauuaugugcauaaucaaggaggaaguuuuagccuaugugguacaacugccucucuacggagugauugacacgccauguuggaaacuucauacuagcccccugugcacaaccaauacuaaggagggcucgaacaucuguuugacacgaaccgaucguggcugguacugcgacaaugcugggucugucuccuuuuucccucaggccgaaacguguaaggugcagucaaacagaguguuuugcgauaccaugaauaguagaacacugccaagcgaggugaaccucugcaauauagacauuuucaaccccaaauaugauuguaagaucaugacuuccaaaaccgacgucucuagcucagugaucacaagucugggagcaauuguauccugcuacgguaagacuaaauguaccgcuagcaauaagugcaggggcaucauuaagacauuuucuaacgggugugauuauguuucaaauaaaggaguggacaccgucagugugggcaacacucuuuacuaugucaauaagcaagaggguaaaagccuguacgugaagggggaaccuauaaucaacuucuaugacccauugguuuuuccguccgaugaguucgacgccucuauuucgcagguuaacgagaaaaucaaucagagccucgcguuuauccggaaguccgaugaacuguuacacaacguaaaugucggaaagucaacgacaaacauuaugauaaccacuaucauuaucgugauuaucguuauacugcuacuccugaucgccgugggccuuuucuuguacugcaaagcacgcugaggacuaguggaagcauuuuccuggcugauuaaaagaaauuacucagcuauggucaucuguuccuguuagaaggcuaugcagcauauuauauacuaugcgcauguuaugaaaugcauaauaaaaaauuuuaaaaaaucuaaaagaucuaaaaaaaaaaaaaaaaaaaaaaaaaaaaaaaaaaaaaaaaaaaaaaaaaaaaaaaaaaaaaaaaugcaucccccccccccccccccccccccccccccccaaaggcucuuuucagagccaccagaauu

SEQ ID NO: 17378 - RNA, 1919 nt, Artificial Sequence
  mRNA product Design c-4 comprising derived and/or modified sequence from HRSV(Memphis-37)__AIY60640.1__F-del_DSCav1_mut5 (opt4)
gggagaguccgcucagccagguugcagaagcggcuuagcguguguccuaaucuucucucugcguguagguaggccugugccgcaaacaagcuuaccauggagcugcccauccugaagaccaacgccaucaccaccauccuggccgccgugacccugugcuucgccagcagccagaacaucaccgaggaguucuaccagagcaccugcagcgccgugagcaagggcuaccugagcgcccugagaaccggcugguacaccagcgugaucaccaucgagcugagcaacaucaaggagaacaagugcaacggcaccgacgccaaggugaagcugaucaagcaggagcuggacaaguacaagaacgccgugaccgagcugcagcugcugaugcagagcacccccgccgccggcagcggcagcgccaucgccagcggcaucgccgugugcaaggugcugcaccuggagggcgaggugaacaagaucaagaacgcccugcugagcaccaacaaggccguggugagccugagcggcugcggcgugagcgugcugaccuucaaggugcuggaccugaagaacuacaucgacaagcagcugcugcccauccugaacaagcagagcugcagcaucagcaacaucgagaccgugaucgaguuccagcagaagaacaacagacugcuggagaucaccagagaguucagcgugaacgccggcgugaccacccccgugagcaccuacaugcugaccaacagcgagcugcugagccugaucaacgacaugcccaucaccaacgaccagaagaagcugaugagcaacaacgugcagaucgugagacagcagagcuacagcaucaugugcaucaucaaggaggaggugcuggccuacguggugcagcugccccuguacggcgugaucgacacccccugcuggaagcugcacaccagcccccugugcaccaccaacaccaaggagggcagcaacaucugccugaccagaaccgacagaggcugguacugcgacaacgccggcagcgugagcuucuucccccaggccgagaccugcaaggugcagagcaacagaguguucugcgacaccaugaacagcagaacccugcccagcgaggugaaccugugcaacaucgacaucuucaaccccaaguacgacugcaagaucaugaccagcaagaccgacgugagcagcagcgugaucaccagccugggcgccaucgugagcugcuacggcaagaccaagugcaccgccagcaacaagugcagaggcaucaucaagaccuucagcaacggcugcgacuacgugagcaacaagggcguggacaccgugagcgugggcaacacccuguacuacgugaacaagcaggagggcaagagccuguacgugaagggcgagcccaucaucaacuucuacgacccccugguguuccccagcgacgaguucgacgccagcaucagccaggugaacgagaagaucaaccagagccuggccuucaucagaaagagcgacgagcugcugcacaacgugaacgugggcaagagcaccaccaacaucaugaucaccaccaucaucaucgugaucaucgugauccugcugcugcugaucgccgugggccuguuccuguacugcaaggccagaugaggacuaguggaagcauuuuccuggcugauuaaaagaaauuacucagcuauggucaucuguuccuguuagaaggcuaugcagcauauuauauacuaugcgcauguuaugaaaugcauaauaaaaaauuuuaaaaaaucuaaaagaucuaaaaaaaaaaaaaaaaaaaaaaaaaaaaaaaaaaaaaaaaaaaaaaaaaaaaaaaaaaaaaaaaugcaucccccccccccccccccccccccccccccccaaaggcucuuuucagagccaccagaauu

SEQ ID NO: 17379 - RNA, 1919 nt, Artificial Sequence
  mRNA product Design c-4 comprising derived and/or modified sequence from HRSV(Memphis-37)__AIY60640.1__F-del_DSCav1_mut5 (opt5)
gggagaguccgcucagccagguugcagaagcggcuuagcguguguccuaaucuucucucugcguguagguaggccugugccgcaaacaagcuuaccauggagcugcccauccucaagaccaacgccauuacaacgauccuggcugccgugacccuuugcuucgcgagcucccagaauauuacagaagaguuuuaccaaucuaccuguagcgcugucuccaaaggcuaucugucugcccucagaacagggugguacaccagcguuaucacaauugaacuguccaacaucaaggagaauaaaugcaacggaaccgacgccaaggugaaacuuaucaagcaggaacuggauaaguauaaaaaugcugugacggagcuccagcugcugaugcagucuaccccugccgcuggcagcggguccgccauugcgagcggaaucgccgucuguaaggugcuccaccuggagggcgaaguuaacaaaauuaagaaugcccuucugucuacaaacaaagcuguggucucccucagcgggugcggagugucuguucugaccuucaaggugcuugaccugaagaauuacaucgauaaacaacuccugccgauucugaacaagcaguccuguagcaucucuaauauugagacagucaucgaauuucagcagaaaaacaaucggcuccuggagaucacccgcgaguucuccgugaacgcuggcgugacgacacccgucagcaccuauaugcuuacaaauuccgaacugcucucucugauuaacgacaugccuaucaccaacgaucaaaagaaacuuaugagcaauaacguucagauugugagacagcaguccuacagcaucaugugcauuaucaaggaggaagugcuggccuaugucgugcaacucccccuguacggcguuaucgacaccccuuguuggaaacugcauacaucuccccucugcacgaccaauacaaaggagggguccaacauuugucugacccggacagaucgcggaugguacugcgacaaugcgggcagcgugagcuuuuucccucaggccgaaaccuguaagguccagucuaacagaguguuuugcgauacgaugaacuccagaacacugccgucugagguuaaucucugcaauaucgacauuuucaaccccaaauaugauuguaagaucaugaccagcaaaaccgacguguccagcucugucauuacaucccugggggcuaucgugagcugcuacggaaagaccaaauguacagccucuaauaagugccggggcaucauuaagacguuuuccaacgggugugauuaugucagcaauaaaggaguggacaccguuuccgugggcaacacacuuuacuaugucaauaagcaagagggcaaaucucuguacgugaagggggaaccuaucauuaacuucuaugacccccucguuuuuccuagcgaugaguucgacgcuuccaucucucaggugaacgagaaaauuaaucagagccuggccuuuauccgcaaguccgaugaacugcuccacaacgucaaugugggaaagagcaccacaaacauuaugaucaccacgaucauuaucgugauuaucguuauucugcuucugcucaucgccgucggccuguuccuguacugcaaagcuagaugaggacuaguggaagcauuuuccuggcugauuaaaagaaauuacucagcuauggucaucuguuccuguuagaaggcuaugcagcauauuauauacuaugcgcauguuaugaaaugcauaauaaaaaauuuuaaaaaaucuaaaagaucuaaaaaaaaaaaaaaaaaaaaaaaaaaaaaaaaaaaaaaaaaaaaaaaaaaaaaaaaaaaaaaaaugcaucccccccccccccccccccccccccccccccaaaggcucuuuucagagccaccagaauu

SEQ ID NO: 17380 - RNA, 1919 nt, Artificial Sequence
  mRNA product Design c-4 comprising derived and/or modified sequence from HRSV(Memphis-37)__AIY60640.1__F-del_DSCav1_mut5 (opt6)
gggagaguccgcucagccagguugcagaagcggcuuagcguguguccuaaucuucucucugcguguagguaggccugugccgcaaacaagcuuaccauggaauuacccaucuuaaaaacaaaugcaauaacaacaauacuagcagccguaacauuaugcuucgccucaagccaaaacauaacagaagaauuuuaccaaagcacauguuccgccguaucaaaaggauaucucucagcacuacguacuggaugguauacauccguaaucacaauugaacuaucaaacauuaaagaaaacaaaugcaauggaacagaugcgaaaguaaaacuaauaaaacaagaauuagauaaauauaaaaaugcaguaaccgaacuacaacuacuaaugcaaucaacucccgcugccgguagcggauccgccauagcaagcggaauugcuguauguaaaguccuacaucuugaaggcgaagucaacaaaaucaaaaaugcauuacucucgaccaacaaagcagucguaucacuaucaggaugcggagucucaguauuaacuuuuaaaguccuugaccuaaaaaacuacauagacaaacaacuacuaccaauucuaaauaaacaaaguugcagcauauccaauaucgaaacaguuauagaauuucaacaaaaaaacaaccgccuacuagaaaucacuagagaauuuucaguaaaugcaggcguaaccacaccagucucuaccuauaugcuuaccaacucugaauuauuaucacuuauaaacgacaugcccauaacaaaugaucaaaaaaaacuaaugagcaacaacguacaaauaguaagacaacaaagcuacagcauuauguguauaauaaaagaagaaguguuagcuuauguaguccaacuaccccucuauggcguuaucgauacaccaugcuggaaauuacacacaagcccucuaugcacaacuaacaccaaagaaggcucuaacauaugcuuaacaagaacagauagaggaugguauugcgauaacgcaggaucaguaucauucuuuccacaagcagaaacauguaaaguacaaucuaaccgaguauucugcgacacaaugaacucuagaacacuacccucagaaguuaaucucuguaauauugacauuuucaauccaaaauacgauugcaaaauaaugaccucuaaaaccgacguaucauccucaguuauaacguccuuaggagcaaucguaagcugcuauggcaaaacaaaauguaccgcaucaaacaaaugcagaggaauaauaaaaacauucucaaacggcugugacuacguaagcaauaaagguguugacacaguuucaguaggaaauacacuauacuauguaaauaaacaagaaggaaaaucucucuauguaaaaggagaacccauaauaaacuucuacgacccacucguauuuccaagcgaugaauuugaugcgagcauuucccagguaaaugaaaaaauaaaucaaucacuagcauucaucagaaaaagugaugaauuacuacacaauguuaacguaggaaaaucaacaacaaauaucaugauaacaacaaucauaauagucauaaucguaauauuacuauuacuaauagcaguagguuuauuucuauacuguaaagcaagguaaggacuaguggaagcauuuuccuggcugauuaaaagaaauuacucagcuauggucaucuguuccuguuagaaggcuaugcagcauauuauauacuaugcgcauguuaugaaaugcauaauaaaaaauuuuaaaaaaucuaaaagaucuaaaaaaaaaaaaaaaaaaaaaaaaaaaaaaaaaaaaaaaaaaaaaaaaaaaaaaaaaaaaaaaaugcaucccccccccccccccccccccccccccccccaaaggcucuuuucagagccaccagaauu

SEQ ID NO: 17381 - RNA, 1919 nt, Artificial Sequence
  mRNA product Design c-4 comprising derived and/or modified sequence from HRSV(Memphis-37)__AIY60640.1__F-del_DSCav1_mut5 (opt11)
gggagaguccgcucagccagguugcagaagcggcuuagcguguguccuaaucuucucucugcguguagguaggccugugccgcaaacaagcuuaccauggaacuucccauccuaaaaaccaacgccauaacaacaauccucgcagcagucacccucugcuucgccucuucacaaaacaucaccgaagaauuuuaccaaucaaccugcuccgccguguccaaaggcuaccucucagcacugcgcacaggaugguauaccagcguaaucaccaucgaacucuccaacaucaaggaaaacaaaugcaacggcaccgaugccaaagucaaacucaucaagcaagaacuugacaaauacaaaaacgccgugaccgagcuacaacuccucaugcaguccacuccagccgccggcuccggcagcgccaucgccuccggcaucgccguaugcaaaguccuccaccucgaaggcgaaguaaacaaaaucaagaacgcacuccuaagcaccaacaaagccgucgucucacucuccgguugcggcgucagcguccuaacauucaaaguucucgaccucaaaaacuacauagacaaacaacuccuccccauccucaacaaacaauccugcuccauaucaaacaucgaaaccguuaucgaauuucaacaaaaaaacaaccgccuccuagaaaucacccgcgaauuuuccgucaacgcaggcgucaccacccccguuuccaccuauaugcucaccaacuccgaacuccucucccucaucaacgacaugcccauuaccaacgaccaaaagaaacuuaugagcaacaacguucaaaucguccgacaacaaucauacuccaucaugugcauuaucaaagaagaaguacucgccuacguaguacaauuaccccucuacggcguaaucgacaccccaugcuggaaacuacacaccuccccccucuguaccaccaacaccaaagaaggcucuaacaucugccucacccgcacagaccguggcugguauugcgauaacgcagggucugucuccuucuucccccaagccgaaacaugcaaaguccaauccaacagagucuucugcgacaccaugaacucgagaacccuccccuccgaagucaaccuaugcaacaucgacaucuucaacccaaaauacgacugcaaaaucaugacuucaaaaacagacgugagcucguccgucaucacaagccuaggagcuaucguauccugcuacggaaaaacaaaaugcacugcuuccaacaaaugccgcggaaucauaaaaaccuucuccaacggcugcgacuacgucagcaacaaaggcgucgacacagucuccguaggcaacacccuauacuacgucaauaaacaagaaggcaagucccuauaugucaaaggcgagcccaucaucaauuucuaugauccccucguuuucccauccgacgaauuugacgcauccaucucccaagucaacgaaaaaauaaaccaaagccucgcauucauccgcaaauccgacgaacuccuccacaacguaaacguaggaaaauccacaacuaacaucaugaucaccaccaucaucaucgucauuaucgucauccuacuccuccucauagcagucggccucuuccucuacugcaaagcacgcuagggacuaguggaagcauuuuccuggcugauuaaaagaaauuacucagcuauggucaucuguuccuguuagaaggcuaugcagcauauuauauacuaugcgcauguuaugaaaugcauaauaaaaaauuuuaaaaaaucuaaaagaucuaaaaaaaaaaaaaaaaaaaaaaaaaaaaaaaaaaaaaaaaaaaaaaaaaaaaaaaaaaaaaaaaugcaucccccccccccccccccccccccccccccccaaaggcucuuuucagagccaccagaauu

SEQ ID NO: 17382 - RNA, 1837 nt, Artificial Sequence
  mRNA product Design c-5 comprising derived and/or modified sequence from HRSV(Memphis-37)__AIY60640.1__F-del_DSCav1_mut5 (opt1)
gggagagcggcucggccauuuugucccagucaguccggaggcugcggcugcagaaguaccgccugcggaguaacugcaaagaagcuuaccauggagcugcccauccucaagaccaacgccaucaccacgauccuggccgcggugacccugugcuucgccagcucccagaacaucaccgaggaguucuaccagagcacgugcuccgccgucagcaagggcuaccucuccgcccugcgcaccgggugguacaccagcgugaucaccaucgagcuguccaacaucaaggagaacaagugcaacggcaccgacgccaaggugaagcucaucaagcaggagcuggacaaguacaagaacgcggucacggagcugcagcuccugaugcagagcaccccggccgccggcuccgggagcgcgaucgccuccggcaucgccgucugcaaggugcugcaccucgagggcgaggugaacaagaucaagaacgcccugcuguccaccaacaaggccgucgugagccucuccggcugcggggugagcguccugaccuucaaggugcuggaccucaagaacuacaucgacaagcagcugcugcccauccugaacaagcagagcugcuccaucagcaacaucgagaccgucaucgaguuccagcagaagaacaaccgccuccuggagaucacgcgggaguucagcgugaacgcgggcgugaccacccccgucuccaccuacaugcugacgaacagcgagcuccugucccugaucaacgacaugccgaucaccaacgaccagaagaagcucaugagcaacaacgugcagaucgugcgccagcaguccuacagcaucaugugcaucaucaaggaggagguccuggccuacguggugcagcugccccucuacggggucaucgacacccccugcuggaagcugcacaccagcccccugugcacgaccaacaccaaggagggcuccaacaucugccucacccggacggaccgcgggugguacugcgacaacgccggcagcguguccuucuucccgcaggccgagaccugcaagguccagagcaaccggguguucugcgacaccaugaacucccggacccugcccagcgaggugaaccucugcaacaucgacaucuucaaccccaaguacgacugcaagaucaugacguccaagaccgacgucagcuccagcgugaucaccucccugggcgccaucgugagcugcuacgggaagaccaagugcacggcgagcaacaagugccgcggcaucaucaagaccuucuccaacgggugcgacuacgucagcaacaagggcguggacaccguguccgucggcaacacccuguacuacgugaacaagcaggagggcaagagccucuacgugaagggggagcccaucaucaacuucuacgacccgcuggucuuccccuccgacgaguucgacgccagcaucucccaggugaacgagaagaucaaccagagccuggccuucauccggaaguccgacgagcuccugcacaacgugaacgucggcaagagcaccacgaacaucaugaucaccaccaucaucaucgugaucaucgugauccugcugcuccugaucgccgucgggcuguuccucuacugcaaggcccgcugaggacuagucccuguucccagagcccacuuuuuuuucuuuuuuugaaauaaaauagccugucuuucagaucuaaaaaaaaaaaaaaaaaaaaaaaaaaaaaaaaaaaaaaaaaaaaaaaaaaaaaaaaaaaaaaaaugcaucccccccccccccccccccccccccccccccaaaggcucuuuucagagccaccagaauu

SEQ ID NO: 17383 - RNA, 1837 nt, Artificial Sequence
  mRNA product Design c-5 comprising derived and/or modified sequence from HRSV(Memphis-37)__AIY60640.1__F-del_DSCav1_mut5 (opt1)
gggagagcggcucggccauuuugucccagucaguccggaggcugcggcugcagaaguaccgccugcggaguaacugcaaagaagcuuaccauggagcugcccauccucaagaccaacgccaucaccacgauccuggccgcggugacccugugcuucgccagcucccagaacaucaccgaggaguucuaccagagcacgugcuccgccgucagcaagggcuaccucuccgcccugcgcaccgggugguacaccagcgugaucaccaucgagcuguccaacaucaaggagaacaagugcaacggcaccgacgccaaggugaagcucaucaagcaggagcuggacaaguacaagaacgcggucacggagcugcagcuccugaugcagagcaccccggccgccggguccggcagcgccaucgcguccgggaucgccgugugcaaggugcugcaccucgagggcgaggucaacaagaucaagaacgcccugcugagcaccaacaaggccguggugucccucagcggcugcggggucuccgugcugaccuucaaggugcuggaccucaagaacuacaucgacaagcagcugcugcccauccucaacaagcagagcugcuccaucagcaacaucgagacggucaucgaguuccagcagaagaacaaccggcugcuggagaucacccgcgaguucuccgugaacgccggcgugaccacccccgucagcacguacaugcucaccaacagcgagcugcugucccucaucaacgacaugcccaucaccaacgaccagaagaagcugaugagcaacaacgugcagaucgugcggcagcaguccuacagcaucaugugcaucaucaaggaggagguccuggcguacguggugcagcucccgcuguacggggucaucgacacccccugcuggaagcugcacacgagcccccucugcaccaccaacaccaaggagggcuccaacaucugccugacgcgcaccgaccgggggugguacugcgacaacgccggcuccgugagcuucuucccccaggccgagaccugcaaggugcaguccaaccgcgucuucugcgacaccaugaacagccggacgcucccguccgaggugaaccugugcaacaucgacaucuucaaccccaaguacgacugcaagaucaugaccagcaagaccgacgucuccagcuccgugaucaccagccugggcgccaucguguccugcuacgggaagacgaagugcaccgccagcaacaagugccggggcaucaucaagaccuucuccaacgggugcgacuacgucagcaacaagggcguggacaccgugagcgucggcaacacgcucuacuacgugaacaagcaggaggggaagucccuguacgugaagggcgagcccaucaucaacuucuacgacccccuggucuucccgagcgacgaguucgacgcguccaucagccaggugaacgagaagaucaaccagucccucgccuucauccgcaagagcgacgagcugcugcacaacgugaacgucgggaaguccaccaccaacaucaugaucaccaccaucaucaucgugaucaucgugauccuccugcugcucaucgccgucggccuguuccuguacugcaaggcccggugaggacuagucccuguucccagagcccacuuuuuuuucuuuuuuugaaauaaaauagccugucuuucagaucuaaaaaaaaaaaaaaaaaaaaaaaaaaaaaaaaaaaaaaaaaaaaaaaaaaaaaaaaaaaaaaaaugcaucccccccccccccccccccccccccccccccaaaggcucuuuucagagccaccagaauu

SEQ ID NO: 17384 - RNA, 1837 nt, Artificial Sequence
  mRNA product Design c-5 comprising derived and/or modified sequence from HRSV(Memphis-37)__AIY60640.1__F-del_DSCav1_mut5 (opt2)
gggagagcggcucggccauuuugucccagucaguccggaggcugcggcugcagaaguaccgccugcggaguaacugcaaagaagcuuaccauggagcuccccauccucaagaccaacgccaucaccaccauccucgccgccgucacccucugcuucgccuccucccagaacaucaccgaggaguucuaccaguccaccugcuccgccgucuccaagggcuaccucuccgcccuccgcaccggcugguacaccuccgucaucaccaucgagcucuccaacaucaaggagaacaagugcaacggcaccgacgccaaggucaagcucaucaagcaggagcucgacaaguacaagaacgccgucaccgagcuccagcuccucaugcaguccacccccgccgccggcuccggcuccgccaucgccuccggcaucgccgucugcaagguccuccaccucgagggcgaggucaacaagaucaagaacgcccuccucuccaccaacaaggccgucgucucccucuccggcugcggcgucuccguccucaccuucaagguccucgaccucaagaacuacaucgacaagcagcuccuccccauccucaacaagcaguccugcuccaucuccaacaucgagaccgucaucgaguuccagcagaagaacaaccgccuccucgagaucacccgcgaguucuccgucaacgccggcgucaccacccccgucuccaccuacaugcucaccaacuccgagcuccucucccucaucaacgacaugcccaucaccaacgaccagaagaagcucauguccaacaacguccagaucguccgccagcaguccuacuccaucaugugcaucaucaaggaggagguccucgccuacgucguccagcucccccucuacggcgucaucgacacccccugcuggaagcuccacaccuccccccucugcaccaccaacaccaaggagggcuccaacaucugccucacccgcaccgaccgcggcugguacugcgacaacgccggcuccgucuccuucuucccccaggccgagaccugcaagguccaguccaaccgcgucuucugcgacaccaugaacucccgcacccuccccuccgaggucaaccucugcaacaucgacaucuucaaccccaaguacgacugcaagaucaugaccuccaagaccgacgucuccuccuccgucaucaccucccucggcgccaucgucuccugcuacggcaagaccaagugcaccgccuccaacaagugccgcggcaucaucaagaccuucuccaacggcugcgacuacgucuccaacaagggcgucgacaccgucuccgucggcaacacccucuacuacgucaacaagcaggagggcaagucccucuacgucaagggcgagcccaucaucaacuucuacgacccccucgucuuccccuccgacgaguucgacgccuccaucucccaggucaacgagaagaucaaccagucccucgccuucauccgcaaguccgacgagcuccuccacaacgucaacgucggcaaguccaccaccaacaucaugaucaccaccaucaucaucgucaucaucgucauccuccuccuccucaucgccgucggccucuuccucuacugcaaggcccgcugaggacuagucccuguucccagagcccacuuuuuuuucuuuuuuugaaauaaaauagccugucuuucagaucuaaaaaaaaaaaaaaaaaaaaaaaaaaaaaaaaaaaaaaaaaaaaaaaaaaaaaaaaaaaaaaaaugcaucccccccccccccccccccccccccccccccaaaggcucuuuucagagccaccagaauu

SEQ ID NO: 17385 - RNA, 1837 nt, Artificial Sequence
  mRNA product Design c-5 comprising derived and/or modified sequence from HRSV(Memphis-37)__AIY60640.1__F-del_DSCav1_mut5 (opt3)
gggagagcggcucggccauuuugucccagucaguccggaggcugcggcugcagaaguaccgccugcggaguaacugcaaagaagcuuaccauggagcugcccauccucaagaccaacgccauuacaacuauacuugcugcagugacgcugugcuucgccagcucccagaauaucaccgaagaguuuuaccaaucuacauguucagcggucaguaaaggcuauuugagcgcuuuaagaacugggugguacaccuccguuauuacaaucgaacugucuaacauuaaggagaauaaaugcaacggaaccgacgccaaggugaaacuaaucaagcaggaacucgauaaguauaaaaaugcaguaacugagcugcagcuucugaugcagucgaccccugccgcugguucaggcagcgcaauagccagugggaucgcuguguguaaggucuugcaccucgagggagaagugaacaaaauuaagaaugcccugcuguccacaaacaaagcgguugugucucucagcggcugcggugucuccguguuaacguucaagguacuggaccuuaagaauuacaucgauaaacaauugcugccaauucuaaacaagcagucauguaguaucagcaauauagagacuguuauugaauuucagcagaaaaacaauaggcuccuggagaucacccgggaguucucugugaacgcaggggucacaacuccgguguccaccuauaugcuuacaaauucagaacuguugagccucauuaacgacaugcccaucaccaacgaucaaaagaaacugaugaguaauaacgugcagaucguccgccagcagucuuacuccauuaugugcauaaucaaggaggaaguuuuagccuaugugguacaacugccucucuacggagugauugacacgccauguuggaaacuucauacuagcccccugugcacaaccaauacuaaggagggcucgaacaucuguuugacacgaaccgaucguggcugguacugcgacaaugcugggucugucuccuuuuucccucaggccgaaacguguaaggugcagucaaacagaguguuuugcgauaccaugaauaguagaacacugccaagcgaggugaaccucugcaauauagacauuuucaaccccaaauaugauuguaagaucaugacuuccaaaaccgacgucucuagcucagugaucacaagucugggagcaauuguauccugcuacgguaagacuaaauguaccgcuagcaauaagugcaggggcaucauuaagacauuuucuaacgggugugauuauguuucaaauaaaggaguggacaccgucagugugggcaacacucuuuacuaugucaauaagcaagaggguaaaagccuguacgugaagggggaaccuauaaucaacuucuaugacccauugguuuuuccguccgaugaguucgacgccucuauuucgcagguuaacgagaaaaucaaucagagccucgcguuuauccggaaguccgaugaacuguuacacaacguaaaugucggaaagucaacgacaaacauuaugauaaccacuaucauuaucgugauuaucguuauacugcuacuccugaucgccgugggccuuuucuuguacugcaaagcacgcugaggacuagucccuguucccagagcccacuuuuuuuucuuuuuuugaaauaaaauagccugucuuucagaucuaaaaaaaaaaaaaaaaaaaaaaaaaaaaaaaaaaaaaaaaaaaaaaaaaaaaaaaaaaaaaaaaugcaucccccccccccccccccccccccccccccccaaaggcucuuuucagagccaccagaauu

SEQ ID NO: 17386 - RNA, 1837 nt, Artificial Sequence
  mRNA product Design c-5 comprising derived and/or modified sequence from HRSV(Memphis-37)__AIY60640.1__F-del_DSCav1_mut5 (opt4)
gggagagcggcucggccauuuugucccagucaguccggaggcugcggcugcagaaguaccgccugcggaguaacugcaaagaagcuuaccauggagcugcccauccugaagaccaacgccaucaccaccauccuggccgccgugacccugugcuucgccagcagccagaacaucaccgaggaguucuaccagagcaccugcagcgccgugagcaagggcuaccugagcgcccugagaaccggcugguacaccagcgugaucaccaucgagcugagcaacaucaaggagaacaagugcaacggcaccgacgccaaggugaagcugaucaagcaggagcuggacaaguacaagaacgccgugaccgagcugcagcugcugaugcagagcacccccgccgccggcagcggcagcgccaucgccagcggcaucgccgugugcaaggugcugcaccuggagggcgaggugaacaagaucaagaacgcccugcugagcaccaacaaggccguggugagccugagcggcugcggcgugagcgugcugaccuucaaggugcuggaccugaagaacuacaucgacaagcagcugcugcccauccugaacaagcagagcugcagcaucagcaacaucgagaccgugaucgaguuccagcagaagaacaacagacugcuggagaucaccagagaguucagcgugaacgccggcgugaccacccccgugagcaccuacaugcugaccaacagcgagcugcugagccugaucaacgacaugcccaucaccaacgaccagaagaagcugaugagcaacaacgugcagaucgugagacagcagagcuacagcaucaugugcaucaucaaggaggaggugcuggccuacguggugcagcugccccuguacggcgugaucgacacccccugcuggaagcugcacaccagcccccugugcaccaccaacaccaaggagggcagcaacaucugccugaccagaaccgacagaggcugguacugcgacaacgccggcagcgugagcuucuucccccaggccgagaccugcaaggugcagagcaacagaguguucugcgacaccaugaacagcagaacccugcccagcgaggugaaccugugcaacaucgacaucuucaaccccaaguacgacugcaagaucaugaccagcaagaccgacgugagcagcagcgugaucaccagccugggcgccaucgugagcugcuacggcaagaccaagugcaccgccagcaacaagugcagaggcaucaucaagaccuucagcaacggcugcgacuacgugagcaacaagggcguggacaccgugagcgugggcaacacccuguacuacgugaacaagcaggagggcaagagccuguacgugaagggcgagcccaucaucaacuucuacgacccccugguguuccccagcgacgaguucgacgccagcaucagccaggugaacgagaagaucaaccagagccuggccuucaucagaaagagcgacgagcugcugcacaacgugaacgugggcaagagcaccaccaacaucaugaucaccaccaucaucaucgugaucaucgugauccugcugcugcugaucgccgugggccuguuccuguacugcaaggccagaugaggacuagucccuguucccagagcccacuuuuuuuucuuuuuuugaaauaaaauagccugucuuucagaucuaaaaaaaaaaaaaaaaaaaaaaaaaaaaaaaaaaaaaaaaaaaaaaaaaaaaaaaaaaaaaaaaugcaucccccccccccccccccccccccccccccccaaaggcucuuuucagagccaccagaauu

SEQ ID NO: 17387 - RNA, 1837 nt, Artificial Sequence
  mRNA product Design c-5 comprising derived and/or modified sequence from HRSV(Memphis-37)__AIY60640.1__F-del_DSCav1_mut5 (opt5)
gggagagcggcucggccauuuugucccagucaguccggaggcugcggcugcagaaguaccgccugcggaguaacugcaaagaagcuuaccauggagcugcccauccucaagaccaacgccauuacaacgauccuggcugccgugacccuuugcuucgcgagcucccagaauauuacagaagaguuuuaccaaucuaccuguagcgcugucuccaaaggcuaucugucugcccucagaacagggugguacaccagcguuaucacaauugaacuguccaacaucaaggagaauaaaugcaacggaaccgacgccaaggugaaacuuaucaagcaggaacuggauaaguauaaaaaugcugugacggagcuccagcugcugaugcagucuaccccugccgcuggcagcggguccgccauugcgagcggaaucgccgucuguaaggugcuccaccuggagggcgaaguuaacaaaauuaagaaugcccuucugucuacaaacaaagcuguggucucccucagcgggugcggagugucuguucugaccuucaaggugcuugaccugaagaauuacaucgauaaacaacuccugccgauucugaacaagcaguccuguagcaucucuaauauugagacagucaucgaauuucagcagaaaaacaaucggcuccuggagaucacccgcgaguucuccgugaacgcuggcgugacgacacccgucagcaccuauaugcuuacaaauuccgaacugcucucucugauuaacgacaugccuaucaccaacgaucaaaagaaacuuaugagcaauaacguucagauugugagacagcaguccuacagcaucaugugcauuaucaaggaggaagugcuggccuaugucgugcaacucccccuguacggcguuaucgacaccccuuguuggaaacugcauacaucuccccucugcacgaccaauacaaaggagggguccaacauuugucugacccggacagaucgcggaugguacugcgacaaugcgggcagcgugagcuuuuucccucaggccgaaaccuguaagguccagucuaacagaguguuuugcgauacgaugaacuccagaacacugccgucugagguuaaucucugcaauaucgacauuuucaaccccaaauaugauuguaagaucaugaccagcaaaaccgacguguccagcucugucauuacaucccugggggcuaucgugagcugcuacggaaagaccaaauguacagccucuaauaagugccggggcaucauuaagacguuuuccaacgggugugauuaugucagcaauaaaggaguggacaccguuuccgugggcaacacacuuuacuaugucaauaagcaagagggcaaaucucuguacgugaagggggaaccuaucauuaacuucuaugacccccucguuuuuccuagcgaugaguucgacgcuuccaucucucaggugaacgagaaaauuaaucagagccuggccuuuauccgcaaguccgaugaacugcuccacaacgucaaugugggaaagagcaccacaaacauuaugaucaccacgaucauuaucgugauuaucguuauucugcuucugcucaucgccgucggccuguuccuguacugcaaagcuagaugaggacuagucccuguucccagagcccacuuuuuuuucuuuuuuugaaauaaaauagccugucuuucagaucuaaaaaaaaaaaaaaaaaaaaaaaaaaaaaaaaaaaaaaaaaaaaaaaaaaaaaaaaaaaaaaaaugcaucccccccccccccccccccccccccccccccaaaggcucuuuucagagccaccagaauu

SEQ ID NO: 17388 - RNA, 1837 nt, Artificial Sequence
  mRNA product Design c-5 comprising derived and/or modified sequence from HRSV(Memphis-37)__AIY60640.1__F-del_DSCav1_mut5 (opt6)
gggagagcggcucggccauuuugucccagucaguccggaggcugcggcugcagaaguaccgccugcggaguaacugcaaagaagcuuaccauggaauuacccaucuuaaaaacaaaugcaauaacaacaauacuagcagccguaacauuaugcuucgccucaagccaaaacauaacagaagaauuuuaccaaagcacauguuccgccguaucaaaaggauaucucucagcacuacguacuggaugguauacauccguaaucacaauugaacuaucaaacauuaaagaaaacaaaugcaauggaacagaugcgaaaguaaaacuaauaaaacaagaauuagauaaauauaaaaaugcaguaaccgaacuacaacuacuaaugcaaucaacucccgcugccgguagcggauccgccauagcaagcggaauugcuguauguaaaguccuacaucuugaaggcgaagucaacaaaaucaaaaaugcauuacucucgaccaacaaagcagucguaucacuaucaggaugcggagucucaguauuaacuuuuaaaguccuugaccuaaaaaacuacauagacaaacaacuacuaccaauucuaaauaaacaaaguugcagcauauccaauaucgaaacaguuauagaauuucaacaaaaaaacaaccgccuacuagaaaucacuagagaauuuucaguaaaugcaggcguaaccacaccagucucuaccuauaugcuuaccaacucugaauuauuaucacuuauaaacgacaugcccauaacaaaugaucaaaaaaaacuaaugagcaacaacguacaaauaguaagacaacaaagcuacagcauuauguguauaauaaaagaagaaguguuagcuuauguaguccaacuaccccucuauggcguuaucgauacaccaugcuggaaauuacacacaagcccucuaugcacaacuaacaccaaagaaggcucuaacauaugcuuaacaagaacagauagaggaugguauugcgauaacgcaggaucaguaucauucuuuccacaagcagaaacauguaaaguacaaucuaaccgaguauucugcgacacaaugaacucuagaacacuacccucagaaguuaaucucuguaauauugacauuuucaauccaaaauacgauugcaaaauaaugaccucuaaaaccgacguaucauccucaguuauaacguccuuaggagcaaucguaagcugcuauggcaaaacaaaauguaccgcaucaaacaaaugcagaggaauaauaaaaacauucucaaacggcugugacuacguaagcaauaaagguguugacacaguuucaguaggaaauacacuauacuauguaaauaaacaagaaggaaaaucucucuauguaaaaggagaacccauaauaaacuucuacgacccacucguauuuccaagcgaugaauuugaugcgagcauuucccagguaaaugaaaaaauaaaucaaucacuagcauucaucagaaaaagugaugaauuacuacacaauguuaacguaggaaaaucaacaacaaauaucaugauaacaacaaucauaauagucauaaucguaauauuacuauuacuaauagcaguagguuuauuucuauacuguaaagcaagguaaggacuagucccuguucccagagcccacuuuuuuuucuuuuuuugaaauaaaauagccugucuuucagaucuaaaaaaaaaaaaaaaaaaaaaaaaaaaaaaaaaaaaaaaaaaaaaaaaaaaaaaaaaaaaaaaaugcaucccccccccccccccccccccccccccccccaaaggcucuuuucagagccaccagaauu

SEQ ID NO: 17389 - RNA, 1837 nt, Artificial Sequence
  mRNA product Design c-5 comprising derived and/or modified sequence from HRSV(Memphis-37)__AIY60640.1__F-del_DSCav1_mut5 (opt11)
gggagagcggcucggccauuuugucccagucaguccggaggcugcggcugcagaaguaccgccugcggaguaacugcaaagaagcuuaccauggaacuucccauccuaaaaaccaacgccauaacaacaauccucgcagcagucacccucugcuucgccucuucacaaaacaucaccgaagaauuuuaccaaucaaccugcuccgccguguccaaaggcuaccucucagcacugcgcacaggaugguauaccagcguaaucaccaucgaacucuccaacaucaaggaaaacaaaugcaacggcaccgaugccaaagucaaacucaucaagcaagaacuugacaaauacaaaaacgccgugaccgagcuacaacuccucaugcaguccacuccagccgccggcuccggcagcgccaucgccuccggcaucgccguaugcaaaguccuccaccucgaaggcgaaguaaacaaaaucaagaacgcacuccuaagcaccaacaaagccgucgucucacucuccgguugcggcgucagcguccuaacauucaaaguucucgaccucaaaaacuacauagacaaacaacuccuccccauccucaacaaacaauccugcuccauaucaaacaucgaaaccguuaucgaauuucaacaaaaaaacaaccgccuccuagaaaucacccgcgaauuuuccgucaacgcaggcgucaccacccccguuuccaccuauaugcucaccaacuccgaacuccucucccucaucaacgacaugcccauuaccaacgaccaaaagaaacuuaugagcaacaacguucaaaucguccgacaacaaucauacuccaucaugugcauuaucaaagaagaaguacucgccuacguaguacaauuaccccucuacggcguaaucgacaccccaugcuggaaacuacacaccuccccccucuguaccaccaacaccaaagaaggcucuaacaucugccucacccgcacagaccguggcugguauugcgauaacgcagggucugucuccuucuucccccaagccgaaacaugcaaaguccaauccaacagagucuucugcgacaccaugaacucgagaacccuccccuccgaagucaaccuaugcaacaucgacaucuucaacccaaaauacgacugcaaaaucaugacuucaaaaacagacgugagcucguccgucaucacaagccuaggagcuaucguauccugcuacggaaaaacaaaaugcacugcuuccaacaaaugccgcggaaucauaaaaaccuucuccaacggcugcgacuacgucagcaacaaaggcgucgacacagucuccguaggcaacacccuauacuacgucaauaaacaagaaggcaagucccuauaugucaaaggcgagcccaucaucaauuucuaugauccccucguuuucccauccgacgaauuugacgcauccaucucccaagucaacgaaaaaauaaaccaaagccucgcauucauccgcaaauccgacgaacuccuccacaacguaaacguaggaaaauccacaacuaacaucaugaucaccaccaucaucaucgucauuaucgucauccuacuccuccucauagcagucggccucuuccucuacugcaaagcacgcuagggacuagucccuguucccagagcccacuuuuuuuucuuuuuuugaaauaaaauagccugucuuucagaucuaaaaaaaaaaaaaaaaaaaaaaaaaaaaaaaaaaaaaaaaaaaaaaaaaaaaaaaaaaaaaaaaugcaucccccccccccccccccccccccccccccccaaaggcucuuuucagagccaccagaauu

SEQ ID NO: 17390 - RNA, 1846 nt, Artificial Sequence
  mRNA product Design d-1 comprising derived and/or modified sequence from HRSV(Memphis-37)__AIY60640.1__F-del_DSCav1_mut5 (opt1)
gggagacccgugacccggaaguuguacggcuacgcgacuuucccucccacaaacccucgcgcccuuccuuuccuacuugggcccggcagaaagcuuaccauggagcugcccauccucaagaccaacgccaucaccacgauccuggccgcggugacccugugcuucgccagcucccagaacaucaccgaggaguucuaccagagcacgugcuccgccgucagcaagggcuaccucuccgcccugcgcaccgggugguacaccagcgugaucaccaucgagcuguccaacaucaaggagaacaagugcaacggcaccgacgccaaggugaagcucaucaagcaggagcuggacaaguacaagaacgcggucacggagcugcagcuccugaugcagagcaccccggccgccggcuccgggagcgcgaucgccuccggcaucgccgucugcaaggugcugcaccucgagggcgaggugaacaagaucaagaacgcccugcuguccaccaacaaggccgucgugagccucuccggcugcggggugagcguccugaccuucaaggugcuggaccucaagaacuacaucgacaagcagcugcugcccauccugaacaagcagagcugcuccaucagcaacaucgagaccgucaucgaguuccagcagaagaacaaccgccuccuggagaucacgcgggaguucagcgugaacgcgggcgugaccacccccgucuccaccuacaugcugacgaacagcgagcuccugucccugaucaacgacaugccgaucaccaacgaccagaagaagcucaugagcaacaacgugcagaucgugcgccagcaguccuacagcaucaugugcaucaucaaggaggagguccuggccuacguggugcagcugccccucuacggggucaucgacacccccugcuggaagcugcacaccagcccccugugcacgaccaacaccaaggagggcuccaacaucugccucacccggacggaccgcgggugguacugcgacaacgccggcagcguguccuucuucccgcaggccgagaccugcaagguccagagcaaccggguguucugcgacaccaugaacucccggacccugcccagcgaggugaaccucugcaacaucgacaucuucaaccccaaguacgacugcaagaucaugacguccaagaccgacgucagcuccagcgugaucaccucccugggcgccaucgugagcugcuacgggaagaccaagugcacggcgagcaacaagugccgcggcaucaucaagaccuucuccaacgggugcgacuacgucagcaacaagggcguggacaccguguccgucggcaacacccuguacuacgugaacaagcaggagggcaagagccucuacgugaagggggagcccaucaucaacuucuacgacccgcuggucuuccccuccgacgaguucgacgccagcaucucccaggugaacgagaagaucaaccagagccuggccuucauccggaaguccgacgagcuccugcacaacgugaacgucggcaagagcaccacgaacaucaugaucaccaccaucaucaucgugaucaucgugauccugcugcuccugaucgccgucgggcuguuccucuacugcaaggcccgcugaggacuagucccuguucccagagcccacuuuuuuuucuuuuuuugaaauaaaauagccugucuuucagaucuaaaaaaaaaaaaaaaaaaaaaaaaaaaaaaaaaaaaaaaaaaaaaaaaaaaaaaaaaaaaaaaaugcaucccccccccccccccccccccccccccccccaaaggcucuuuucagagccaccagaauu

SEQ ID NO: 17391 - RNA, 1846 nt, Artificial Sequence
  mRNA product Design d-1 comprising derived and/or modified sequence from HRSV(Memphis-37)__AIY60640.1__F-del_DSCav1_mut5 (opt1)
gggagacccgugacccggaaguuguacggcuacgcgacuuucccucccacaaacccucgcgcccuuccuuuccuacuugggcccggcagaaagcuuaccauggagcugcccauccucaagaccaacgccaucaccacgauccuggccgcggugacccugugcuucgccagcucccagaacaucaccgaggaguucuaccagagcacgugcuccgccgucagcaagggcuaccucuccgcccugcgcaccgggugguacaccagcgugaucaccaucgagcuguccaacaucaaggagaacaagugcaacggcaccgacgccaaggugaagcucaucaagcaggagcuggacaaguacaagaacgcggucacggagcugcagcuccugaugcagagcaccccggccgccggguccggcagcgccaucgcguccgggaucgccgugugcaaggugcugcaccucgagggcgaggucaacaagaucaagaacgcccugcugagcaccaacaaggccguggugucccucagcggcugcggggucuccgugcugaccuucaaggugcuggaccucaagaacuacaucgacaagcagcugcugcccauccucaacaagcagagcugcuccaucagcaacaucgagacggucaucgaguuccagcagaagaacaaccggcugcuggagaucacccgcgaguucuccgugaacgccggcgugaccacccccgucagcacguacaugcucaccaacagcgagcugcugucccucaucaacgacaugcccaucaccaacgaccagaagaagcugaugagcaacaacgugcagaucgugcggcagcaguccuacagcaucaugugcaucaucaaggaggagguccuggcguacguggugcagcucccgcuguacggggucaucgacacccccugcuggaagcugcacacgagcccccucugcaccaccaacaccaaggagggcuccaacaucugccugacgcgcaccgaccgggggugguacugcgacaacgccggcuccgugagcuucuucccccaggccgagaccugcaaggugcaguccaaccgcgucuucugcgacaccaugaacagccggacgcucccguccgaggugaaccugugcaacaucgacaucuucaaccccaaguacgacugcaagaucaugaccagcaagaccgacgucuccagcuccgugaucaccagccugggcgccaucguguccugcuacgggaagacgaagugcaccgccagcaacaagugccggggcaucaucaagaccuucuccaacgggugcgacuacgucagcaacaagggcguggacaccgugagcgucggcaacacgcucuacuacgugaacaagcaggaggggaagucccuguacgugaagggcgagcccaucaucaacuucuacgacccccuggucuucccgagcgacgaguucgacgcguccaucagccaggugaacgagaagaucaaccagucccucgccuucauccgcaagagcgacgagcugcugcacaacgugaacgucgggaaguccaccaccaacaucaugaucaccaccaucaucaucgugaucaucgugauccuccugcugcucaucgccgucggccuguuccuguacugcaaggcccggugaggacuagucccuguucccagagcccacuuuuuuuucuuuuuuugaaauaaaauagccugucuuucagaucuaaaaaaaaaaaaaaaaaaaaaaaaaaaaaaaaaaaaaaaaaaaaaaaaaaaaaaaaaaaaaaaaugcaucccccccccccccccccccccccccccccccaaaggcucuuuucagagccaccagaauu

SEQ ID NO: 17392 - RNA, 1846 nt, Artificial Sequence
  mRNA product Design d-1 comprising derived and/or modified sequence from HRSV(Memphis-37)__AIY60640.1__F-del_DSCav1_mut5 (opt2)
gggagacccgugacccggaaguuguacggcuacgcgacuuucccucccacaaacccucgcgcccuuccuuuccuacuugggcccggcagaaagcuuaccauggagcuccccauccucaagaccaacgccaucaccaccauccucgccgccgucacccucugcuucgccuccucccagaacaucaccgaggaguucuaccaguccaccugcuccgccgucuccaagggcuaccucuccgcccuccgcaccggcugguacaccuccgucaucaccaucgagcucuccaacaucaaggagaacaagugcaacggcaccgacgccaaggucaagcucaucaagcaggagcucgacaaguacaagaacgccgucaccgagcuccagcuccucaugcaguccacccccgccgccggcuccggcuccgccaucgccuccggcaucgccgucugcaagguccuccaccucgagggcgaggucaacaagaucaagaacgcccuccucuccaccaacaaggccgucgucucccucuccggcugcggcgucuccguccucaccuucaagguccucgaccucaagaacuacaucgacaagcagcuccuccccauccucaacaagcaguccugcuccaucuccaacaucgagaccgucaucgaguuccagcagaagaacaaccgccuccucgagaucacccgcgaguucuccgucaacgccggcgucaccacccccgucuccaccuacaugcucaccaacuccgagcuccucucccucaucaacgacaugcccaucaccaacgaccagaagaagcucauguccaacaacguccagaucguccgccagcaguccuacuccaucaugugcaucaucaaggaggagguccucgccuacgucguccagcucccccucuacggcgucaucgacacccccugcuggaagcuccacaccuccccccucugcaccaccaacaccaaggagggcuccaacaucugccucacccgcaccgaccgcggcugguacugcgacaacgccggcuccgucuccuucuucccccaggccgagaccugcaagguccaguccaaccgcgucuucugcgacaccaugaacucccgcacccuccccuccgaggucaaccucugcaacaucgacaucuucaaccccaaguacgacugcaagaucaugaccuccaagaccgacgucuccuccuccgucaucaccucccucggcgccaucgucuccugcuacggcaagaccaagugcaccgccuccaacaagugccgcggcaucaucaagaccuucuccaacggcugcgacuacgucuccaacaagggcgucgacaccgucuccgucggcaacacccucuacuacgucaacaagcaggagggcaagucccucuacgucaagggcgagcccaucaucaacuucuacgacccccucgucuuccccuccgacgaguucgacgccuccaucucccaggucaacgagaagaucaaccagucccucgccuucauccgcaaguccgacgagcuccuccacaacgucaacgucggcaaguccaccaccaacaucaugaucaccaccaucaucaucgucaucaucgucauccuccuccuccucaucgccgucggccucuuccucuacugcaaggcccgcugaggacuagucccuguucccagagcccacuuuuuuuucuuuuuuugaaauaaaauagccugucuuucagaucuaaaaaaaaaaaaaaaaaaaaaaaaaaaaaaaaaaaaaaaaaaaaaaaaaaaaaaaaaaaaaaaaugcaucccccccccccccccccccccccccccccccaaaggcucuuuucagagccaccagaauu

SEQ ID NO: 17393 - RNA, 1846 nt, Artificial Sequence
  mRNA product Design d-1 comprising derived and/or modified sequence from HRSV(Memphis-37)__AIY60640.1__F-del_DSCav1_mut5 (opt3)
gggagacccgugacccggaaguuguacggcuacgcgacuuucccucccacaaacccucgcgcccuuccuuuccuacuugggcccggcagaaagcuuaccauggagcugcccauccucaagaccaacgccauuacaacuauacuugcugcagugacgcugugcuucgccagcucccagaauaucaccgaagaguuuuaccaaucuacauguucagcggucaguaaaggcuauuugagcgcuuuaagaacugggugguacaccuccguuauuacaaucgaacugucuaacauuaaggagaauaaaugcaacggaaccgacgccaaggugaaacuaaucaagcaggaacucgauaaguauaaaaaugcaguaacugagcugcagcuucugaugcagucgaccccugccgcugguucaggcagcgcaauagccagugggaucgcuguguguaaggucuugcaccucgagggagaagugaacaaaauuaagaaugcccugcuguccacaaacaaagcgguugugucucucagcggcugcggugucuccguguuaacguucaagguacuggaccuuaagaauuacaucgauaaacaauugcugccaauucuaaacaagcagucauguaguaucagcaauauagagacuguuauugaauuucagcagaaaaacaauaggcuccuggagaucacccgggaguucucugugaacgcaggggucacaacuccgguguccaccuauaugcuuacaaauucagaacuguugagccucauuaacgacaugcccaucaccaacgaucaaaagaaacugaugaguaauaacgugcagaucguccgccagcagucuuacuccauuaugugcauaaucaaggaggaaguuuuagccuaugugguacaacugccucucuacggagugauugacacgccauguuggaaacuucauacuagcccccugugcacaaccaauacuaaggagggcucgaacaucuguuugacacgaaccgaucguggcugguacugcgacaaugcugggucugucuccuuuuucccucaggccgaaacguguaaggugcagucaaacagaguguuuugcgauaccaugaauaguagaacacugccaagcgaggugaaccucugcaauauagacauuuucaaccccaaauaugauuguaagaucaugacuuccaaaaccgacgucucuagcucagugaucacaagucugggagcaauuguauccugcuacgguaagacuaaauguaccgcuagcaauaagugcaggggcaucauuaagacauuuucuaacgggugugauuauguuucaaauaaaggaguggacaccgucagugugggcaacacucuuuacuaugucaauaagcaagaggguaaaagccuguacgugaagggggaaccuauaaucaacuucuaugacccauugguuuuuccguccgaugaguucgacgccucuauuucgcagguuaacgagaaaaucaaucagagccucgcguuuauccggaaguccgaugaacuguuacacaacguaaaugucggaaagucaacgacaaacauuaugauaaccacuaucauuaucgugauuaucguuauacugcuacuccugaucgccgugggccuuuucuuguacugcaaagcacgcugaggacuagucccuguucccagagcccacuuuuuuuucuuuuuuugaaauaaaauagccugucuuucagaucuaaaaaaaaaaaaaaaaaaaaaaaaaaaaaaaaaaaaaaaaaaaaaaaaaaaaaaaaaaaaaaaaugcaucccccccccccccccccccccccccccccccaaaggcucuuuucagagccaccagaauu

SEQ ID NO: 17394 - RNA, 1846 nt, Artificial Sequence
  mRNA product Design d-1 comprising derived and/or modified sequence from HRSV(Memphis-37)__AIY60640.1__F-del_DSCav1_mut5 (opt4)
gggagacccgugacccggaaguuguacggcuacgcgacuuucccucccacaaacccucgcgcccuuccuuuccuacuugggcccggcagaaagcuuaccauggagcugcccauccugaagaccaacgccaucaccaccauccuggccgccgugacccugugcuucgccagcagccagaacaucaccgaggaguucuaccagagcaccugcagcgccgugagcaagggcuaccugagcgcccugagaaccggcugguacaccagcgugaucaccaucgagcugagcaacaucaaggagaacaagugcaacggcaccgacgccaaggugaagcugaucaagcaggagcuggacaaguacaagaacgccgugaccgagcugcagcugcugaugcagagcacccccgccgccggcagcggcagcgccaucgccagcggcaucgccgugugcaaggugcugcaccuggagggcgaggugaacaagaucaagaacgcccugcugagcaccaacaaggccguggugagccugagcggcugcggcgugagcgugcugaccuucaaggugcuggaccugaagaacuacaucgacaagcagcugcugcccauccugaacaagcagagcugcagcaucagcaacaucgagaccgugaucgaguuccagcagaagaacaacagacugcuggagaucaccagagaguucagcgugaacgccggcgugaccacccccgugagcaccuacaugcugaccaacagcgagcugcugagccugaucaacgacaugcccaucaccaacgaccagaagaagcugaugagcaacaacgugcagaucgugagacagcagagcuacagcaucaugugcaucaucaaggaggaggugcuggccuacguggugcagcugccccuguacggcgugaucgacacccccugcuggaagcugcacaccagcccccugugcaccaccaacaccaaggagggcagcaacaucugccugaccagaaccgacagaggcugguacugcgacaacgccggcagcgugagcuucuucccccaggccgagaccugcaaggugcagagcaacagaguguucugcgacaccaugaacagcagaacccugcccagcgaggugaaccugugcaacaucgacaucuucaaccccaaguacgacugcaagaucaugaccagcaagaccgacgugagcagcagcgugaucaccagccugggcgccaucgugagcugcuacggcaagaccaagugcaccgccagcaacaagugcagaggcaucaucaagaccuucagcaacggcugcgacuacgugagcaacaagggcguggacaccgugagcgugggcaacacccuguacuacgugaacaagcaggagggcaagagccuguacgugaagggcgagcccaucaucaacuucuacgacccccugguguuccccagcgacgaguucgacgccagcaucagccaggugaacgagaagaucaaccagagccuggccuucaucagaaagagcgacgagcugcugcacaacgugaacgugggcaagagcaccaccaacaucaugaucaccaccaucaucaucgugaucaucgugauccugcugcugcugaucgccgugggccuguuccuguacugcaaggccagaugaggacuagucccuguucccagagcccacuuuuuuuucuuuuuuugaaauaaaauagccugucuuucagaucuaaaaaaaaaaaaaaaaaaaaaaaaaaaaaaaaaaaaaaaaaaaaaaaaaaaaaaaaaaaaaaaaugcaucccccccccccccccccccccccccccccccaaaggcucuuuucagagccaccagaauu

SEQ ID NO: 17395 - RNA, 1846 nt, Artificial Sequence
  mRNA product Design d-1 comprising derived and/or modified sequence from HRSV(Memphis-37)__AIY60640.1__F-del_DSCav1_mut5 (opt5)
gggagacccgugacccggaaguuguacggcuacgcgacuuucccucccacaaacccucgcgcccuuccuuuccuacuugggcccggcagaaagcuuaccauggagcugcccauccucaagaccaacgccauuacaacgauccuggcugccgugacccuuugcuucgcgagcucccagaauauuacagaagaguuuuaccaaucuaccuguagcgcugucuccaaaggcuaucugucugcccucagaacagggugguacaccagcguuaucacaauugaacuguccaacaucaaggagaauaaaugcaacggaaccgacgccaaggugaaacuuaucaagcaggaacuggauaaguauaaaaaugcugugacggagcuccagcugcugaugcagucuaccccugccgcuggcagcggguccgccauugcgagcggaaucgccgucuguaaggugcuccaccuggagggcgaaguuaacaaaauuaagaaugcccuucugucuacaaacaaagcuguggucucccucagcgggugcggagugucuguucugaccuucaaggugcuugaccugaagaauuacaucgauaaacaacuccugccgauucugaacaagcaguccuguagcaucucuaauauugagacagucaucgaauuucagcagaaaaacaaucggcuccuggagaucacccgcgaguucuccgugaacgcuggcgugacgacacccgucagcaccuauaugcuuacaaauuccgaacugcucucucugauuaacgacaugccuaucaccaacgaucaaaagaaacuuaugagcaauaacguucagauugugagacagcaguccuacagcaucaugugcauuaucaaggaggaagugcuggccuaugucgugcaacucccccuguacggcguuaucgacaccccuuguuggaaacugcauacaucuccccucugcacgaccaauacaaaggagggguccaacauuugucugacccggacagaucgcggaugguacugcgacaaugcgggcagcgugagcuuuuucccucaggccgaaaccuguaagguccagucuaacagaguguuuugcgauacgaugaacuccagaacacugccgucugagguuaaucucugcaauaucgacauuuucaaccccaaauaugauuguaagaucaugaccagcaaaaccgacguguccagcucugucauuacaucccugggggcuaucgugagcugcuacggaaagaccaaauguacagccucuaauaagugccggggcaucauuaagacguuuuccaacgggugugauuaugucagcaauaaaggaguggacaccguuuccgugggcaacacacuuuacuaugucaauaagcaagagggcaaaucucuguacgugaagggggaaccuaucauuaacuucuaugacccccucguuuuuccuagcgaugaguucgacgcuuccaucucucaggugaacgagaaaauuaaucagagccuggccuuuauccgcaaguccgaugaacugcuccacaacgucaaugugggaaagagcaccacaaacauuaugaucaccacgaucauuaucgugauuaucguuauucugcuucugcucaucgccgucggccuguuccuguacugcaaagcuagaugaggacuagucccuguucccagagcccacuuuuuuuucuuuuuuugaaauaaaauagccugucuuucagaucuaaaaaaaaaaaaaaaaaaaaaaaaaaaaaaaaaaaaaaaaaaaaaaaaaaaaaaaaaaaaaaaaugcaucccccccccccccccccccccccccccccccaaaggcucuuuucagagccaccagaauu

SEQ ID NO: 17396 - RNA, 1846 nt, Artificial Sequence
  mRNA product Design d-1 comprising derived and/or modified sequence from HRSV(Memphis-37)__AIY60640.1__F-del_DSCav1_mut5 (opt6)
gggagacccgugacccggaaguuguacggcuacgcgacuuucccucccacaaacccucgcgcccuuccuuuccuacuugggcccggcagaaagcuuaccauggaauuacccaucuuaaaaacaaaugcaauaacaacaauacuagcagccguaacauuaugcuucgccucaagccaaaacauaacagaagaauuuuaccaaagcacauguuccgccguaucaaaaggauaucucucagcacuacguacuggaugguauacauccguaaucacaauugaacuaucaaacauuaaagaaaacaaaugcaauggaacagaugcgaaaguaaaacuaauaaaacaagaauuagauaaauauaaaaaugcaguaaccgaacuacaacuacuaaugcaaucaacucccgcugccgguagcggauccgccauagcaagcggaauugcuguauguaaaguccuacaucuugaaggcgaagucaacaaaaucaaaaaugcauuacucucgaccaacaaagcagucguaucacuaucaggaugcggagucucaguauuaacuuuuaaaguccuugaccuaaaaaacuacauagacaaacaacuacuaccaauucuaaauaaacaaaguugcagcauauccaauaucgaaacaguuauagaauuucaacaaaaaaacaaccgccuacuagaaaucacuagagaauuuucaguaaaugcaggcguaaccacaccagucucuaccuauaugcuuaccaacucugaauuauuaucacuuauaaacgacaugcccauaacaaaugaucaaaaaaaacuaaugagcaacaacguacaaauaguaagacaacaaagcuacagcauuauguguauaauaaaagaagaaguguuagcuuauguaguccaacuaccccucuauggcguuaucgauacaccaugcuggaaauuacacacaagcccucuaugcacaacuaacaccaaagaaggcucuaacauaugcuuaacaagaacagauagaggaugguauugcgauaacgcaggaucaguaucauucuuuccacaagcagaaacauguaaaguacaaucuaaccgaguauucugcgacacaaugaacucuagaacacuacccucagaaguuaaucucuguaauauugacauuuucaauccaaaauacgauugcaaaauaaugaccucuaaaaccgacguaucauccucaguuauaacguccuuaggagcaaucguaagcugcuauggcaaaacaaaauguaccgcaucaaacaaaugcagaggaauaauaaaaacauucucaaacggcugugacuacguaagcaauaaagguguugacacaguuucaguaggaaauacacuauacuauguaaauaaacaagaaggaaaaucucucuauguaaaaggagaacccauaauaaacuucuacgacccacucguauuuccaagcgaugaauuugaugcgagcauuucccagguaaaugaaaaaauaaaucaaucacuagcauucaucagaaaaagugaugaauuacuacacaauguuaacguaggaaaaucaacaacaaauaucaugauaacaacaaucauaauagucauaaucguaauauuacuauuacuaauagcaguagguuuauuucuauacuguaaagcaagguaaggacuagucccuguucccagagcccacuuuuuuuucuuuuuuugaaauaaaauagccugucuuucagaucuaaaaaaaaaaaaaaaaaaaaaaaaaaaaaaaaaaaaaaaaaaaaaaaaaaaaaaaaaaaaaaaaugcaucccccccccccccccccccccccccccccccaaaggcucuuuucagagccaccagaauu

SEQ ID NO: 17397 - RNA, 1846 nt, Artificial Sequence
  mRNA product Design d-1 comprising derived and/or modified sequence from HRSV(Memphis-37)__AIY60640.1__F-del_DSCav1_mut5 (opt11)
gggagacccgugacccggaaguuguacggcuacgcgacuuucccucccacaaacccucgcgcccuuccuuuccuacuugggcccggcagaaagcuuaccauggaacuucccauccuaaaaaccaacgccauaacaacaauccucgcagcagucacccucugcuucgccucuucacaaaacaucaccgaagaauuuuaccaaucaaccugcuccgccguguccaaaggcuaccucucagcacugcgcacaggaugguauaccagcguaaucaccaucgaacucuccaacaucaaggaaaacaaaugcaacggcaccgaugccaaagucaaacucaucaagcaagaacuugacaaauacaaaaacgccgugaccgagcuacaacuccucaugcaguccacuccagccgccggcuccggcagcgccaucgccuccggcaucgccguaugcaaaguccuccaccucgaaggcgaaguaaacaaaaucaagaacgcacuccuaagcaccaacaaagccgucgucucacucuccgguugcggcgucagcguccuaacauucaaaguucucgaccucaaaaacuacauagacaaacaacuccuccccauccucaacaaacaauccugcuccauaucaaacaucgaaaccguuaucgaauuucaacaaaaaaacaaccgccuccuagaaaucacccgcgaauuuuccgucaacgcaggcgucaccacccccguuuccaccuauaugcucaccaacuccgaacuccucucccucaucaacgacaugcccauuaccaacgaccaaaagaaacuuaugagcaacaacguucaaaucguccgacaacaaucauacuccaucaugugcauuaucaaagaagaaguacucgccuacguaguacaauuaccccucuacggcguaaucgacaccccaugcuggaaacuacacaccuccccccucuguaccaccaacaccaaagaaggcucuaacaucugccucacccgcacagaccguggcugguauugcgauaacgcagggucugucuccuucuucccccaagccgaaacaugcaaaguccaauccaacagagucuucugcgacaccaugaacucgagaacccuccccuccgaagucaaccuaugcaacaucgacaucuucaacccaaaauacgacugcaaaaucaugacuucaaaaacagacgugagcucguccgucaucacaagccuaggagcuaucguauccugcuacggaaaaacaaaaugcacugcuuccaacaaaugccgcggaaucauaaaaaccuucuccaacggcugcgacuacgucagcaacaaaggcgucgacacagucuccguaggcaacacccuauacuacgucaauaaacaagaaggcaagucccuauaugucaaaggcgagcccaucaucaauuucuaugauccccucguuuucccauccgacgaauuugacgcauccaucucccaagucaacgaaaaaauaaaccaaagccucgcauucauccgcaaauccgacgaacuccuccacaacguaaacguaggaaaauccacaacuaacaucaugaucaccaccaucaucaucgucauuaucgucauccuacuccuccucauagcagucggccucuuccucuacugcaaagcacgcuagggacuagucccuguucccagagcccacuuuuuuuucuuuuuuugaaauaaaauagccugucuuucagaucuaaaaaaaaaaaaaaaaaaaaaaaaaaaaaaaaaaaaaaaaaaaaaaaaaaaaaaaaaaaaaaaaugcaucccccccccccccccccccccccccccccccaaaggcucuuuucagagccaccagaauu

SEQ ID NO: 17398 - RNA, 1901 nt, Artificial Sequence
  mRNA product Design d-2 comprising derived and/or modified sequence from HRSV(Memphis-37)__AIY60640.1__F-del_DSCav1_mut5 (opt1)
gggagagcggcucggccauuuugucccagucaguccggaggcugcggcugcagaaguaccgccugcggaguaacugcaaagaagcuuaccauggagcugcccauccucaagaccaacgccaucaccacgauccuggccgcggugacccugugcuucgccagcucccagaacaucaccgaggaguucuaccagagcacgugcuccgccgucagcaagggcuaccucuccgcccugcgcaccgggugguacaccagcgugaucaccaucgagcuguccaacaucaaggagaacaagugcaacggcaccgacgccaaggugaagcucaucaagcaggagcuggacaaguacaagaacgcggucacggagcugcagcuccugaugcagagcaccccggccgccggcuccgggagcgcgaucgccuccggcaucgccgucugcaaggugcugcaccucgagggcgaggugaacaagaucaagaacgcccugcuguccaccaacaaggccgucgugagccucuccggcugcggggugagcguccugaccuucaaggugcuggaccucaagaacuacaucgacaagcagcugcugcccauccugaacaagcagagcugcuccaucagcaacaucgagaccgucaucgaguuccagcagaagaacaaccgccuccuggagaucacgcgggaguucagcgugaacgcgggcgugaccacccccgucuccaccuacaugcugacgaacagcgagcuccugucccugaucaacgacaugccgaucaccaacgaccagaagaagcucaugagcaacaacgugcagaucgugcgccagcaguccuacagcaucaugugcaucaucaaggaggagguccuggccuacguggugcagcugccccucuacggggucaucgacacccccugcuggaagcugcacaccagcccccugugcacgaccaacaccaaggagggcuccaacaucugccucacccggacggaccgcgggugguacugcgacaacgccggcagcguguccuucuucccgcaggccgagaccugcaagguccagagcaaccggguguucugcgacaccaugaacucccggacccugcccagcgaggugaaccucugcaacaucgacaucuucaaccccaaguacgacugcaagaucaugacguccaagaccgacgucagcuccagcgugaucaccucccugggcgccaucgugagcugcuacgggaagaccaagugcacggcgagcaacaagugccgcggcaucaucaagaccuucuccaacgggugcgacuacgucagcaacaagggcguggacaccguguccgucggcaacacccuguacuacgugaacaagcaggagggcaagagccucuacgugaagggggagcccaucaucaacuucuacgacccgcuggucuuccccuccgacgaguucgacgccagcaucucccaggugaacgagaagaucaaccagagccuggccuucauccggaaguccgacgagcuccugcacaacgugaacgucggcaagagcaccacgaacaucaugaucaccaccaucaucaucgugaucaucgugauccugcugcuccugaucgccgucgggcuguuccucuacugcaaggcccgcugaggacuaguaauaaggaaacuguaugaaugucugugggcaggaagugaagagauccuucuguaaagguuuuuggaauuaugucugcugaauaauaaacuuuuuugaaauaauaaaucugguagaaaaaugagaucuaaaaaaaaaaaaaaaaaaaaaaaaaaaaaaaaaaaaaaaaaaaaaaaaaaaaaaaaaaaaaaaaugcaucccccccccccccccccccccccccccccccaaaggcucuuuucagagccaccagaauu

SEQ ID NO: 17399 - RNA, 1901 nt, Artificial Sequence
  mRNA product Design d-2 comprising derived and/or modified sequence from HRSV(Memphis-37)__AIY60640.1__F-del_DSCav1_mut5 (opt1)
gggagagcggcucggccauuuugucccagucaguccggaggcugcggcugcagaaguaccgccugcggaguaacugcaaagaagcuuaccauggagcugcccauccucaagaccaacgccaucaccacgauccuggccgcggugacccugugcuucgccagcucccagaacaucaccgaggaguucuaccagagcacgugcuccgccgucagcaagggcuaccucuccgcccugcgcaccgggugguacaccagcgugaucaccaucgagcuguccaacaucaaggagaacaagugcaacggcaccgacgccaaggugaagcucaucaagcaggagcuggacaaguacaagaacgcggucacggagcugcagcuccugaugcagagcaccccggccgccggguccggcagcgccaucgcguccgggaucgccgugugcaaggugcugcaccucgagggcgaggucaacaagaucaagaacgcccugcugagcaccaacaaggccguggugucccucagcggcugcggggucuccgugcugaccuucaaggugcuggaccucaagaacuacaucgacaagcagcugcugcccauccucaacaagcagagcugcuccaucagcaacaucgagacggucaucgaguuccagcagaagaacaaccggcugcuggagaucacccgcgaguucuccgugaacgccggcgugaccacccccgucagcacguacaugcucaccaacagcgagcugcugucccucaucaacgacaugcccaucaccaacgaccagaagaagcugaugagcaacaacgugcagaucgugcggcagcaguccuacagcaucaugugcaucaucaaggaggagguccuggcguacguggugcagcucccgcuguacggggucaucgacacccccugcuggaagcugcacacgagcccccucugcaccaccaacaccaaggagggcuccaacaucugccugacgcgcaccgaccgggggugguacugcgacaacgccggcuccgugagcuucuucccccaggccgagaccugcaaggugcaguccaaccgcgucuucugcgacaccaugaacagccggacgcucccguccgaggugaaccugugcaacaucgacaucuucaaccccaaguacgacugcaagaucaugaccagcaagaccgacgucuccagcuccgugaucaccagccugggcgccaucguguccugcuacgggaagacgaagugcaccgccagcaacaagugccggggcaucaucaagaccuucuccaacgggugcgacuacgucagcaacaagggcguggacaccgugagcgucggcaacacgcucuacuacgugaacaagcaggaggggaagucccuguacgugaagggcgagcccaucaucaacuucuacgacccccuggucuucccgagcgacgaguucgacgcguccaucagccaggugaacgagaagaucaaccagucccucgccuucauccgcaagagcgacgagcugcugcacaacgugaacgucgggaaguccaccaccaacaucaugaucaccaccaucaucaucgugaucaucgugauccuccugcugcucaucgccgucggccuguuccuguacugcaaggcccggugaggacuaguaauaaggaaacuguaugaaugucugugggcaggaagugaagagauccuucuguaaagguuuuuggaauuaugucugcugaauaauaaacuuuuuugaaauaauaaaucugguagaaaaaugagaucuaaaaaaaaaaaaaaaaaaaaaaaaaaaaaaaaaaaaaaaaaaaaaaaaaaaaaaaaaaaaaaaaugcaucccccccccccccccccccccccccccccccaaaggcucuuuucagagccaccagaauu

SEQ ID NO: 17400 - RNA, 1901 nt, Artificial Sequence
  mRNA product Design d-2 comprising derived and/or modified sequence from HRSV(Memphis-37)__AIY60640.1__F-del_DSCav1_mut5 (opt2)
gggagagcggcucggccauuuugucccagucaguccggaggcugcggcugcagaaguaccgccugcggaguaacugcaaagaagcuuaccauggagcuccccauccucaagaccaacgccaucaccaccauccucgccgccgucacccucugcuucgccuccucccagaacaucaccgaggaguucuaccaguccaccugcuccgccgucuccaagggcuaccucuccgcccuccgcaccggcugguacaccuccgucaucaccaucgagcucuccaacaucaaggagaacaagugcaacggcaccgacgccaaggucaagcucaucaagcaggagcucgacaaguacaagaacgccgucaccgagcuccagcuccucaugcaguccacccccgccgccggcuccggcuccgccaucgccuccggcaucgccgucugcaagguccuccaccucgagggcgaggucaacaagaucaagaacgcccuccucuccaccaacaaggccgucgucucccucuccggcugcggcgucuccguccucaccuucaagguccucgaccucaagaacuacaucgacaagcagcuccuccccauccucaacaagcaguccugcuccaucuccaacaucgagaccgucaucgaguuccagcagaagaacaaccgccuccucgagaucacccgcgaguucuccgucaacgccggcgucaccacccccgucuccaccuacaugcucaccaacuccgagcuccucucccucaucaacgacaugcccaucaccaacgaccagaagaagcucauguccaacaacguccagaucguccgccagcaguccuacuccaucaugugcaucaucaaggaggagguccucgccuacgucguccagcucccccucuacggcgucaucgacacccccugcuggaagcuccacaccuccccccucugcaccaccaacaccaaggagggcuccaacaucugccucacccgcaccgaccgcggcugguacugcgacaacgccggcuccgucuccuucuucccccaggccgagaccugcaagguccaguccaaccgcgucuucugcgacaccaugaacucccgcacccuccccuccgaggucaaccucugcaacaucgacaucuucaaccccaaguacgacugcaagaucaugaccuccaagaccgacgucuccuccuccgucaucaccucccucggcgccaucgucuccugcuacggcaagaccaagugcaccgccuccaacaagugccgcggcaucaucaagaccuucuccaacggcugcgacuacgucuccaacaagggcgucgacaccgucuccgucggcaacacccucuacuacgucaacaagcaggagggcaagucccucuacgucaagggcgagcccaucaucaacuucuacgacccccucgucuuccccuccgacgaguucgacgccuccaucucccaggucaacgagaagaucaaccagucccucgccuucauccgcaaguccgacgagcuccuccacaacgucaacgucggcaaguccaccaccaacaucaugaucaccaccaucaucaucgucaucaucgucauccuccuccuccucaucgccgucggccucuuccucuacugcaaggcccgcugaggacuaguaauaaggaaacuguaugaaugucugugggcaggaagugaagagauccuucuguaaagguuuuuggaauuaugucugcugaauaauaaacuuuuuugaaauaauaaaucugguagaaaaaugagaucuaaaaaaaaaaaaaaaaaaaaaaaaaaaaaaaaaaaaaaaaaaaaaaaaaaaaaaaaaaaaaaaaugcaucccccccccccccccccccccccccccccccaaaggcucuuuucagagccaccagaauu

SEQ ID NO: 17401 - RNA, 1901 nt, Artificial Sequence
  mRNA product Design d-2 comprising derived and/or modified sequence from HRSV(Memphis-37)__AIY60640.1__F-del_DSCav1_mut5 (opt3)
gggagagcggcucggccauuuugucccagucaguccggaggcugcggcugcagaaguaccgccugcggaguaacugcaaagaagcuuaccauggagcugcccauccucaagaccaacgccauuacaacuauacuugcugcagugacgcugugcuucgccagcucccagaauaucaccgaagaguuuuaccaaucuacauguucagcggucaguaaaggcuauuugagcgcuuuaagaacugggugguacaccuccguuauuacaaucgaacugucuaacauuaaggagaauaaaugcaacggaaccgacgccaaggugaaacuaaucaagcaggaacucgauaaguauaaaaaugcaguaacugagcugcagcuucugaugcagucgaccccugccgcugguucaggcagcgcaauagccagugggaucgcuguguguaaggucuugcaccucgagggagaagugaacaaaauuaagaaugcccugcuguccacaaacaaagcgguugugucucucagcggcugcggugucuccguguuaacguucaagguacuggaccuuaagaauuacaucgauaaacaauugcugccaauucuaaacaagcagucauguaguaucagcaauauagagacuguuauugaauuucagcagaaaaacaauaggcuccuggagaucacccgggaguucucugugaacgcaggggucacaacuccgguguccaccuauaugcuuacaaauucagaacuguugagccucauuaacgacaugcccaucaccaacgaucaaaagaaacugaugaguaauaacgugcagaucguccgccagcagucuuacuccauuaugugcauaaucaaggaggaaguuuuagccuaugugguacaacugccucucuacggagugauugacacgccauguuggaaacuucauacuagcccccugugcacaaccaauacuaaggagggcucgaacaucuguuugacacgaaccgaucguggcugguacugcgacaaugcugggucugucuccuuuuucccucaggccgaaacguguaaggugcagucaaacagaguguuuugcgauaccaugaauaguagaacacugccaagcgaggugaaccucugcaauauagacauuuucaaccccaaauaugauuguaagaucaugacuuccaaaaccgacgucucuagcucagugaucacaagucugggagcaauuguauccugcuacgguaagacuaaauguaccgcuagcaauaagugcaggggcaucauuaagacauuuucuaacgggugugauuauguuucaaauaaaggaguggacaccgucagugugggcaacacucuuuacuaugucaauaagcaagaggguaaaagccuguacgugaagggggaaccuauaaucaacuucuaugacccauugguuuuuccguccgaugaguucgacgccucuauuucgcagguuaacgagaaaaucaaucagagccucgcguuuauccggaaguccgaugaacuguuacacaacguaaaugucggaaagucaacgacaaacauuaugauaaccacuaucauuaucgugauuaucguuauacugcuacuccugaucgccgugggccuuuucuuguacugcaaagcacgcugaggacuaguaauaaggaaacuguaugaaugucugugggcaggaagugaagagauccuucuguaaagguuuuuggaauuaugucugcugaauaauaaacuuuuuugaaauaauaaaucugguagaaaaaugagaucuaaaaaaaaaaaaaaaaaaaaaaaaaaaaaaaaaaaaaaaaaaaaaaaaaaaaaaaaaaaaaaaaugcaucccccccccccccccccccccccccccccccaaaggcucuuuucagagccaccagaauu

SEQ ID NO: 17402 - RNA, 1901 nt, Artificial Sequence
  mRNA product Design d-2 comprising derived and/or modified sequence from HRSV(Memphis-37)__AIY60640.1__F-del_DSCav1_mut5 (opt4)
gggagagcggcucggccauuuugucccagucaguccggaggcugcggcugcagaaguaccgccugcggaguaacugcaaagaagcuuaccauggagcugcccauccugaagaccaacgccaucaccaccauccuggccgccgugacccugugcuucgccagcagccagaacaucaccgaggaguucuaccagagcaccugcagcgccgugagcaagggcuaccugagcgcccugagaaccggcugguacaccagcgugaucaccaucgagcugagcaacaucaaggagaacaagugcaacggcaccgacgccaaggugaagcugaucaagcaggagcuggacaaguacaagaacgccgugaccgagcugcagcugcugaugcagagcacccccgccgccggcagcggcagcgccaucgccagcggcaucgccgugugcaaggugcugcaccuggagggcgaggugaacaagaucaagaacgcccugcugagcaccaacaaggccguggugagccugagcggcugcggcgugagcgugcugaccuucaaggugcuggaccugaagaacuacaucgacaagcagcugcugcccauccugaacaagcagagcugcagcaucagcaacaucgagaccgugaucgaguuccagcagaagaacaacagacugcuggagaucaccagagaguucagcgugaacgccggcgugaccacccccgugagcaccuacaugcugaccaacagcgagcugcugagccugaucaacgacaugcccaucaccaacgaccagaagaagcugaugagcaacaacgugcagaucgugagacagcagagcuacagcaucaugugcaucaucaaggaggaggugcuggccuacguggugcagcugccccuguacggcgugaucgacacccccugcuggaagcugcacaccagcccccugugcaccaccaacaccaaggagggcagcaacaucugccugaccagaaccgacagaggcugguacugcgacaacgccggcagcgugagcuucuucccccaggccgagaccugcaaggugcagagcaacagaguguucugcgacaccaugaacagcagaacccugcccagcgaggugaaccugugcaacaucgacaucuucaaccccaaguacgacugcaagaucaugaccagcaagaccgacgugagcagcagcgugaucaccagccugggcgccaucgugagcugcuacggcaagaccaagugcaccgccagcaacaagugcagaggcaucaucaagaccuucagcaacggcugcgacuacgugagcaacaagggcguggacaccgugagcgugggcaacacccuguacuacgugaacaagcaggagggcaagagccuguacgugaagggcgagcccaucaucaacuucuacgacccccugguguuccccagcgacgaguucgacgccagcaucagccaggugaacgagaagaucaaccagagccuggccuucaucagaaagagcgacgagcugcugcacaacgugaacgugggcaagagcaccaccaacaucaugaucaccaccaucaucaucgugaucaucgugauccugcugcugcugaucgccgugggccuguuccuguacugcaaggccagaugaggacuaguaauaaggaaacuguaugaaugucugugggcaggaagugaagagauccuucuguaaagguuuuuggaauuaugucugcugaauaauaaacuuuuuugaaauaauaaaucugguagaaaaaugagaucuaaaaaaaaaaaaaaaaaaaaaaaaaaaaaaaaaaaaaaaaaaaaaaaaaaaaaaaaaaaaaaaaugcaucccccccccccccccccccccccccccccccaaaggcucuuuucagagccaccagaauu

SEQ ID NO: 17403 - RNA, 1901 nt, Artificial Sequence
  mRNA product Design d-2 comprising derived and/or modified sequence from HRSV(Memphis-37)__AIY60640.1__F-del_DSCav1_mut5 (opt5)
gggagagcggcucggccauuuugucccagucaguccggaggcugcggcugcagaaguaccgccugcggaguaacugcaaagaagcuuaccauggagcugcccauccucaagaccaacgccauuacaacgauccuggcugccgugacccuuugcuucgcgagcucccagaauauuacagaagaguuuuaccaaucuaccuguagcgcugucuccaaaggcuaucugucugcccucagaacagggugguacaccagcguuaucacaauugaacuguccaacaucaaggagaauaaaugcaacggaaccgacgccaaggugaaacuuaucaagcaggaacuggauaaguauaaaaaugcugugacggagcuccagcugcugaugcagucuaccccugccgcuggcagcggguccgccauugcgagcggaaucgccgucuguaaggugcuccaccuggagggcgaaguuaacaaaauuaagaaugcccuucugucuacaaacaaagcuguggucucccucagcgggugcggagugucuguucugaccuucaaggugcuugaccugaagaauuacaucgauaaacaacuccugccgauucugaacaagcaguccuguagcaucucuaauauugagacagucaucgaauuucagcagaaaaacaaucggcuccuggagaucacccgcgaguucuccgugaacgcuggcgugacgacacccgucagcaccuauaugcuuacaaauuccgaacugcucucucugauuaacgacaugccuaucaccaacgaucaaaagaaacuuaugagcaauaacguucagauugugagacagcaguccuacagcaucaugugcauuaucaaggaggaagugcuggccuaugucgugcaacucccccuguacggcguuaucgacaccccuuguuggaaacugcauacaucuccccucugcacgaccaauacaaaggagggguccaacauuugucugacccggacagaucgcggaugguacugcgacaaugcgggcagcgugagcuuuuucccucaggccgaaaccuguaagguccagucuaacagaguguuuugcgauacgaugaacuccagaacacugccgucugagguuaaucucugcaauaucgacauuuucaaccccaaauaugauuguaagaucaugaccagcaaaaccgacguguccagcucugucauuacaucccugggggcuaucgugagcugcuacggaaagaccaaauguacagccucuaauaagugccggggcaucauuaagacguuuuccaacgggugugauuaugucagcaauaaaggaguggacaccguuuccgugggcaacacacuuuacuaugucaauaagcaagagggcaaaucucuguacgugaagggggaaccuaucauuaacuucuaugacccccucguuuuuccuagcgaugaguucgacgcuuccaucucucaggugaacgagaaaauuaaucagagccuggccuuuauccgcaaguccgaugaacugcuccacaacgucaaugugggaaagagcaccacaaacauuaugaucaccacgaucauuaucgugauuaucguuauucugcuucugcucaucgccgucggccuguuccuguacugcaaagcuagaugaggacuaguaauaaggaaacuguaugaaugucugugggcaggaagugaagagauccuucuguaaagguuuuuggaauuaugucugcugaauaauaaacuuuuuugaaauaauaaaucugguagaaaaaugagaucuaaaaaaaaaaaaaaaaaaaaaaaaaaaaaaaaaaaaaaaaaaaaaaaaaaaaaaaaaaaaaaaaugcaucccccccccccccccccccccccccccccccaaaggcucuuuucagagccaccagaauu

SEQ ID NO: 17404 - RNA, 1901 nt, Artificial Sequence
  mRNA product Design d-2 comprising derived and/or modified sequence from HRSV(Memphis-37)__AIY60640.1__F-del_DSCav1_mut5 (opt6)
gggagagcggcucggccauuuugucccagucaguccggaggcugcggcugcagaaguaccgccugcggaguaacugcaaagaagcuuaccauggaauuacccaucuuaaaaacaaaugcaauaacaacaauacuagcagccguaacauuaugcuucgccucaagccaaaacauaacagaagaauuuuaccaaagcacauguuccgccguaucaaaaggauaucucucagcacuacguacuggaugguauacauccguaaucacaauugaacuaucaaacauuaaagaaaacaaaugcaauggaacagaugcgaaaguaaaacuaauaaaacaagaauuagauaaauauaaaaaugcaguaaccgaacuacaacuacuaaugcaaucaacucccgcugccgguagcggauccgccauagcaagcggaauugcuguauguaaaguccuacaucuugaaggcgaagucaacaaaaucaaaaaugcauuacucucgaccaacaaagcagucguaucacuaucaggaugcggagucucaguauuaacuuuuaaaguccuugaccuaaaaaacuacauagacaaacaacuacuaccaauucuaaauaaacaaaguugcagcauauccaauaucgaaacaguuauagaauuucaacaaaaaaacaaccgccuacuagaaaucacuagagaauuuucaguaaaugcaggcguaaccacaccagucucuaccuauaugcuuaccaacucugaauuauuaucacuuauaaacgacaugcccauaacaaaugaucaaaaaaaacuaaugagcaacaacguacaaauaguaagacaacaaagcuacagcauuauguguauaauaaaagaagaaguguuagcuuauguaguccaacuaccccucuauggcguuaucgauacaccaugcuggaaauuacacacaagcccucuaugcacaacuaacaccaaagaaggcucuaacauaugcuuaacaagaacagauagaggaugguauugcgauaacgcaggaucaguaucauucuuuccacaagcagaaacauguaaaguacaaucuaaccgaguauucugcgacacaaugaacucuagaacacuacccucagaaguuaaucucuguaauauugacauuuucaauccaaaauacgauugcaaaauaaugaccucuaaaaccgacguaucauccucaguuauaacguccuuaggagcaaucguaagcugcuauggcaaaacaaaauguaccgcaucaaacaaaugcagaggaauaauaaaaacauucucaaacggcugugacuacguaagcaauaaagguguugacacaguuucaguaggaaauacacuauacuauguaaauaaacaagaaggaaaaucucucuauguaaaaggagaacccauaauaaacuucuacgacccacucguauuuccaagcgaugaauuugaugcgagcauuucccagguaaaugaaaaaauaaaucaaucacuagcauucaucagaaaaagugaugaauuacuacacaauguuaacguaggaaaaucaacaacaaauaucaugauaacaacaaucauaauagucauaaucguaauauuacuauuacuaauagcaguagguuuauuucuauacuguaaagcaagguaaggacuaguaauaaggaaacuguaugaaugucugugggcaggaagugaagagauccuucuguaaagguuuuuggaauuaugucugcugaauaauaaacuuuuuugaaauaauaaaucugguagaaaaaugagaucuaaaaaaaaaaaaaaaaaaaaaaaaaaaaaaaaaaaaaaaaaaaaaaaaaaaaaaaaaaaaaaaaugcaucccccccccccccccccccccccccccccccaaaggcucuuuucagagccaccagaauu

SEQ ID NO: 17405 - RNA, 1901 nt, Artificial Sequence
  mRNA product Design d-2 comprising derived and/or modified sequence from HRSV(Memphis-37)__AIY60640.1__F-del_DSCav1_mut5 (opt11)
gggagagcggcucggccauuuugucccagucaguccggaggcugcggcugcagaaguaccgccugcggaguaacugcaaagaagcuuaccauggaacuucccauccuaaaaaccaacgccauaacaacaauccucgcagcagucacccucugcuucgccucuucacaaaacaucaccgaagaauuuuaccaaucaaccugcuccgccguguccaaaggcuaccucucagcacugcgcacaggaugguauaccagcguaaucaccaucgaacucuccaacaucaaggaaaacaaaugcaacggcaccgaugccaaagucaaacucaucaagcaagaacuugacaaauacaaaaacgccgugaccgagcuacaacuccucaugcaguccacuccagccgccggcuccggcagcgccaucgccuccggcaucgccguaugcaaaguccuccaccucgaaggcgaaguaaacaaaaucaagaacgcacuccuaagcaccaacaaagccgucgucucacucuccgguugcggcgucagcguccuaacauucaaaguucucgaccucaaaaacuacauagacaaacaacuccuccccauccucaacaaacaauccugcuccauaucaaacaucgaaaccguuaucgaauuucaacaaaaaaacaaccgccuccuagaaaucacccgcgaauuuuccgucaacgcaggcgucaccacccccguuuccaccuauaugcucaccaacuccgaacuccucucccucaucaacgacaugcccauuaccaacgaccaaaagaaacuuaugagcaacaacguucaaaucguccgacaacaaucauacuccaucaugugcauuaucaaagaagaaguacucgccuacguaguacaauuaccccucuacggcguaaucgacaccccaugcuggaaacuacacaccuccccccucuguaccaccaacaccaaagaaggcucuaacaucugccucacccgcacagaccguggcugguauugcgauaacgcagggucugucuccuucuucccccaagccgaaacaugcaaaguccaauccaacagagucuucugcgacaccaugaacucgagaacccuccccuccgaagucaaccuaugcaacaucgacaucuucaacccaaaauacgacugcaaaaucaugacuucaaaaacagacgugagcucguccgucaucacaagccuaggagcuaucguauccugcuacggaaaaacaaaaugcacugcuuccaacaaaugccgcggaaucauaaaaaccuucuccaacggcugcgacuacgucagcaacaaaggcgucgacacagucuccguaggcaacacccuauacuacgucaauaaacaagaaggcaagucccuauaugucaaaggcgagcccaucaucaauuucuaugauccccucguuuucccauccgacgaauuugacgcauccaucucccaagucaacgaaaaaauaaaccaaagccucgcauucauccgcaaauccgacgaacuccuccacaacguaaacguaggaaaauccacaacuaacaucaugaucaccaccaucaucaucgucauuaucgucauccuacuccuccucauagcagucggccucuuccucuacugcaaagcacgcuagggacuaguaauaaggaaacuguaugaaugucugugggcaggaagugaagagauccuucuguaaagguuuuuggaauuaugucugcugaauaauaaacuuuuuugaaauaauaaaucugguagaaaaaugagaucuaaaaaaaaaaaaaaaaaaaaaaaaaaaaaaaaaaaaaaaaaaaaaaaaaaaaaaaaaaaaaaaaugcaucccccccccccccccccccccccccccccccaaaggcucuuuucagagccaccagaauu

SEQ ID NO: 17406 - RNA, 2217 nt, Artificial Sequence
  mRNA product Design d-3 comprising derived and/or modified sequence from HRSV(Memphis-37)__AIY60640.1__F-del_DSCav1_mut5 (opt1)
gggagagggcgcuuggcuugcaaggacccugagcugcggcauugaagcacacccaacccaacucgacugaagucagccucacugaaccggaucugagaaucuucucucucugggcuugccagggcucuccgaaccuagcuagcauccucuucaauuccaacuagaaagcuuaccauggagcugcccauccucaagaccaacgccaucaccacgauccuggccgcggugacccugugcuucgccagcucccagaacaucaccgaggaguucuaccagagcacgugcuccgccgucagcaagggcuaccucuccgcccugcgcaccgggugguacaccagcgugaucaccaucgagcuguccaacaucaaggagaacaagugcaacggcaccgacgccaaggugaagcucaucaagcaggagcuggacaaguacaagaacgcggucacggagcugcagcuccugaugcagagcaccccggccgccggcuccgggagcgcgaucgccuccggcaucgccgucugcaaggugcugcaccucgagggcgaggugaacaagaucaagaacgcccugcuguccaccaacaaggccgucgugagccucuccggcugcggggugagcguccugaccuucaaggugcuggaccucaagaacuacaucgacaagcagcugcugcccauccugaacaagcagagcugcuccaucagcaacaucgagaccgucaucgaguuccagcagaagaacaaccgccuccuggagaucacgcgggaguucagcgugaacgcgggcgugaccacccccgucuccaccuacaugcugacgaacagcgagcuccugucccugaucaacgacaugccgaucaccaacgaccagaagaagcucaugagcaacaacgugcagaucgugcgccagcaguccuacagcaucaugugcaucaucaaggaggagguccuggccuacguggugcagcugccccucuacggggucaucgacacccccugcuggaagcugcacaccagcccccugugcacgaccaacaccaaggagggcuccaacaucugccucacccggacggaccgcgggugguacugcgacaacgccggcagcguguccuucuucccgcaggccgagaccugcaagguccagagcaaccggguguucugcgacaccaugaacucccggacccugcccagcgaggugaaccucugcaacaucgacaucuucaaccccaaguacgacugcaagaucaugacguccaagaccgacgucagcuccagcgugaucaccucccugggcgccaucgugagcugcuacgggaagaccaagugcacggcgagcaacaagugccgcggcaucaucaagaccuucuccaacgggugcgacuacgucagcaacaagggcguggacaccguguccgucggcaacacccuguacuacgugaacaagcaggagggcaagagccucuacgugaagggggagcccaucaucaacuucuacgacccgcuggucuuccccuccgacgaguucgacgccagcaucucccaggugaacgagaagaucaaccagagccuggccuucauccggaaguccgacgagcuccugcacaacgugaacgucggcaagagcaccacgaacaucaugaucaccaccaucaucaucgugaucaucgugauccugcugcuccugaucgccgucgggcuguuccucuacugcaaggcccgcugaggacuagugaagggaacacccaaauuuaauucagccuuaagcacaauuaauuaagagugaaacguaauuguacaagcaguuggucacccaccauagggcaugaucaacaccgcaaccuuuccuuuuucccccagugauucugaaaaaccccucuucccuucagcuugcuuagauguuccaaauuuaguaagcuuaaggcggccuacagaagaaaaagaaaaaaaaggccacaaaaguucccucucacuuucaguaaauaaaauaaaagcagcaacagaaauaaagaaauaaaugaaauucaaaaugaaauaaauauuguguugugcagcauuaaaaaaucaauaaaaauuaaaaaugagcaagaucuaaaaaaaaaaaaaaaaaaaaaaaaaaaaaaaaaaaaaaaaaaaaaaaaaaaaaaaaaaaaaaaaugcaucccccccccccccccccccccccccccccccaaaggcucuuuucagagccaccagaauu

SEQ ID NO: 17407 - RNA, 2217 nt, Artificial Sequence
  mRNA product Design d-3 comprising derived and/or modified sequence from HRSV(Memphis-37)__AIY60640.1__F-del_DSCav1_mut5 (opt1)
gggagagggcgcuuggcuugcaaggacccugagcugcggcauugaagcacacccaacccaacucgacugaagucagccucacugaaccggaucugagaaucuucucucucugggcuugccagggcucuccgaaccuagcuagcauccucuucaauuccaacuagaaagcuuaccauggagcugcccauccucaagaccaacgccaucaccacgauccuggccgcggugacccugugcuucgccagcucccagaacaucaccgaggaguucuaccagagcacgugcuccgccgucagcaagggcuaccucuccgcccugcgcaccgggugguacaccagcgugaucaccaucgagcuguccaacaucaaggagaacaagugcaacggcaccgacgccaaggugaagcucaucaagcaggagcuggacaaguacaagaacgcggucacggagcugcagcuccugaugcagagcaccccggccgccggguccggcagcgccaucgcguccgggaucgccgugugcaaggugcugcaccucgagggcgaggucaacaagaucaagaacgcccugcugagcaccaacaaggccguggugucccucagcggcugcggggucuccgugcugaccuucaaggugcuggaccucaagaacuacaucgacaagcagcugcugcccauccucaacaagcagagcugcuccaucagcaacaucgagacggucaucgaguuccagcagaagaacaaccggcugcuggagaucacccgcgaguucuccgugaacgccggcgugaccacccccgucagcacguacaugcucaccaacagcgagcugcugucccucaucaacgacaugcccaucaccaacgaccagaagaagcugaugagcaacaacgugcagaucgugcggcagcaguccuacagcaucaugugcaucaucaaggaggagguccuggcguacguggugcagcucccgcuguacggggucaucgacacccccugcuggaagcugcacacgagcccccucugcaccaccaacaccaaggagggcuccaacaucugccugacgcgcaccgaccgggggugguacugcgacaacgccggcuccgugagcuucuucccccaggccgagaccugcaaggugcaguccaaccgcgucuucugcgacaccaugaacagccggacgcucccguccgaggugaaccugugcaacaucgacaucuucaaccccaaguacgacugcaagaucaugaccagcaagaccgacgucuccagcuccgugaucaccagccugggcgccaucguguccugcuacgggaagacgaagugcaccgccagcaacaagugccggggcaucaucaagaccuucuccaacgggugcgacuacgucagcaacaagggcguggacaccgugagcgucggcaacacgcucuacuacgugaacaagcaggaggggaagucccuguacgugaagggcgagcccaucaucaacuucuacgacccccuggucuucccgagcgacgaguucgacgcguccaucagccaggugaacgagaagaucaaccagucccucgccuucauccgcaagagcgacgagcugcugcacaacgugaacgucgggaaguccaccaccaacaucaugaucaccaccaucaucaucgugaucaucgugauccuccugcugcucaucgccgucggccuguuccuguacugcaaggcccggugaggacuagugaagggaacacccaaauuuaauucagccuuaagcacaauuaauuaagagugaaacguaauuguacaagcaguuggucacccaccauagggcaugaucaacaccgcaaccuuuccuuuuucccccagugauucugaaaaaccccucuucccuucagcuugcuuagauguuccaaauuuaguaagcuuaaggcggccuacagaagaaaaagaaaaaaaaggccacaaaaguucccucucacuuucaguaaauaaaauaaaagcagcaacagaaauaaagaaauaaaugaaauucaaaaugaaauaaauauuguguugugcagcauuaaaaaaucaauaaaaauuaaaaaugagcaagaucuaaaaaaaaaaaaaaaaaaaaaaaaaaaaaaaaaaaaaaaaaaaaaaaaaaaaaaaaaaaaaaaaugcaucccccccccccccccccccccccccccccccaaaggcucuuuucagagccaccagaauu

SEQ ID NO: 17408 - RNA, 2217 nt, Artificial Sequence
  mRNA product Design d-3 comprising derived and/or modified sequence from HRSV(Memphis-37)__AIY60640.1__F-del_DSCav1_mut5 (opt2)
gggagagggcgcuuggcuugcaaggacccugagcugcggcauugaagcacacccaacccaacucgacugaagucagccucacugaaccggaucugagaaucuucucucucugggcuugccagggcucuccgaaccuagcuagcauccucuucaauuccaacuagaaagcuuaccauggagcuccccauccucaagaccaacgccaucaccaccauccucgccgccgucacccucugcuucgccuccucccagaacaucaccgaggaguucuaccaguccaccugcuccgccgucuccaagggcuaccucuccgcccuccgcaccggcugguacaccuccgucaucaccaucgagcucuccaacaucaaggagaacaagugcaacggcaccgacgccaaggucaagcucaucaagcaggagcucgacaaguacaagaacgccgucaccgagcuccagcuccucaugcaguccacccccgccgccggcuccggcuccgccaucgccuccggcaucgccgucugcaagguccuccaccucgagggcgaggucaacaagaucaagaacgcccuccucuccaccaacaaggccgucgucucccucuccggcugcggcgucuccguccucaccuucaagguccucgaccucaagaacuacaucgacaagcagcuccuccccauccucaacaagcaguccugcuccaucuccaacaucgagaccgucaucgaguuccagcagaagaacaaccgccuccucgagaucacccgcgaguucuccgucaacgccggcgucaccacccccgucuccaccuacaugcucaccaacuccgagcuccucucccucaucaacgacaugcccaucaccaacgaccagaagaagcucauguccaacaacguccagaucguccgccagcaguccuacuccaucaugugcaucaucaaggaggagguccucgccuacgucguccagcucccccucuacggcgucaucgacacccccugcuggaagcuccacaccuccccccucugcaccaccaacaccaaggagggcuccaacaucugccucacccgcaccgaccgcggcugguacugcgacaacgccggcuccgucuccuucuucccccaggccgagaccugcaagguccaguccaaccgcgucuucugcgacaccaugaacucccgcacccuccccuccgaggucaaccucugcaacaucgacaucuucaaccccaaguacgacugcaagaucaugaccuccaagaccgacgucuccuccuccgucaucaccucccucggcgccaucgucuccugcuacggcaagaccaagugcaccgccuccaacaagugccgcggcaucaucaagaccuucuccaacggcugcgacuacgucuccaacaagggcgucgacaccgucuccgucggcaacacccucuacuacgucaacaagcaggagggcaagucccucuacgucaagggcgagcccaucaucaacuucuacgacccccucgucuuccccuccgacgaguucgacgccuccaucucccaggucaacgagaagaucaaccagucccucgccuucauccgcaaguccgacgagcuccuccacaacgucaacgucggcaaguccaccaccaacaucaugaucaccaccaucaucaucgucaucaucgucauccuccuccuccucaucgccgucggccucuuccucuacugcaaggcccgcugaggacuagugaagggaacacccaaauuuaauucagccuuaagcacaauuaauuaagagugaaacguaauuguacaagcaguuggucacccaccauagggcaugaucaacaccgcaaccuuuccuuuuucccccagugauucugaaaaaccccucuucccuucagcuugcuuagauguuccaaauuuaguaagcuuaaggcggccuacagaagaaaaagaaaaaaaaggccacaaaaguucccucucacuuucaguaaauaaaauaaaagcagcaacagaaauaaagaaauaaaugaaauucaaaaugaaauaaauauuguguugugcagcauuaaaaaaucaauaaaaauuaaaaaugagcaagaucuaaaaaaaaaaaaaaaaaaaaaaaaaaaaaaaaaaaaaaaaaaaaaaaaaaaaaaaaaaaaaaaaugcaucccccccccccccccccccccccccccccccaaaggcucuuuucagagccaccagaauu

SEQ ID NO: 17409 - RNA, 2217 nt, Artificial Sequence
  mRNA product Design d-3 comprising derived and/or modified sequence from HRSV(Memphis-37)__AIY60640.1__F-del_DSCav1_mut5 (opt3)
gggagagggcgcuuggcuugcaaggacccugagcugcggcauugaagcacacccaacccaacucgacugaagucagccucacugaaccggaucugagaaucuucucucucugggcuugccagggcucuccgaaccuagcuagcauccucuucaauuccaacuagaaagcuuaccauggagcugcccauccucaagaccaacgccauuacaacuauacuugcugcagugacgcugugcuucgccagcucccagaauaucaccgaagaguuuuaccaaucuacauguucagcggucaguaaaggcuauuugagcgcuuuaagaacugggugguacaccuccguuauuacaaucgaacugucuaacauuaaggagaauaaaugcaacggaaccgacgccaaggugaaacuaaucaagcaggaacucgauaaguauaaaaaugcaguaacugagcugcagcuucugaugcagucgaccccugccgcugguucaggcagcgcaauagccagugggaucgcuguguguaaggucuugcaccucgagggagaagugaacaaaauuaagaaugcccugcuguccacaaacaaagcgguugugucucucagcggcugcggugucuccguguuaacguucaagguacuggaccuuaagaauuacaucgauaaacaauugcugccaauucuaaacaagcagucauguaguaucagcaauauagagacuguuauugaauuucagcagaaaaacaauaggcuccuggagaucacccgggaguucucugugaacgcaggggucacaacuccgguguccaccuauaugcuuacaaauucagaacuguugagccucauuaacgacaugcccaucaccaacgaucaaaagaaacugaugaguaauaacgugcagaucguccgccagcagucuuacuccauuaugugcauaaucaaggaggaaguuuuagccuaugugguacaacugccucucuacggagugauugacacgccauguuggaaacuucauacuagcccccugugcacaaccaauacuaaggagggcucgaacaucuguuugacacgaaccgaucguggcugguacugcgacaaugcugggucugucuccuuuuucccucaggccgaaacguguaaggugcagucaaacagaguguuuugcgauaccaugaauaguagaacacugccaagcgaggugaaccucugcaauauagacauuuucaaccccaaauaugauuguaagaucaugacuuccaaaaccgacgucucuagcucagugaucacaagucugggagcaauuguauccugcuacgguaagacuaaauguaccgcuagcaauaagugcaggggcaucauuaagacauuuucuaacgggugugauuauguuucaaauaaaggaguggacaccgucagugugggcaacacucuuuacuaugucaauaagcaagaggguaaaagccuguacgugaagggggaaccuauaaucaacuucuaugacccauugguuuuuccguccgaugaguucgacgccucuauuucgcagguuaacgagaaaaucaaucagagccucgcguuuauccggaaguccgaugaacuguuacacaacguaaaugucggaaagucaacgacaaacauuaugauaaccacuaucauuaucgugauuaucguuauacugcuacuccugaucgccgugggccuuuucuuguacugcaaagcacgcugaggacuagugaagggaacacccaaauuuaauucagccuuaagcacaauuaauuaagagugaaacguaauuguacaagcaguuggucacccaccauagggcaugaucaacaccgcaaccuuuccuuuuucccccagugauucugaaaaaccccucuucccuucagcuugcuuagauguuccaaauuuaguaagcuuaaggcggccuacagaagaaaaagaaaaaaaaggccacaaaaguucccucucacuuucaguaaauaaaauaaaagcagcaacagaaauaaagaaauaaaugaaauucaaaaugaaauaaauauuguguugugcagcauuaaaaaaucaauaaaaauuaaaaaugagcaagaucuaaaaaaaaaaaaaaaaaaaaaaaaaaaaaaaaaaaaaaaaaaaaaaaaaaaaaaaaaaaaaaaaugcaucccccccccccccccccccccccccccccccaaaggcucuuuucagagccaccagaauu

SEQ ID NO: 17410 - RNA, 2217 nt, Artificial Sequence
  mRNA product Design d-3 comprising derived and/or modified sequence from HRSV(Memphis-37)__AIY60640.1__F-del_DSCav1_mut5 (opt4)
gggagagggcgcuuggcuugcaaggacccugagcugcggcauugaagcacacccaacccaacucgacugaagucagccucacugaaccggaucugagaaucuucucucucugggcuugccagggcucuccgaaccuagcuagcauccucuucaauuccaacuagaaagcuuaccauggagcugcccauccugaagaccaacgccaucaccaccauccuggccgccgugacccugugcuucgccagcagccagaacaucaccgaggaguucuaccagagcaccugcagcgccgugagcaagggcuaccugagcgcccugagaaccggcugguacaccagcgugaucaccaucgagcugagcaacaucaaggagaacaagugcaacggcaccgacgccaaggugaagcugaucaagcaggagcuggacaaguacaagaacgccgugaccgagcugcagcugcugaugcagagcacccccgccgccggcagcggcagcgccaucgccagcggcaucgccgugugcaaggugcugcaccuggagggcgaggugaacaagaucaagaacgcccugcugagcaccaacaaggccguggugagccugagcggcugcggcgugagcgugcugaccuucaaggugcuggaccugaagaacuacaucgacaagcagcugcugcccauccugaacaagcagagcugcagcaucagcaacaucgagaccgugaucgaguuccagcagaagaacaacagacugcuggagaucaccagagaguucagcgugaacgccggcgugaccacccccgugagcaccuacaugcugaccaacagcgagcugcugagccugaucaacgacaugcccaucaccaacgaccagaagaagcugaugagcaacaacgugcagaucgugagacagcagagcuacagcaucaugugcaucaucaaggaggaggugcuggccuacguggugcagcugccccuguacggcgugaucgacacccccugcuggaagcugcacaccagcccccugugcaccaccaacaccaaggagggcagcaacaucugccugaccagaaccgacagaggcugguacugcgacaacgccggcagcgugagcuucuucccccaggccgagaccugcaaggugcagagcaacagaguguucugcgacaccaugaacagcagaacccugcccagcgaggugaaccugugcaacaucgacaucuucaaccccaaguacgacugcaagaucaugaccagcaagaccgacgugagcagcagcgugaucaccagccugggcgccaucgugagcugcuacggcaagaccaagugcaccgccagcaacaagugcagaggcaucaucaagaccuucagcaacggcugcgacuacgugagcaacaagggcguggacaccgugagcgugggcaacacccuguacuacgugaacaagcaggagggcaagagccuguacgugaagggcgagcccaucaucaacuucuacgacccccugguguuccccagcgacgaguucgacgccagcaucagccaggugaacgagaagaucaaccagagccuggccuucaucagaaagagcgacgagcugcugcacaacgugaacgugggcaagagcaccaccaacaucaugaucaccaccaucaucaucgugaucaucgugauccugcugcugcugaucgccgugggccuguuccuguacugcaaggccagaugaggacuagugaagggaacacccaaauuuaauucagccuuaagcacaauuaauuaagagugaaacguaauuguacaagcaguuggucacccaccauagggcaugaucaacaccgcaaccuuuccuuuuucccccagugauucugaaaaaccccucuucccuucagcuugcuuagauguuccaaauuuaguaagcuuaaggcggccuacagaagaaaaagaaaaaaaaggccacaaaaguucccucucacuuucaguaaauaaaauaaaagcagcaacagaaauaaagaaauaaaugaaauucaaaaugaaauaaauauuguguugugcagcauuaaaaaaucaauaaaaauuaaaaaugagcaagaucuaaaaaaaaaaaaaaaaaaaaaaaaaaaaaaaaaaaaaaaaaaaaaaaaaaaaaaaaaaaaaaaaugcaucccccccccccccccccccccccccccccccaaaggcucuuuucagagccaccagaauu

SEQ ID NO: 17411 - RNA, 2217 nt, Artificial Sequence
  mRNA product Design d-3 comprising derived and/or modified sequence from HRSV(Memphis-37)__AIY60640.1__F-del_DSCav1_mut5 (opt5)
gggagagggcgcuuggcuugcaaggacccugagcugcggcauugaagcacacccaacccaacucgacugaagucagccucacugaaccggaucugagaaucuucucucucugggcuugccagggcucuccgaaccuagcuagcauccucuucaauuccaacuagaaagcuuaccauggagcugcccauccucaagaccaacgccauuacaacgauccuggcugccgugacccuuugcuucgcgagcucccagaauauuacagaagaguuuuaccaaucuaccuguagcgcugucuccaaaggcuaucugucugcccucagaacagggugguacaccagcguuaucacaauugaacuguccaacaucaaggagaauaaaugcaacggaaccgacgccaaggugaaacuuaucaagcaggaacuggauaaguauaaaaaugcugugacggagcuccagcugcugaugcagucuaccccugccgcuggcagcggguccgccauugcgagcggaaucgccgucuguaaggugcuccaccuggagggcgaaguuaacaaaauuaagaaugcccuucugucuacaaacaaagcuguggucucccucagcgggugcggagugucuguucugaccuucaaggugcuugaccugaagaauuacaucgauaaacaacuccugccgauucugaacaagcaguccuguagcaucucuaauauugagacagucaucgaauuucagcagaaaaacaaucggcuccuggagaucacccgcgaguucuccgugaacgcuggcgugacgacacccgucagcaccuauaugcuuacaaauuccgaacugcucucucugauuaacgacaugccuaucaccaacgaucaaaagaaacuuaugagcaauaacguucagauugugagacagcaguccuacagcaucaugugcauuaucaaggaggaagugcuggccuaugucgugcaacucccccuguacggcguuaucgacaccccuuguuggaaacugcauacaucuccccucugcacgaccaauacaaaggagggguccaacauuugucugacccggacagaucgcggaugguacugcgacaaugcgggcagcgugagcuuuuucccucaggccgaaaccuguaagguccagucuaacagaguguuuugcgauacgaugaacuccagaacacugccgucugagguuaaucucugcaauaucgacauuuucaaccccaaauaugauuguaagaucaugaccagcaaaaccgacguguccagcucugucauuacaucccugggggcuaucgugagcugcuacggaaagaccaaauguacagccucuaauaagugccggggcaucauuaagacguuuuccaacgggugugauuaugucagcaauaaaggaguggacaccguuuccgugggcaacacacuuuacuaugucaauaagcaagagggcaaaucucuguacgugaagggggaaccuaucauuaacuucuaugacccccucguuuuuccuagcgaugaguucgacgcuuccaucucucaggugaacgagaaaauuaaucagagccuggccuuuauccgcaaguccgaugaacugcuccacaacgucaaugugggaaagagcaccacaaacauuaugaucaccacgaucauuaucgugauuaucguuauucugcuucugcucaucgccgucggccuguuccuguacugcaaagcuagaugaggacuagugaagggaacacccaaauuuaauucagccuuaagcacaauuaauuaagagugaaacguaauuguacaagcaguuggucacccaccauagggcaugaucaacaccgcaaccuuuccuuuuucccccagugauucugaaaaaccccucuucccuucagcuugcuuagauguuccaaauuuaguaagcuuaaggcggccuacagaagaaaaagaaaaaaaaggccacaaaaguucccucucacuuucaguaaauaaaauaaaagcagcaacagaaauaaagaaauaaaugaaauucaaaaugaaauaaauauuguguugugcagcauuaaaaaaucaauaaaaauuaaaaaugagcaagaucuaaaaaaaaaaaaaaaaaaaaaaaaaaaaaaaaaaaaaaaaaaaaaaaaaaaaaaaaaaaaaaaaugcaucccccccccccccccccccccccccccccccaaaggcucuuuucagagccaccagaauu

SEQ ID NO: 17412 - RNA, 2217 nt, Artificial Sequence
  mRNA product Design d-3 comprising derived and/or modified sequence from HRSV(Memphis-37)__AIY60640.1__F-del_DSCav1_mut5 (opt6)
gggagagggcgcuuggcuugcaaggacccugagcugcggcauugaagcacacccaacccaacucgacugaagucagccucacugaaccggaucugagaaucuucucucucugggcuugccagggcucuccgaaccuagcuagcauccucuucaauuccaacuagaaagcuuaccauggaauuacccaucuuaaaaacaaaugcaauaacaacaauacuagcagccguaacauuaugcuucgccucaagccaaaacauaacagaagaauuuuaccaaagcacauguuccgccguaucaaaaggauaucucucagcacuacguacuggaugguauacauccguaaucacaauugaacuaucaaacauuaaagaaaacaaaugcaauggaacagaugcgaaaguaaaacuaauaaaacaagaauuagauaaauauaaaaaugcaguaaccgaacuacaacuacuaaugcaaucaacucccgcugccgguagcggauccgccauagcaagcggaauugcuguauguaaaguccuacaucuugaaggcgaagucaacaaaaucaaaaaugcauuacucucgaccaacaaagcagucguaucacuaucaggaugcggagucucaguauuaacuuuuaaaguccuugaccuaaaaaacuacauagacaaacaacuacuaccaauucuaaauaaacaaaguugcagcauauccaauaucgaaacaguuauagaauuucaacaaaaaaacaaccgccuacuagaaaucacuagagaauuuucaguaaaugcaggcguaaccacaccagucucuaccuauaugcuuaccaacucugaauuauuaucacuuauaaacgacaugcccauaacaaaugaucaaaaaaaacuaaugagcaacaacguacaaauaguaagacaacaaagcuacagcauuauguguauaauaaaagaagaaguguuagcuuauguaguccaacuaccccucuauggcguuaucgauacaccaugcuggaaauuacacacaagcccucuaugcacaacuaacaccaaagaaggcucuaacauaugcuuaacaagaacagauagaggaugguauugcgauaacgcaggaucaguaucauucuuuccacaagcagaaacauguaaaguacaaucuaaccgaguauucugcgacacaaugaacucuagaacacuacccucagaaguuaaucucuguaauauugacauuuucaauccaaaauacgauugcaaaauaaugaccucuaaaaccgacguaucauccucaguuauaacguccuuaggagcaaucguaagcugcuauggcaaaacaaaauguaccgcaucaaacaaaugcagaggaauaauaaaaacauucucaaacggcugugacuacguaagcaauaaagguguugacacaguuucaguaggaaauacacuauacuauguaaauaaacaagaaggaaaaucucucuauguaaaaggagaacccauaauaaacuucuacgacccacucguauuuccaagcgaugaauuugaugcgagcauuucccagguaaaugaaaaaauaaaucaaucacuagcauucaucagaaaaagugaugaauuacuacacaauguuaacguaggaaaaucaacaacaaauaucaugauaacaacaaucauaauagucauaaucguaauauuacuauuacuaauagcaguagguuuauuucuauacuguaaagcaagguaaggacuagugaagggaacacccaaauuuaauucagccuuaagcacaauuaauuaagagugaaacguaauuguacaagcaguuggucacccaccauagggcaugaucaacaccgcaaccuuuccuuuuucccccagugauucugaaaaaccccucuucccuucagcuugcuuagauguuccaaauuuaguaagcuuaaggcggccuacagaagaaaaagaaaaaaaaggccacaaaaguucccucucacuuucaguaaauaaaauaaaagcagcaacagaaauaaagaaauaaaugaaauucaaaaugaaauaaauauuguguugugcagcauuaaaaaaucaauaaaaauuaaaaaugagcaagaucuaaaaaaaaaaaaaaaaaaaaaaaaaaaaaaaaaaaaaaaaaaaaaaaaaaaaaaaaaaaaaaaaugcaucccccccccccccccccccccccccccccccaaaggcucuuuucagagccaccagaauu

SEQ ID NO: 17413 - RNA, 2217 nt, Artificial Sequence
  mRNA product Design d-3 comprising derived and/or modified sequence from HRSV(Memphis-37)__AIY60640.1__F-del_DSCav1_mut5 (opt11)
gggagagggcgcuuggcuugcaaggacccugagcugcggcauugaagcacacccaacccaacucgacugaagucagccucacugaaccggaucugagaaucuucucucucugggcuugccagggcucuccgaaccuagcuagcauccucuucaauuccaacuagaaagcuuaccauggaacuucccauccuaaaaaccaacgccauaacaacaauccucgcagcagucacccucugcuucgccucuucacaaaacaucaccgaagaauuuuaccaaucaaccugcuccgccguguccaaaggcuaccucucagcacugcgcacaggaugguauaccagcguaaucaccaucgaacucuccaacaucaaggaaaacaaaugcaacggcaccgaugccaaagucaaacucaucaagcaagaacuugacaaauacaaaaacgccgugaccgagcuacaacuccucaugcaguccacuccagccgccggcuccggcagcgccaucgccuccggcaucgccguaugcaaaguccuccaccucgaaggcgaaguaaacaaaaucaagaacgcacuccuaagcaccaacaaagccgucgucucacucuccgguugcggcgucagcguccuaacauucaaaguucucgaccucaaaaacuacauagacaaacaacuccuccccauccucaacaaacaauccugcuccauaucaaacaucgaaaccguuaucgaauuucaacaaaaaaacaaccgccuccuagaaaucacccgcgaauuuuccgucaacgcaggcgucaccacccccguuuccaccuauaugcucaccaacuccgaacuccucucccucaucaacgacaugcccauuaccaacgaccaaaagaaacuuaugagcaacaacguucaaaucguccgacaacaaucauacuccaucaugugcauuaucaaagaagaaguacucgccuacguaguacaauuaccccucuacggcguaaucgacaccccaugcuggaaacuacacaccuccccccucuguaccaccaacaccaaagaaggcucuaacaucugccucacccgcacagaccguggcugguauugcgauaacgcagggucugucuccuucuucccccaagccgaaacaugcaaaguccaauccaacagagucuucugcgacaccaugaacucgagaacccuccccuccgaagucaaccuaugcaacaucgacaucuucaacccaaaauacgacugcaaaaucaugacuucaaaaacagacgugagcucguccgucaucacaagccuaggagcuaucguauccugcuacggaaaaacaaaaugcacugcuuccaacaaaugccgcggaaucauaaaaaccuucuccaacggcugcgacuacgucagcaacaaaggcgucgacacagucuccguaggcaacacccuauacuacgucaauaaacaagaaggcaagucccuauaugucaaaggcgagcccaucaucaauuucuaugauccccucguuuucccauccgacgaauuugacgcauccaucucccaagucaacgaaaaaauaaaccaaagccucgcauucauccgcaaauccgacgaacuccuccacaacguaaacguaggaaaauccacaacuaacaucaugaucaccaccaucaucaucgucauuaucgucauccuacuccuccucauagcagucggccucuuccucuacugcaaagcacgcuagggacuagugaagggaacacccaaauuuaauucagccuuaagcacaauuaauuaagagugaaacguaauuguacaagcaguuggucacccaccauagggcaugaucaacaccgcaaccuuuccuuuuucccccagugauucugaaaaaccccucuucccuucagcuugcuuagauguuccaaauuuaguaagcuuaaggcggccuacagaagaaaaagaaaaaaaaggccacaaaaguucccucucacuuucaguaaauaaaauaaaagcagcaacagaaauaaagaaauaaaugaaauucaaaaugaaauaaauauuguguugugcagcauuaaaaaaucaauaaaaauuaaaaaugagcaagaucuaaaaaaaaaaaaaaaaaaaaaaaaaaaaaaaaaaaaaaaaaaaaaaaaaaaaaaaaaaaaaaaaugcaucccccccccccccccccccccccccccccccaaaggcucuuuucagagccaccagaauu

SEQ ID NO: 17414 - RNA, 1900 nt, Artificial Sequence
  mRNA product Design d-4 comprising derived and/or modified sequence from HRSV(Memphis-37)__AIY60640.1__F-del_DSCav1_mut5 (opt1)
gggagagucccgcagucggcguccagcggcucugcuuguucgugugugugucguugcaggccuuauucaagcuuaccauggagcugcccauccucaagaccaacgccaucaccacgauccuggccgcggugacccugugcuucgccagcucccagaacaucaccgaggaguucuaccagagcacgugcuccgccgucagcaagggcuaccucuccgcccugcgcaccgggugguacaccagcgugaucaccaucgagcuguccaacaucaaggagaacaagugcaacggcaccgacgccaaggugaagcucaucaagcaggagcuggacaaguacaagaacgcggucacggagcugcagcuccugaugcagagcaccccggccgccggcuccgggagcgcgaucgccuccggcaucgccgucugcaaggugcugcaccucgagggcgaggugaacaagaucaagaacgcccugcuguccaccaacaaggccgucgugagccucuccggcugcggggugagcguccugaccuucaaggugcuggaccucaagaacuacaucgacaagcagcugcugcccauccugaacaagcagagcugcuccaucagcaacaucgagaccgucaucgaguuccagcagaagaacaaccgccuccuggagaucacgcgggaguucagcgugaacgcgggcgugaccacccccgucuccaccuacaugcugacgaacagcgagcuccugucccugaucaacgacaugccgaucaccaacgaccagaagaagcucaugagcaacaacgugcagaucgugcgccagcaguccuacagcaucaugugcaucaucaaggaggagguccuggccuacguggugcagcugccccucuacggggucaucgacacccccugcuggaagcugcacaccagcccccugugcacgaccaacaccaaggagggcuccaacaucugccucacccggacggaccgcgggugguacugcgacaacgccggcagcguguccuucuucccgcaggccgagaccugcaagguccagagcaaccggguguucugcgacaccaugaacucccggacccugcccagcgaggugaaccucugcaacaucgacaucuucaaccccaaguacgacugcaagaucaugacguccaagaccgacgucagcuccagcgugaucaccucccugggcgccaucgugagcugcuacgggaagaccaagugcacggcgagcaacaagugccgcggcaucaucaagaccuucuccaacgggugcgacuacgucagcaacaagggcguggacaccguguccgucggcaacacccuguacuacgugaacaagcaggagggcaagagccucuacgugaagggggagcccaucaucaacuucuacgacccgcuggucuuccccuccgacgaguucgacgccagcaucucccaggugaacgagaagaucaaccagagccuggccuucauccggaaguccgacgagcuccugcacaacgugaacgucggcaagagcaccacgaacaucaugaucaccaccaucaucaucgugaucaucgugauccugcugcuccugaucgccgucgggcuguuccucuacugcaaggcccgcugaggacuaguggaagcauuuuccuggcugauuaaaagaaauuacucagcuauggucaucuguuccuguuagaaggcuaugcagcauauuauauacuaugcgcauguuaugaaaugcauaauaaaaaauuuuaaaaaaucuaaaagaucuaaaaaaaaaaaaaaaaaaaaaaaaaaaaaaaaaaaaaaaaaaaaaaaaaaaaaaaaaaaaaaaaugcaucccccccccccccccccccccccccccccccaaaggcucuuuucagagccaccagaauu

SEQ ID NO: 17415 - RNA, 1900 nt, Artificial Sequence
  mRNA product Design d-4 comprising derived and/or modified sequence from HRSV(Memphis-37)__AIY60640.1__F-del_DSCav1_mut5 (opt1)
gggagagucccgcagucggcguccagcggcucugcuuguucgugugugugucguugcaggccuuauucaagcuuaccauggagcugcccauccucaagaccaacgccaucaccacgauccuggccgcggugacccugugcuucgccagcucccagaacaucaccgaggaguucuaccagagcacgugcuccgccgucagcaagggcuaccucuccgcccugcgcaccgggugguacaccagcgugaucaccaucgagcuguccaacaucaaggagaacaagugcaacggcaccgacgccaaggugaagcucaucaagcaggagcuggacaaguacaagaacgcggucacggagcugcagcuccugaugcagagcaccccggccgccggguccggcagcgccaucgcguccgggaucgccgugugcaaggugcugcaccucgagggcgaggucaacaagaucaagaacgcccugcugagcaccaacaaggccguggugucccucagcggcugcggggucuccgugcugaccuucaaggugcuggaccucaagaacuacaucgacaagcagcugcugcccauccucaacaagcagagcugcuccaucagcaacaucgagacggucaucgaguuccagcagaagaacaaccggcugcuggagaucacccgcgaguucuccgugaacgccggcgugaccacccccgucagcacguacaugcucaccaacagcgagcugcugucccucaucaacgacaugcccaucaccaacgaccagaagaagcugaugagcaacaacgugcagaucgugcggcagcaguccuacagcaucaugugcaucaucaaggaggagguccuggcguacguggugcagcucccgcuguacggggucaucgacacccccugcuggaagcugcacacgagcccccucugcaccaccaacaccaaggagggcuccaacaucugccugacgcgcaccgaccgggggugguacugcgacaacgccggcuccgugagcuucuucccccaggccgagaccugcaaggugcaguccaaccgcgucuucugcgacaccaugaacagccggacgcucccguccgaggugaaccugugcaacaucgacaucuucaaccccaaguacgacugcaagaucaugaccagcaagaccgacgucuccagcuccgugaucaccagccugggcgccaucguguccugcuacgggaagacgaagugcaccgccagcaacaagugccggggcaucaucaagaccuucuccaacgggugcgacuacgucagcaacaagggcguggacaccgugagcgucggcaacacgcucuacuacgugaacaagcaggaggggaagucccuguacgugaagggcgagcccaucaucaacuucuacgacccccuggucuucccgagcgacgaguucgacgcguccaucagccaggugaacgagaagaucaaccagucccucgccuucauccgcaagagcgacgagcugcugcacaacgugaacgucgggaaguccaccaccaacaucaugaucaccaccaucaucaucgugaucaucgugauccuccugcugcucaucgccgucggccuguuccuguacugcaaggcccggugaggacuaguggaagcauuuuccuggcugauuaaaagaaauuacucagcuauggucaucuguuccuguuagaaggcuaugcagcauauuauauacuaugcgcauguuaugaaaugcauaauaaaaaauuuuaaaaaaucuaaaagaucuaaaaaaaaaaaaaaaaaaaaaaaaaaaaaaaaaaaaaaaaaaaaaaaaaaaaaaaaaaaaaaaaugcaucccccccccccccccccccccccccccccccaaaggcucuuuucagagccaccagaauu

SEQ ID NO: 17416 - RNA, 1900 nt, Artificial Sequence
  mRNA product Design d-4 comprising derived and/or modified sequence from HRSV(Memphis-37)__AIY60640.1__F-del_DSCav1_mut5 (opt2)
gggagagucccgcagucggcguccagcggcucugcuuguucgugugugugucguugcaggccuuauucaagcuuaccauggagcuccccauccucaagaccaacgccaucaccaccauccucgccgccgucacccucugcuucgccuccucccagaacaucaccgaggaguucuaccaguccaccugcuccgccgucuccaagggcuaccucuccgcccuccgcaccggcugguacaccuccgucaucaccaucgagcucuccaacaucaaggagaacaagugcaacggcaccgacgccaaggucaagcucaucaagcaggagcucgacaaguacaagaacgccgucaccgagcuccagcuccucaugcaguccacccccgccgccggcuccggcuccgccaucgccuccggcaucgccgucugcaagguccuccaccucgagggcgaggucaacaagaucaagaacgcccuccucuccaccaacaaggccgucgucucccucuccggcugcggcgucuccguccucaccuucaagguccucgaccucaagaacuacaucgacaagcagcuccuccccauccucaacaagcaguccugcuccaucuccaacaucgagaccgucaucgaguuccagcagaagaacaaccgccuccucgagaucacccgcgaguucuccgucaacgccggcgucaccacccccgucuccaccuacaugcucaccaacuccgagcuccucucccucaucaacgacaugcccaucaccaacgaccagaagaagcucauguccaacaacguccagaucguccgccagcaguccuacuccaucaugugcaucaucaaggaggagguccucgccuacgucguccagcucccccucuacggcgucaucgacacccccugcuggaagcuccacaccuccccccucugcaccaccaacaccaaggagggcuccaacaucugccucacccgcaccgaccgcggcugguacugcgacaacgccggcuccgucuccuucuucccccaggccgagaccugcaagguccaguccaaccgcgucuucugcgacaccaugaacucccgcacccuccccuccgaggucaaccucugcaacaucgacaucuucaaccccaaguacgacugcaagaucaugaccuccaagaccgacgucuccuccuccgucaucaccucccucggcgccaucgucuccugcuacggcaagaccaagugcaccgccuccaacaagugccgcggcaucaucaagaccuucuccaacggcugcgacuacgucuccaacaagggcgucgacaccgucuccgucggcaacacccucuacuacgucaacaagcaggagggcaagucccucuacgucaagggcgagcccaucaucaacuucuacgacccccucgucuuccccuccgacgaguucgacgccuccaucucccaggucaacgagaagaucaaccagucccucgccuucauccgcaaguccgacgagcuccuccacaacgucaacgucggcaaguccaccaccaacaucaugaucaccaccaucaucaucgucaucaucgucauccuccuccuccucaucgccgucggccucuuccucuacugcaaggcccgcugaggacuaguggaagcauuuuccuggcugauuaaaagaaauuacucagcuauggucaucuguuccuguuagaaggcuaugcagcauauuauauacuaugcgcauguuaugaaaugcauaauaaaaaauuuuaaaaaaucuaaaagaucuaaaaaaaaaaaaaaaaaaaaaaaaaaaaaaaaaaaaaaaaaaaaaaaaaaaaaaaaaaaaaaaaugcaucccccccccccccccccccccccccccccccaaaggcucuuuucagagccaccagaauu

SEQ ID NO: 17417 - RNA, 1900 nt, Artificial Sequence
  mRNA product Design d-4 comprising derived and/or modified sequence from HRSV(Memphis-37)__AIY60640.1__F-del_DSCav1_mut5 (opt3)
gggagagucccgcagucggcguccagcggcucugcuuguucgugugugugucguugcaggccuuauucaagcuuaccauggagcugcccauccucaagaccaacgccauuacaacuauacuugcugcagugacgcugugcuucgccagcucccagaauaucaccgaagaguuuuaccaaucuacauguucagcggucaguaaaggcuauuugagcgcuuuaagaacugggugguacaccuccguuauuacaaucgaacugucuaacauuaaggagaauaaaugcaacggaaccgacgccaaggugaaacuaaucaagcaggaacucgauaaguauaaaaaugcaguaacugagcugcagcuucugaugcagucgaccccugccgcugguucaggcagcgcaauagccagugggaucgcuguguguaaggucuugcaccucgagggagaagugaacaaaauuaagaaugcccugcuguccacaaacaaagcgguugugucucucagcggcugcggugucuccguguuaacguucaagguacuggaccuuaagaauuacaucgauaaacaauugcugccaauucuaaacaagcagucauguaguaucagcaauauagagacuguuauugaauuucagcagaaaaacaauaggcuccuggagaucacccgggaguucucugugaacgcaggggucacaacuccgguguccaccuauaugcuuacaaauucagaacuguugagccucauuaacgacaugcccaucaccaacgaucaaaagaaacugaugaguaauaacgugcagaucguccgccagcagucuuacuccauuaugugcauaaucaaggaggaaguuuuagccuaugugguacaacugccucucuacggagugauugacacgccauguuggaaacuucauacuagcccccugugcacaaccaauacuaaggagggcucgaacaucuguuugacacgaaccgaucguggcugguacugcgacaaugcugggucugucuccuuuuucccucaggccgaaacguguaaggugcagucaaacagaguguuuugcgauaccaugaauaguagaacacugccaagcgaggugaaccucugcaauauagacauuuucaaccccaaauaugauuguaagaucaugacuuccaaaaccgacgucucuagcucagugaucacaagucugggagcaauuguauccugcuacgguaagacuaaauguaccgcuagcaauaagugcaggggcaucauuaagacauuuucuaacgggugugauuauguuucaaauaaaggaguggacaccgucagugugggcaacacucuuuacuaugucaauaagcaagaggguaaaagccuguacgugaagggggaaccuauaaucaacuucuaugacccauugguuuuuccguccgaugaguucgacgccucuauuucgcagguuaacgagaaaaucaaucagagccucgcguuuauccggaaguccgaugaacuguuacacaacguaaaugucggaaagucaacgacaaacauuaugauaaccacuaucauuaucgugauuaucguuauacugcuacuccugaucgccgugggccuuuucuuguacugcaaagcacgcugaggacuaguggaagcauuuuccuggcugauuaaaagaaauuacucagcuauggucaucuguuccuguuagaaggcuaugcagcauauuauauacuaugcgcauguuaugaaaugcauaauaaaaaauuuuaaaaaaucuaaaagaucuaaaaaaaaaaaaaaaaaaaaaaaaaaaaaaaaaaaaaaaaaaaaaaaaaaaaaaaaaaaaaaaaugcaucccccccccccccccccccccccccccccccaaaggcucuuuucagagccaccagaauu

SEQ ID NO: 17418 - RNA, 1900 nt, Artificial Sequence
  mRNA product Design d-4 comprising derived and/or modified sequence from HRSV(Memphis-37)__AIY60640.1__F-del_DSCav1_mut5 (opt4)
gggagagucccgcagucggcguccagcggcucugcuuguucgugugugugucguugcaggccuuauucaagcuuaccauggagcugcccauccugaagaccaacgccaucaccaccauccuggccgccgugacccugugcuucgccagcagccagaacaucaccgaggaguucuaccagagcaccugcagcgccgugagcaagggcuaccugagcgcccugagaaccggcugguacaccagcgugaucaccaucgagcugagcaacaucaaggagaacaagugcaacggcaccgacgccaaggugaagcugaucaagcaggagcuggacaaguacaagaacgccgugaccgagcugcagcugcugaugcagagcacccccgccgccggcagcggcagcgccaucgccagcggcaucgccgugugcaaggugcugcaccuggagggcgaggugaacaagaucaagaacgcccugcugagcaccaacaaggccguggugagccugagcggcugcggcgugagcgugcugaccuucaaggugcuggaccugaagaacuacaucgacaagcagcugcugcccauccugaacaagcagagcugcagcaucagcaacaucgagaccgugaucgaguuccagcagaagaacaacagacugcuggagaucaccagagaguucagcgugaacgccggcgugaccacccccgugagcaccuacaugcugaccaacagcgagcugcugagccugaucaacgacaugcccaucaccaacgaccagaagaagcugaugagcaacaacgugcagaucgugagacagcagagcuacagcaucaugugcaucaucaaggaggaggugcuggccuacguggugcagcugccccuguacggcgugaucgacacccccugcuggaagcugcacaccagcccccugugcaccaccaacaccaaggagggcagcaacaucugccugaccagaaccgacagaggcugguacugcgacaacgccggcagcgugagcuucuucccccaggccgagaccugcaaggugcagagcaacagaguguucugcgacaccaugaacagcagaacccugcccagcgaggugaaccugugcaacaucgacaucuucaaccccaaguacgacugcaagaucaugaccagcaagaccgacgugagcagcagcgugaucaccagccugggcgccaucgugagcugcuacggcaagaccaagugcaccgccagcaacaagugcagaggcaucaucaagaccuucagcaacggcugcgacuacgugagcaacaagggcguggacaccgugagcgugggcaacacccuguacuacgugaacaagcaggagggcaagagccuguacgugaagggcgagcccaucaucaacuucuacgacccccugguguuccccagcgacgaguucgacgccagcaucagccaggugaacgagaagaucaaccagagccuggccuucaucagaaagagcgacgagcugcugcacaacgugaacgugggcaagagcaccaccaacaucaugaucaccaccaucaucaucgugaucaucgugauccugcugcugcugaucgccgugggccuguuccuguacugcaaggccagaugaggacuaguggaagcauuuuccuggcugauuaaaagaaauuacucagcuauggucaucuguuccuguuagaaggcuaugcagcauauuauauacuaugcgcauguuaugaaaugcauaauaaaaaauuuuaaaaaaucuaaaagaucuaaaaaaaaaaaaaaaaaaaaaaaaaaaaaaaaaaaaaaaaaaaaaaaaaaaaaaaaaaaaaaaaugcaucccccccccccccccccccccccccccccccaaaggcucuuuucagagccaccagaauu

SEQ ID NO: 17419 - RNA, 1900 nt, Artificial Sequence
  mRNA product Design d-4 comprising derived and/or modified sequence from HRSV(Memphis-37)__AIY60640.1__F-del_DSCav1_mut5 (opt5)
gggagagucccgcagucggcguccagcggcucugcuuguucgugugugugucguugcaggccuuauucaagcuuaccauggagcugcccauccucaagaccaacgccauuacaacgauccuggcugccgugacccuuugcuucgcgagcucccagaauauuacagaagaguuuuaccaaucuaccuguagcgcugucuccaaaggcuaucugucugcccucagaacagggugguacaccagcguuaucacaauugaacuguccaacaucaaggagaauaaaugcaacggaaccgacgccaaggugaaacuuaucaagcaggaacuggauaaguauaaaaaugcugugacggagcuccagcugcugaugcagucuaccccugccgcuggcagcggguccgccauugcgagcggaaucgccgucuguaaggugcuccaccuggagggcgaaguuaacaaaauuaagaaugcccuucugucuacaaacaaagcuguggucucccucagcgggugcggagugucuguucugaccuucaaggugcuugaccugaagaauuacaucgauaaacaacuccugccgauucugaacaagcaguccuguagcaucucuaauauugagacagucaucgaauuucagcagaaaaacaaucggcuccuggagaucacccgcgaguucuccgugaacgcuggcgugacgacacccgucagcaccuauaugcuuacaaauuccgaacugcucucucugauuaacgacaugccuaucaccaacgaucaaaagaaacuuaugagcaauaacguucagauugugagacagcaguccuacagcaucaugugcauuaucaaggaggaagugcuggccuaugucgugcaacucccccuguacggcguuaucgacaccccuuguuggaaacugcauacaucuccccucugcacgaccaauacaaaggagggguccaacauuugucugacccggacagaucgcggaugguacugcgacaaugcgggcagcgugagcuuuuucccucaggccgaaaccuguaagguccagucuaacagaguguuuugcgauacgaugaacuccagaacacugccgucugagguuaaucucugcaauaucgacauuuucaaccccaaauaugauuguaagaucaugaccagcaaaaccgacguguccagcucugucauuacaucccugggggcuaucgugagcugcuacggaaagaccaaauguacagccucuaauaagugccggggcaucauuaagacguuuuccaacgggugugauuaugucagcaauaaaggaguggacaccguuuccgugggcaacacacuuuacuaugucaauaagcaagagggcaaaucucuguacgugaagggggaaccuaucauuaacuucuaugacccccucguuuuuccuagcgaugaguucgacgcuuccaucucucaggugaacgagaaaauuaaucagagccuggccuuuauccgcaaguccgaugaacugcuccacaacgucaaugugggaaagagcaccacaaacauuaugaucaccacgaucauuaucgugauuaucguuauucugcuucugcucaucgccgucggccuguuccuguacugcaaagcuagaugaggacuaguggaagcauuuuccuggcugauuaaaagaaauuacucagcuauggucaucuguuccuguuagaaggcuaugcagcauauuauauacuaugcgcauguuaugaaaugcauaauaaaaaauuuuaaaaaaucuaaaagaucuaaaaaaaaaaaaaaaaaaaaaaaaaaaaaaaaaaaaaaaaaaaaaaaaaaaaaaaaaaaaaaaaugcaucccccccccccccccccccccccccccccccaaaggcucuuuucagagccaccagaauu

SEQ ID NO: 17420 - RNA, 1900 nt, Artificial Sequence
  mRNA product Design d-4 comprising derived and/or modified sequence from HRSV(Memphis-37)__AIY60640.1__F-del_DSCav1_mut5 (opt6)
gggagagucccgcagucggcguccagcggcucugcuuguucgugugugugucguugcaggccuuauucaagcuuaccauggaauuacccaucuuaaaaacaaaugcaauaacaacaauacuagcagccguaacauuaugcuucgccucaagccaaaacauaacagaagaauuuuaccaaagcacauguuccgccguaucaaaaggauaucucucagcacuacguacuggaugguauacauccguaaucacaauugaacuaucaaacauuaaagaaaacaaaugcaauggaacagaugcgaaaguaaaacuaauaaaacaagaauuagauaaauauaaaaaugcaguaaccgaacuacaacuacuaaugcaaucaacucccgcugccgguagcggauccgccauagcaagcggaauugcuguauguaaaguccuacaucuugaaggcgaagucaacaaaaucaaaaaugcauuacucucgaccaacaaagcagucguaucacuaucaggaugcggagucucaguauuaacuuuuaaaguccuugaccuaaaaaacuacauagacaaacaacuacuaccaauucuaaauaaacaaaguugcagcauauccaauaucgaaacaguuauagaauuucaacaaaaaaacaaccgccuacuagaaaucacuagagaauuuucaguaaaugcaggcguaaccacaccagucucuaccuauaugcuuaccaacucugaauuauuaucacuuauaaacgacaugcccauaacaaaugaucaaaaaaaacuaaugagcaacaacguacaaauaguaagacaacaaagcuacagcauuauguguauaauaaaagaagaaguguuagcuuauguaguccaacuaccccucuauggcguuaucgauacaccaugcuggaaauuacacacaagcccucuaugcacaacuaacaccaaagaaggcucuaacauaugcuuaacaagaacagauagaggaugguauugcgauaacgcaggaucaguaucauucuuuccacaagcagaaacauguaaaguacaaucuaaccgaguauucugcgacacaaugaacucuagaacacuacccucagaaguuaaucucuguaauauugacauuuucaauccaaaauacgauugcaaaauaaugaccucuaaaaccgacguaucauccucaguuauaacguccuuaggagcaaucguaagcugcuauggcaaaacaaaauguaccgcaucaaacaaaugcagaggaauaauaaaaacauucucaaacggcugugacuacguaagcaauaaagguguugacacaguuucaguaggaaauacacuauacuauguaaauaaacaagaaggaaaaucucucuauguaaaaggagaacccauaauaaacuucuacgacccacucguauuuccaagcgaugaauuugaugcgagcauuucccagguaaaugaaaaaauaaaucaaucacuagcauucaucagaaaaagugaugaauuacuacacaauguuaacguaggaaaaucaacaacaaauaucaugauaacaacaaucauaauagucauaaucguaauauuacuauuacuaauagcaguagguuuauuucuauacuguaaagcaagguaaggacuaguggaagcauuuuccuggcugauuaaaagaaauuacucagcuauggucaucuguuccuguuagaaggcuaugcagcauauuauauacuaugcgcauguuaugaaaugcauaauaaaaaauuuuaaaaaaucuaaaagaucuaaaaaaaaaaaaaaaaaaaaaaaaaaaaaaaaaaaaaaaaaaaaaaaaaaaaaaaaaaaaaaaaugcaucccccccccccccccccccccccccccccccaaaggcucuuuucagagccaccagaauu

SEQ ID NO: 17421 - RNA, 1900 nt, Artificial Sequence
  mRNA product Design d-4 comprising derived and/or modified sequence from HRSV(Memphis-37)__AIY60640.1__F-del_DSCav1_mut5 (opt11)
gggagagucccgcagucggcguccagcggcucugcuuguucgugugugugucguugcaggccuuauucaagcuuaccauggaacuucccauccuaaaaaccaacgccauaacaacaauccucgcagcagucacccucugcuucgccucuucacaaaacaucaccgaagaauuuuaccaaucaaccugcuccgccguguccaaaggcuaccucucagcacugcgcacaggaugguauaccagcguaaucaccaucgaacucuccaacaucaaggaaaacaaaugcaacggcaccgaugccaaagucaaacucaucaagcaagaacuugacaaauacaaaaacgccgugaccgagcuacaacuccucaugcaguccacuccagccgccggcuccggcagcgccaucgccuccggcaucgccguaugcaaaguccuccaccucgaaggcgaaguaaacaaaaucaagaacgcacuccuaagcaccaacaaagccgucgucucacucuccgguugcggcgucagcguccuaacauucaaaguucucgaccucaaaaacuacauagacaaacaacuccuccccauccucaacaaacaauccugcuccauaucaaacaucgaaaccguuaucgaauuucaacaaaaaaacaaccgccuccuagaaaucacccgcgaauuuuccgucaacgcaggcgucaccacccccguuuccaccuauaugcucaccaacuccgaacuccucucccucaucaacgacaugcccauuaccaacgaccaaaagaaacuuaugagcaacaacguucaaaucguccgacaacaaucauacuccaucaugugcauuaucaaagaagaaguacucgccuacguaguacaauuaccccucuacggcguaaucgacaccccaugcuggaaacuacacaccuccccccucuguaccaccaacaccaaagaaggcucuaacaucugccucacccgcacagaccguggcugguauugcgauaacgcagggucugucuccuucuucccccaagccgaaacaugcaaaguccaauccaacagagucuucugcgacaccaugaacucgagaacccuccccuccgaagucaaccuaugcaacaucgacaucuucaacccaaaauacgacugcaaaaucaugacuucaaaaacagacgugagcucguccgucaucacaagccuaggagcuaucguauccugcuacggaaaaacaaaaugcacugcuuccaacaaaugccgcggaaucauaaaaaccuucuccaacggcugcgacuacgucagcaacaaaggcgucgacacagucuccguaggcaacacccuauacuacgucaauaaacaagaaggcaagucccuauaugucaaaggcgagcccaucaucaauuucuaugauccccucguuuucccauccgacgaauuugacgcauccaucucccaagucaacgaaaaaauaaaccaaagccucgcauucauccgcaaauccgacgaacuccuccacaacguaaacguaggaaaauccacaacuaacaucaugaucaccaccaucaucaucgucauuaucgucauccuacuccuccucauagcagucggccucuuccucuacugcaaagcacgcuagggacuaguggaagcauuuuccuggcugauuaaaagaaauuacucagcuauggucaucuguuccuguuagaaggcuaugcagcauauuauauacuaugcgcauguuaugaaaugcauaauaaaaaauuuuaaaaaaucuaaaagaucuaaaaaaaaaaaaaaaaaaaaaaaaaaaaaaaaaaaaaaaaaaaaaaaaaaaaaaaaaaaaaaaaugcaucccccccccccccccccccccccccccccccaaaggcucuuuucagagccaccagaauu

SEQ ID NO: 17422 - RNA, 1997 nt, Artificial Sequence
  mRNA product Design d-5 comprising derived and/or modified sequence from HRSV(Memphis-37)__AIY60640.1__F-del_DSCav1_mut5 (opt1)
gggagagggcgcuuggcuugcaaggacccugagcugcggcauugaagcacacccaacccaacucgacugaagucagccucacugaaccggaucugagaaucuucucucucugggcuugccagggcucuccgaaccuagcuagcauccucuucaauuccaacuagaaagcuuaccauggagcugcccauccucaagaccaacgccaucaccacgauccuggccgcggugacccugugcuucgccagcucccagaacaucaccgaggaguucuaccagagcacgugcuccgccgucagcaagggcuaccucuccgcccugcgcaccgggugguacaccagcgugaucaccaucgagcuguccaacaucaaggagaacaagugcaacggcaccgacgccaaggugaagcucaucaagcaggagcuggacaaguacaagaacgcggucacggagcugcagcuccugaugcagagcaccccggccgccggcuccgggagcgcgaucgccuccggcaucgccgucugcaaggugcugcaccucgagggcgaggugaacaagaucaagaacgcccugcuguccaccaacaaggccgucgugagccucuccggcugcggggugagcguccugaccuucaaggugcuggaccucaagaacuacaucgacaagcagcugcugcccauccugaacaagcagagcugcuccaucagcaacaucgagaccgucaucgaguuccagcagaagaacaaccgccuccuggagaucacgcgggaguucagcgugaacgcgggcgugaccacccccgucuccaccuacaugcugacgaacagcgagcuccugucccugaucaacgacaugccgaucaccaacgaccagaagaagcucaugagcaacaacgugcagaucgugcgccagcaguccuacagcaucaugugcaucaucaaggaggagguccuggccuacguggugcagcugccccucuacggggucaucgacacccccugcuggaagcugcacaccagcccccugugcacgaccaacaccaaggagggcuccaacaucugccucacccggacggaccgcgggugguacugcgacaacgccggcagcguguccuucuucccgcaggccgagaccugcaagguccagagcaaccggguguucugcgacaccaugaacucccggacccugcccagcgaggugaaccucugcaacaucgacaucuucaaccccaaguacgacugcaagaucaugacguccaagaccgacgucagcuccagcgugaucaccucccugggcgccaucgugagcugcuacgggaagaccaagugcacggcgagcaacaagugccgcggcaucaucaagaccuucuccaacgggugcgacuacgucagcaacaagggcguggacaccguguccgucggcaacacccuguacuacgugaacaagcaggagggcaagagccucuacgugaagggggagcccaucaucaacuucuacgacccgcuggucuuccccuccgacgaguucgacgccagcaucucccaggugaacgagaagaucaaccagagccuggccuucauccggaaguccgacgagcuccugcacaacgugaacgucggcaagagcaccacgaacaucaugaucaccaccaucaucaucgugaucaucgugauccugcugcuccugaucgccgucgggcuguuccucuacugcaaggcccgcugaggacuaguggaagcauuuuccuggcugauuaaaagaaauuacucagcuauggucaucuguuccuguuagaaggcuaugcagcauauuauauacuaugcgcauguuaugaaaugcauaauaaaaaauuuuaaaaaaucuaaaagaucuaaaaaaaaaaaaaaaaaaaaaaaaaaaaaaaaaaaaaaaaaaaaaaaaaaaaaaaaaaaaaaaaugcaucccccccccccccccccccccccccccccccaaaggcucuuuucagagccaccagaauu

SEQ ID NO: 17423 - RNA, 1997 nt, Artificial Sequence
  mRNA product Design d-5 comprising derived and/or modified sequence from HRSV(Memphis-37)__AIY60640.1__F-del_DSCav1_mut5 (opt1)
gggagagggcgcuuggcuugcaaggacccugagcugcggcauugaagcacacccaacccaacucgacugaagucagccucacugaaccggaucugagaaucuucucucucugggcuugccagggcucuccgaaccuagcuagcauccucuucaauuccaacuagaaagcuuaccauggagcugcccauccucaagaccaacgccaucaccacgauccuggccgcggugacccugugcuucgccagcucccagaacaucaccgaggaguucuaccagagcacgugcuccgccgucagcaagggcuaccucuccgcccugcgcaccgggugguacaccagcgugaucaccaucgagcuguccaacaucaaggagaacaagugcaacggcaccgacgccaaggugaagcucaucaagcaggagcuggacaaguacaagaacgcggucacggagcugcagcuccugaugcagagcaccccggccgccggguccggcagcgccaucgcguccgggaucgccgugugcaaggugcugcaccucgagggcgaggucaacaagaucaagaacgcccugcugagcaccaacaaggccguggugucccucagcggcugcggggucuccgugcugaccuucaaggugcuggaccucaagaacuacaucgacaagcagcugcugcccauccucaacaagcagagcugcuccaucagcaacaucgagacggucaucgaguuccagcagaagaacaaccggcugcuggagaucacccgcgaguucuccgugaacgccggcgugaccacccccgucagcacguacaugcucaccaacagcgagcugcugucccucaucaacgacaugcccaucaccaacgaccagaagaagcugaugagcaacaacgugcagaucgugcggcagcaguccuacagcaucaugugcaucaucaaggaggagguccuggcguacguggugcagcucccgcuguacggggucaucgacacccccugcuggaagcugcacacgagcccccucugcaccaccaacaccaaggagggcuccaacaucugccugacgcgcaccgaccgggggugguacugcgacaacgccggcuccgugagcuucuucccccaggccgagaccugcaaggugcaguccaaccgcgucuucugcgacaccaugaacagccggacgcucccguccgaggugaaccugugcaacaucgacaucuucaaccccaaguacgacugcaagaucaugaccagcaagaccgacgucuccagcuccgugaucaccagccugggcgccaucguguccugcuacgggaagacgaagugcaccgccagcaacaagugccggggcaucaucaagaccuucuccaacgggugcgacuacgucagcaacaagggcguggacaccgugagcgucggcaacacgcucuacuacgugaacaagcaggaggggaagucccuguacgugaagggcgagcccaucaucaacuucuacgacccccuggucuucccgagcgacgaguucgacgcguccaucagccaggugaacgagaagaucaaccagucccucgccuucauccgcaagagcgacgagcugcugcacaacgugaacgucgggaaguccaccaccaacaucaugaucaccaccaucaucaucgugaucaucgugauccuccugcugcucaucgccgucggccuguuccuguacugcaaggcccggugaggacuaguggaagcauuuuccuggcugauuaaaagaaauuacucagcuauggucaucuguuccuguuagaaggcuaugcagcauauuauauacuaugcgcauguuaugaaaugcauaauaaaaaauuuuaaaaaaucuaaaagaucuaaaaaaaaaaaaaaaaaaaaaaaaaaaaaaaaaaaaaaaaaaaaaaaaaaaaaaaaaaaaaaaaugcaucccccccccccccccccccccccccccccccaaaggcucuuuucagagccaccagaauu

SEQ ID NO: 17424 - RNA, 1997 nt, Artificial Sequence
  mRNA product Design d-5 comprising derived and/or modified sequence from HRSV(Memphis-37)__AIY60640.1__F-del_DSCav1_mut5 (opt2)
gggagagggcgcuuggcuugcaaggacccugagcugcggcauugaagcacacccaacccaacucgacugaagucagccucacugaaccggaucugagaaucuucucucucugggcuugccagggcucuccgaaccuagcuagcauccucuucaauuccaacuagaaagcuuaccauggagcuccccauccucaagaccaacgccaucaccaccauccucgccgccgucacccucugcuucgccuccucccagaacaucaccgaggaguucuaccaguccaccugcuccgccgucuccaagggcuaccucuccgcccuccgcaccggcugguacaccuccgucaucaccaucgagcucuccaacaucaaggagaacaagugcaacggcaccgacgccaaggucaagcucaucaagcaggagcucgacaaguacaagaacgccgucaccgagcuccagcuccucaugcaguccacccccgccgccggcuccggcuccgccaucgccuccggcaucgccgucugcaagguccuccaccucgagggcgaggucaacaagaucaagaacgcccuccucuccaccaacaaggccgucgucucccucuccggcugcggcgucuccguccucaccuucaagguccucgaccucaagaacuacaucgacaagcagcuccuccccauccucaacaagcaguccugcuccaucuccaacaucgagaccgucaucgaguuccagcagaagaacaaccgccuccucgagaucacccgcgaguucuccgucaacgccggcgucaccacccccgucuccaccuacaugcucaccaacuccgagcuccucucccucaucaacgacaugcccaucaccaacgaccagaagaagcucauguccaacaacguccagaucguccgccagcaguccuacuccaucaugugcaucaucaaggaggagguccucgccuacgucguccagcucccccucuacggcgucaucgacacccccugcuggaagcuccacaccuccccccucugcaccaccaacaccaaggagggcuccaacaucugccucacccgcaccgaccgcggcugguacugcgacaacgccggcuccgucuccuucuucccccaggccgagaccugcaagguccaguccaaccgcgucuucugcgacaccaugaacucccgcacccuccccuccgaggucaaccucugcaacaucgacaucuucaaccccaaguacgacugcaagaucaugaccuccaagaccgacgucuccuccuccgucaucaccucccucggcgccaucgucuccugcuacggcaagaccaagugcaccgccuccaacaagugccgcggcaucaucaagaccuucuccaacggcugcgacuacgucuccaacaagggcgucgacaccgucuccgucggcaacacccucuacuacgucaacaagcaggagggcaagucccucuacgucaagggcgagcccaucaucaacuucuacgacccccucgucuuccccuccgacgaguucgacgccuccaucucccaggucaacgagaagaucaaccagucccucgccuucauccgcaaguccgacgagcuccuccacaacgucaacgucggcaaguccaccaccaacaucaugaucaccaccaucaucaucgucaucaucgucauccuccuccuccucaucgccgucggccucuuccucuacugcaaggcccgcugaggacuaguggaagcauuuuccuggcugauuaaaagaaauuacucagcuauggucaucuguuccuguuagaaggcuaugcagcauauuauauacuaugcgcauguuaugaaaugcauaauaaaaaauuuuaaaaaaucuaaaagaucuaaaaaaaaaaaaaaaaaaaaaaaaaaaaaaaaaaaaaaaaaaaaaaaaaaaaaaaaaaaaaaaaugcaucccccccccccccccccccccccccccccccaaaggcucuuuucagagccaccagaauu

SEQ ID NO: 17425 - RNA, 1997 nt, Artificial Sequence
  mRNA product Design d-5 comprising derived and/or modified sequence from HRSV(Memphis-37)__AIY60640.1__F-del_DSCav1_mut5 (opt3)
gggagagggcgcuuggcuugcaaggacccugagcugcggcauugaagcacacccaacccaacucgacugaagucagccucacugaaccggaucugagaaucuucucucucugggcuugccagggcucuccgaaccuagcuagcauccucuucaauuccaacuagaaagcuuaccauggagcugcccauccucaagaccaacgccauuacaacuauacuugcugcagugacgcugugcuucgccagcucccagaauaucaccgaagaguuuuaccaaucuacauguucagcggucaguaaaggcuauuugagcgcuuuaagaacugggugguacaccuccguuauuacaaucgaacugucuaacauuaaggagaauaaaugcaacggaaccgacgccaaggugaaacuaaucaagcaggaacucgauaaguauaaaaaugcaguaacugagcugcagcuucugaugcagucgaccccugccgcugguucaggcagcgcaauagccagugggaucgcuguguguaaggucuugcaccucgagggagaagugaacaaaauuaagaaugcccugcuguccacaaacaaagcgguugugucucucagcggcugcggugucuccguguuaacguucaagguacuggaccuuaagaauuacaucgauaaacaauugcugccaauucuaaacaagcagucauguaguaucagcaauauagagacuguuauugaauuucagcagaaaaacaauaggcuccuggagaucacccgggaguucucugugaacgcaggggucacaacuccgguguccaccuauaugcuuacaaauucagaacuguugagccucauuaacgacaugcccaucaccaacgaucaaaagaaacugaugaguaauaacgugcagaucguccgccagcagucuuacuccauuaugugcauaaucaaggaggaaguuuuagccuaugugguacaacugccucucuacggagugauugacacgccauguuggaaacuucauacuagcccccugugcacaaccaauacuaaggagggcucgaacaucuguuugacacgaaccgaucguggcugguacugcgacaaugcugggucugucuccuuuuucccucaggccgaaacguguaaggugcagucaaacagaguguuuugcgauaccaugaauaguagaacacugccaagcgaggugaaccucugcaauauagacauuuucaaccccaaauaugauuguaagaucaugacuuccaaaaccgacgucucuagcucagugaucacaagucugggagcaauuguauccugcuacgguaagacuaaauguaccgcuagcaauaagugcaggggcaucauuaagacauuuucuaacgggugugauuauguuucaaauaaaggaguggacaccgucagugugggcaacacucuuuacuaugucaauaagcaagaggguaaaagccuguacgugaagggggaaccuauaaucaacuucuaugacccauugguuuuuccguccgaugaguucgacgccucuauuucgcagguuaacgagaaaaucaaucagagccucgcguuuauccggaaguccgaugaacuguuacacaacguaaaugucggaaagucaacgacaaacauuaugauaaccacuaucauuaucgugauuaucguuauacugcuacuccugaucgccgugggccuuuucuuguacugcaaagcacgcugaggacuaguggaagcauuuuccuggcugauuaaaagaaauuacucagcuauggucaucuguuccuguuagaaggcuaugcagcauauuauauacuaugcgcauguuaugaaaugcauaauaaaaaauuuuaaaaaaucuaaaagaucuaaaaaaaaaaaaaaaaaaaaaaaaaaaaaaaaaaaaaaaaaaaaaaaaaaaaaaaaaaaaaaaaugcaucccccccccccccccccccccccccccccccaaaggcucuuuucagagccaccagaauu

SEQ ID NO: 17426 - RNA, 1997 nt, Artificial Sequence
  mRNA product Design d-5 comprising derived and/or modified sequence from HRSV(Memphis-37)__AIY60640.1__F-del_DSCav1_mut5 (opt4)
gggagagggcgcuuggcuugcaaggacccugagcugcggcauugaagcacacccaacccaacucgacugaagucagccucacugaaccggaucugagaaucuucucucucugggcuugccagggcucuccgaaccuagcuagcauccucuucaauuccaacuagaaagcuuaccauggagcugcccauccugaagaccaacgccaucaccaccauccuggccgccgugacccugugcuucgccagcagccagaacaucaccgaggaguucuaccagagcaccugcagcgccgugagcaagggcuaccugagcgcccugagaaccggcugguacaccagcgugaucaccaucgagcugagcaacaucaaggagaacaagugcaacggcaccgacgccaaggugaagcugaucaagcaggagcuggacaaguacaagaacgccgugaccgagcugcagcugcugaugcagagcacccccgccgccggcagcggcagcgccaucgccagcggcaucgccgugugcaaggugcugcaccuggagggcgaggugaacaagaucaagaacgcccugcugagcaccaacaaggccguggugagccugagcggcugcggcgugagcgugcugaccuucaaggugcuggaccugaagaacuacaucgacaagcagcugcugcccauccugaacaagcagagcugcagcaucagcaacaucgagaccgugaucgaguuccagcagaagaacaacagacugcuggagaucaccagagaguucagcgugaacgccggcgugaccacccccgugagcaccuacaugcugaccaacagcgagcugcugagccugaucaacgacaugcccaucaccaacgaccagaagaagcugaugagcaacaacgugcagaucgugagacagcagagcuacagcaucaugugcaucaucaaggaggaggugcuggccuacguggugcagcugccccuguacggcgugaucgacacccccugcuggaagcugcacaccagcccccugugcaccaccaacaccaaggagggcagcaacaucugccugaccagaaccgacagaggcugguacugcgacaacgccggcagcgugagcuucuucccccaggccgagaccugcaaggugcagagcaacagaguguucugcgacaccaugaacagcagaacccugcccagcgaggugaaccugugcaacaucgacaucuucaaccccaaguacgacugcaagaucaugaccagcaagaccgacgugagcagcagcgugaucaccagccugggcgccaucgugagcugcuacggcaagaccaagugcaccgccagcaacaagugcagaggcaucaucaagaccuucagcaacggcugcgacuacgugagcaacaagggcguggacaccgugagcgugggcaacacccuguacuacgugaacaagcaggagggcaagagccuguacgugaagggcgagcccaucaucaacuucuacgacccccugguguuccccagcgacgaguucgacgccagcaucagccaggugaacgagaagaucaaccagagccuggccuucaucagaaagagcgacgagcugcugcacaacgugaacgugggcaagagcaccaccaacaucaugaucaccaccaucaucaucgugaucaucgugauccugcugcugcugaucgccgugggccuguuccuguacugcaaggccagaugaggacuaguggaagcauuuuccuggcugauuaaaagaaauuacucagcuauggucaucuguuccuguuagaaggcuaugcagcauauuauauacuaugcgcauguuaugaaaugcauaauaaaaaauuuuaaaaaaucuaaaagaucuaaaaaaaaaaaaaaaaaaaaaaaaaaaaaaaaaaaaaaaaaaaaaaaaaaaaaaaaaaaaaaaaugcaucccccccccccccccccccccccccccccccaaaggcucuuuucagagccaccagaauu

SEQ ID NO: 17427 - RNA, 1997 nt, Artificial Sequence
  mRNA product Design d-5 comprising derived and/or modified sequence from HRSV(Memphis-37)__AIY60640.1__F-del_DSCav1_mut5 (opt5)
gggagagggcgcuuggcuugcaaggacccugagcugcggcauugaagcacacccaacccaacucgacugaagucagccucacugaaccggaucugagaaucuucucucucugggcuugccagggcucuccgaaccuagcuagcauccucuucaauuccaacuagaaagcuuaccauggagcugcccauccucaagaccaacgccauuacaacgauccuggcugccgugacccuuugcuucgcgagcucccagaauauuacagaagaguuuuaccaaucuaccuguagcgcugucuccaaaggcuaucugucugcccucagaacagggugguacaccagcguuaucacaauugaacuguccaacaucaaggagaauaaaugcaacggaaccgacgccaaggugaaacuuaucaagcaggaacuggauaaguauaaaaaugcugugacggagcuccagcugcugaugcagucuaccccugccgcuggcagcggguccgccauugcgagcggaaucgccgucuguaaggugcuccaccuggagggcgaaguuaacaaaauuaagaaugcccuucugucuacaaacaaagcuguggucucccucagcgggugcggagugucuguucugaccuucaaggugcuugaccugaagaauuacaucgauaaacaacuccugccgauucugaacaagcaguccuguagcaucucuaauauugagacagucaucgaauuucagcagaaaaacaaucggcuccuggagaucacccgcgaguucuccgugaacgcuggcgugacgacacccgucagcaccuauaugcuuacaaauuccgaacugcucucucugauuaacgacaugccuaucaccaacgaucaaaagaaacuuaugagcaauaacguucagauugugagacagcaguccuacagcaucaugugcauuaucaaggaggaagugcuggccuaugucgugcaacucccccuguacggcguuaucgacaccccuuguuggaaacugcauacaucuccccucugcacgaccaauacaaaggagggguccaacauuugucugacccggacagaucgcggaugguacugcgacaaugcgggcagcgugagcuuuuucccucaggccgaaaccuguaagguccagucuaacagaguguuuugcgauacgaugaacuccagaacacugccgucugagguuaaucucugcaauaucgacauuuucaaccccaaauaugauuguaagaucaugaccagcaaaaccgacguguccagcucugucauuacaucccugggggcuaucgugagcugcuacggaaagaccaaauguacagccucuaauaagugccggggcaucauuaagacguuuuccaacgggugugauuaugucagcaauaaaggaguggacaccguuuccgugggcaacacacuuuacuaugucaauaagcaagagggcaaaucucuguacgugaagggggaaccuaucauuaacuucuaugacccccucguuuuuccuagcgaugaguucgacgcuuccaucucucaggugaacgagaaaauuaaucagagccuggccuuuauccgcaaguccgaugaacugcuccacaacgucaaugugggaaagagcaccacaaacauuaugaucaccacgaucauuaucgugauuaucguuauucugcuucugcucaucgccgucggccuguuccuguacugcaaagcuagaugaggacuaguggaagcauuuuccuggcugauuaaaagaaauuacucagcuauggucaucuguuccuguuagaaggcuaugcagcauauuauauacuaugcgcauguuaugaaaugcauaauaaaaaauuuuaaaaaaucuaaaagaucuaaaaaaaaaaaaaaaaaaaaaaaaaaaaaaaaaaaaaaaaaaaaaaaaaaaaaaaaaaaaaaaaugcaucccccccccccccccccccccccccccccccaaaggcucuuuucagagccaccagaauu

SEQ ID NO: 17428 - RNA, 1997 nt, Artificial Sequence
  mRNA product Design d-5 comprising derived and/or modified sequence from HRSV(Memphis-37)__AIY60640.1__F-del_DSCav1_mut5 (opt6)
gggagagggcgcuuggcuugcaaggacccugagcugcggcauugaagcacacccaacccaacucgacugaagucagccucacugaaccggaucugagaaucuucucucucugggcuugccagggcucuccgaaccuagcuagcauccucuucaauuccaacuagaaagcuuaccauggaauuacccaucuuaaaaacaaaugcaauaacaacaauacuagcagccguaacauuaugcuucgccucaagccaaaacauaacagaagaauuuuaccaaagcacauguuccgccguaucaaaaggauaucucucagcacuacguacuggaugguauacauccguaaucacaauugaacuaucaaacauuaaagaaaacaaaugcaauggaacagaugcgaaaguaaaacuaauaaaacaagaauuagauaaauauaaaaaugcaguaaccgaacuacaacuacuaaugcaaucaacucccgcugccgguagcggauccgccauagcaagcggaauugcuguauguaaaguccuacaucuugaaggcgaagucaacaaaaucaaaaaugcauuacucucgaccaacaaagcagucguaucacuaucaggaugcggagucucaguauuaacuuuuaaaguccuugaccuaaaaaacuacauagacaaacaacuacuaccaauucuaaauaaacaaaguugcagcauauccaauaucgaaacaguuauagaauuucaacaaaaaaacaaccgccuacuagaaaucacuagagaauuuucaguaaaugcaggcguaaccacaccagucucuaccuauaugcuuaccaacucugaauuauuaucacuuauaaacgacaugcccauaacaaaugaucaaaaaaaacuaaugagcaacaacguacaaauaguaagacaacaaagcuacagcauuauguguauaauaaaagaagaaguguuagcuuauguaguccaacuaccccucuauggcguuaucgauacaccaugcuggaaauuacacacaagcccucuaugcacaacuaacaccaaagaaggcucuaacauaugcuuaacaagaacagauagaggaugguauugcgauaacgcaggaucaguaucauucuuuccacaagcagaaacauguaaaguacaaucuaaccgaguauucugcgacacaaugaacucuagaacacuacccucagaaguuaaucucuguaauauugacauuuucaauccaaaauacgauugcaaaauaaugaccucuaaaaccgacguaucauccucaguuauaacguccuuaggagcaaucguaagcugcuauggcaaaacaaaauguaccgcaucaaacaaaugcagaggaauaauaaaaacauucucaaacggcugugacuacguaagcaauaaagguguugacacaguuucaguaggaaauacacuauacuauguaaauaaacaagaaggaaaaucucucuauguaaaaggagaacccauaauaaacuucuacgacccacucguauuuccaagcgaugaauuugaugcgagcauuucccagguaaaugaaaaaauaaaucaaucacuagcauucaucagaaaaagugaugaauuacuacacaauguuaacguaggaaaaucaacaacaaauaucaugauaacaacaaucauaauagucauaaucguaauauuacuauuacuaauagcaguagguuuauuucuauacuguaaagcaagguaaggacuaguggaagcauuuuccuggcugauuaaaagaaauuacucagcuauggucaucuguuccuguuagaaggcuaugcagcauauuauauacuaugcgcauguuaugaaaugcauaauaaaaaauuuuaaaaaaucuaaaagaucuaaaaaaaaaaaaaaaaaaaaaaaaaaaaaaaaaaaaaaaaaaaaaaaaaaaaaaaaaaaaaaaaugcaucccccccccccccccccccccccccccccccaaaggcucuuuucagagccaccagaauu

SEQ ID NO: 17429 - RNA, 1997 nt, Artificial Sequence
  mRNA product Design d-5 comprising derived and/or modified sequence from HRSV(Memphis-37)__AIY60640.1__F-del_DSCav1_mut5 (opt11)
gggagagggcgcuuggcuugcaaggacccugagcugcggcauugaagcacacccaacccaacucgacugaagucagccucacugaaccggaucugagaaucuucucucucugggcuugccagggcucuccgaaccuagcuagcauccucuucaauuccaacuagaaagcuuaccauggaacuucccauccuaaaaaccaacgccauaacaacaauccucgcagcagucacccucugcuucgccucuucacaaaacaucaccgaagaauuuuaccaaucaaccugcuccgccguguccaaaggcuaccucucagcacugcgcacaggaugguauaccagcguaaucaccaucgaacucuccaacaucaaggaaaacaaaugcaacggcaccgaugccaaagucaaacucaucaagcaagaacuugacaaauacaaaaacgccgugaccgagcuacaacuccucaugcaguccacuccagccgccggcuccggcagcgccaucgccuccggcaucgccguaugcaaaguccuccaccucgaaggcgaaguaaacaaaaucaagaacgcacuccuaagcaccaacaaagccgucgucucacucuccgguugcggcgucagcguccuaacauucaaaguucucgaccucaaaaacuacauagacaaacaacuccuccccauccucaacaaacaauccugcuccauaucaaacaucgaaaccguuaucgaauuucaacaaaaaaacaaccgccuccuagaaaucacccgcgaauuuuccgucaacgcaggcgucaccacccccguuuccaccuauaugcucaccaacuccgaacuccucucccucaucaacgacaugcccauuaccaacgaccaaaagaaacuuaugagcaacaacguucaaaucguccgacaacaaucauacuccaucaugugcauuaucaaagaagaaguacucgccuacguaguacaauuaccccucuacggcguaaucgacaccccaugcuggaaacuacacaccuccccccucuguaccaccaacaccaaagaaggcucuaacaucugccucacccgcacagaccguggcugguauugcgauaacgcagggucugucuccuucuucccccaagccgaaacaugcaaaguccaauccaacagagucuucugcgacaccaugaacucgagaacccuccccuccgaagucaaccuaugcaacaucgacaucuucaacccaaaauacgacugcaaaaucaugacuucaaaaacagacgugagcucguccgucaucacaagccuaggagcuaucguauccugcuacggaaaaacaaaaugcacugcuuccaacaaaugccgcggaaucauaaaaaccuucuccaacggcugcgacuacgucagcaacaaaggcgucgacacagucuccguaggcaacacccuauacuacgucaauaaacaagaaggcaagucccuauaugucaaaggcgagcccaucaucaauuucuaugauccccucguuuucccauccgacgaauuugacgcauccaucucccaagucaacgaaaaaauaaaccaaagccucgcauucauccgcaaauccgacgaacuccuccacaacguaaacguaggaaaauccacaacuaacaucaugaucaccaccaucaucaucgucauuaucgucauccuacuccuccucauagcagucggccucuuccucuacugcaaagcacgcuagggacuaguggaagcauuuuccuggcugauuaaaagaaauuacucagcuauggucaucuguuccuguuagaaggcuaugcagcauauuauauacuaugcgcauguuaugaaaugcauaauaaaaaauuuuaaaaaaucuaaaagaucuaaaaaaaaaaaaaaaaaaaaaaaaaaaaaaaaaaaaaaaaaaaaaaaaaaaaaaaaaaaaaaaaugcaucccccccccccccccccccccccccccccccaaaggcucuuuucagagccaccagaauu

SEQ ID NO: 17430 - RNA, 1877 nt, Artificial Sequence
  mRNA product Design e-1 comprising derived and/or modified sequence from HRSV(Memphis-37)__AIY60640.1__F-del_DSCav1_mut5 (opt1)
gggagaauauaagcguuggcggagcgucgguuguagcacucugcgcgcccgcucuucugcugcuguuugucuacuuccuccugcuuccccgccgccgccgccgccaucaagcuuaccauggagcugcccauccucaagaccaacgccaucaccacgauccuggccgcggugacccugugcuucgccagcucccagaacaucaccgaggaguucuaccagagcacgugcuccgccgucagcaagggcuaccucuccgcccugcgcaccgggugguacaccagcgugaucaccaucgagcuguccaacaucaaggagaacaagugcaacggcaccgacgccaaggugaagcucaucaagcaggagcuggacaaguacaagaacgcggucacggagcugcagcuccugaugcagagcaccccggccgccggcuccgggagcgcgaucgccuccggcaucgccgucugcaaggugcugcaccucgagggcgaggugaacaagaucaagaacgcccugcuguccaccaacaaggccgucgugagccucuccggcugcggggugagcguccugaccuucaaggugcuggaccucaagaacuacaucgacaagcagcugcugcccauccugaacaagcagagcugcuccaucagcaacaucgagaccgucaucgaguuccagcagaagaacaaccgccuccuggagaucacgcgggaguucagcgugaacgcgggcgugaccacccccgucuccaccuacaugcugacgaacagcgagcuccugucccugaucaacgacaugccgaucaccaacgaccagaagaagcucaugagcaacaacgugcagaucgugcgccagcaguccuacagcaucaugugcaucaucaaggaggagguccuggccuacguggugcagcugccccucuacggggucaucgacacccccugcuggaagcugcacaccagcccccugugcacgaccaacaccaaggagggcuccaacaucugccucacccggacggaccgcgggugguacugcgacaacgccggcagcguguccuucuucccgcaggccgagaccugcaagguccagagcaaccggguguucugcgacaccaugaacucccggacccugcccagcgaggugaaccucugcaacaucgacaucuucaaccccaaguacgacugcaagaucaugacguccaagaccgacgucagcuccagcgugaucaccucccugggcgccaucgugagcugcuacgggaagaccaagugcacggcgagcaacaagugccgcggcaucaucaagaccuucuccaacgggugcgacuacgucagcaacaagggcguggacaccguguccgucggcaacacccuguacuacgugaacaagcaggagggcaagagccucuacgugaagggggagcccaucaucaacuucuacgacccgcuggucuuccccuccgacgaguucgacgccagcaucucccaggugaacgagaagaucaaccagagccuggccuucauccggaaguccgacgagcuccugcacaacgugaacgucggcaagagcaccacgaacaucaugaucaccaccaucaucaucgugaucaucgugauccugcugcuccugaucgccgucgggcuguuccucuacugcaaggcccgcugaggacuaguguccaccugucccuccugggcugcuggauugucucguuuuccugccaaauaaacaggaucagcgcuuuacagaucuaaaaaaaaaaaaaaaaaaaaaaaaaaaaaaaaaaaaaaaaaaaaaaaaaaaaaaaaaaaaaaaaugcaucccccccccccccccccccccccccccccccaaaggcucuuuucagagccaccagaauu

SEQ ID NO: 17431 - RNA, 1877 nt, Artificial Sequence
  mRNA product Design e-1 comprising derived and/or modified sequence from HRSV(Memphis-37)__AIY60640.1__F-del_DSCav1_mut5 (opt1)
gggagaauauaagcguuggcggagcgucgguuguagcacucugcgcgcccgcucuucugcugcuguuugucuacuuccuccugcuuccccgccgccgccgccgccaucaagcuuaccauggagcugcccauccucaagaccaacgccaucaccacgauccuggccgcggugacccugugcuucgccagcucccagaacaucaccgaggaguucuaccagagcacgugcuccgccgucagcaagggcuaccucuccgcccugcgcaccgggugguacaccagcgugaucaccaucgagcuguccaacaucaaggagaacaagugcaacggcaccgacgccaaggugaagcucaucaagcaggagcuggacaaguacaagaacgcggucacggagcugcagcuccugaugcagagcaccccggccgccggguccggcagcgccaucgcguccgggaucgccgugugcaaggugcugcaccucgagggcgaggucaacaagaucaagaacgcccugcugagcaccaacaaggccguggugucccucagcggcugcggggucuccgugcugaccuucaaggugcuggaccucaagaacuacaucgacaagcagcugcugcccauccucaacaagcagagcugcuccaucagcaacaucgagacggucaucgaguuccagcagaagaacaaccggcugcuggagaucacccgcgaguucuccgugaacgccggcgugaccacccccgucagcacguacaugcucaccaacagcgagcugcugucccucaucaacgacaugcccaucaccaacgaccagaagaagcugaugagcaacaacgugcagaucgugcggcagcaguccuacagcaucaugugcaucaucaaggaggagguccuggcguacguggugcagcucccgcuguacggggucaucgacacccccugcuggaagcugcacacgagcccccucugcaccaccaacaccaaggagggcuccaacaucugccugacgcgcaccgaccgggggugguacugcgacaacgccggcuccgugagcuucuucccccaggccgagaccugcaaggugcaguccaaccgcgucuucugcgacaccaugaacagccggacgcucccguccgaggugaaccugugcaacaucgacaucuucaaccccaaguacgacugcaagaucaugaccagcaagaccgacgucuccagcuccgugaucaccagccugggcgccaucguguccugcuacgggaagacgaagugcaccgccagcaacaagugccggggcaucaucaagaccuucuccaacgggugcgacuacgucagcaacaagggcguggacaccgugagcgucggcaacacgcucuacuacgugaacaagcaggaggggaagucccuguacgugaagggcgagcccaucaucaacuucuacgacccccuggucuucccgagcgacgaguucgacgcguccaucagccaggugaacgagaagaucaaccagucccucgccuucauccgcaagagcgacgagcugcugcacaacgugaacgucgggaaguccaccaccaacaucaugaucaccaccaucaucaucgugaucaucgugauccuccugcugcucaucgccgucggccuguuccuguacugcaaggcccggugaggacuaguguccaccugucccuccugggcugcuggauugucucguuuuccugccaaauaaacaggaucagcgcuuuacagaucuaaaaaaaaaaaaaaaaaaaaaaaaaaaaaaaaaaaaaaaaaaaaaaaaaaaaaaaaaaaaaaaaugcaucccccccccccccccccccccccccccccccaaaggcucuuuucagagccaccagaauu

SEQ ID NO: 17432 - RNA, 1877 nt, Artificial Sequence
  mRNA product Design e-1 comprising derived and/or modified sequence from HRSV(Memphis-37)__AIY60640.1__F-del_DSCav1_mut5 (opt2)
gggagaauauaagcguuggcggagcgucgguuguagcacucugcgcgcccgcucuucugcugcuguuugucuacuuccuccugcuuccccgccgccgccgccgccaucaagcuuaccauggagcuccccauccucaagaccaacgccaucaccaccauccucgccgccgucacccucugcuucgccuccucccagaacaucaccgaggaguucuaccaguccaccugcuccgccgucuccaagggcuaccucuccgcccuccgcaccggcugguacaccuccgucaucaccaucgagcucuccaacaucaaggagaacaagugcaacggcaccgacgccaaggucaagcucaucaagcaggagcucgacaaguacaagaacgccgucaccgagcuccagcuccucaugcaguccacccccgccgccggcuccggcuccgccaucgccuccggcaucgccgucugcaagguccuccaccucgagggcgaggucaacaagaucaagaacgcccuccucuccaccaacaaggccgucgucucccucuccggcugcggcgucuccguccucaccuucaagguccucgaccucaagaacuacaucgacaagcagcuccuccccauccucaacaagcaguccugcuccaucuccaacaucgagaccgucaucgaguuccagcagaagaacaaccgccuccucgagaucacccgcgaguucuccgucaacgccggcgucaccacccccgucuccaccuacaugcucaccaacuccgagcuccucucccucaucaacgacaugcccaucaccaacgaccagaagaagcucauguccaacaacguccagaucguccgccagcaguccuacuccaucaugugcaucaucaaggaggagguccucgccuacgucguccagcucccccucuacggcgucaucgacacccccugcuggaagcuccacaccuccccccucugcaccaccaacaccaaggagggcuccaacaucugccucacccgcaccgaccgcggcugguacugcgacaacgccggcuccgucuccuucuucccccaggccgagaccugcaagguccaguccaaccgcgucuucugcgacaccaugaacucccgcacccuccccuccgaggucaaccucugcaacaucgacaucuucaaccccaaguacgacugcaagaucaugaccuccaagaccgacgucuccuccuccgucaucaccucccucggcgccaucgucuccugcuacggcaagaccaagugcaccgccuccaacaagugccgcggcaucaucaagaccuucuccaacggcugcgacuacgucuccaacaagggcgucgacaccgucuccgucggcaacacccucuacuacgucaacaagcaggagggcaagucccucuacgucaagggcgagcccaucaucaacuucuacgacccccucgucuuccccuccgacgaguucgacgccuccaucucccaggucaacgagaagaucaaccagucccucgccuucauccgcaaguccgacgagcuccuccacaacgucaacgucggcaaguccaccaccaacaucaugaucaccaccaucaucaucgucaucaucgucauccuccuccuccucaucgccgucggccucuuccucuacugcaaggcccgcugaggacuaguguccaccugucccuccugggcugcuggauugucucguuuuccugccaaauaaacaggaucagcgcuuuacagaucuaaaaaaaaaaaaaaaaaaaaaaaaaaaaaaaaaaaaaaaaaaaaaaaaaaaaaaaaaaaaaaaaugcaucccccccccccccccccccccccccccccccaaaggcucuuuucagagccaccagaauu

SEQ ID NO: 17433 - RNA, 1877 nt, Artificial Sequence
  mRNA product Design e-1 comprising derived and/or modified sequence from HRSV(Memphis-37)__AIY60640.1__F-del_DSCav1_mut5 (opt3)
gggagaauauaagcguuggcggagcgucgguuguagcacucugcgcgcccgcucuucugcugcuguuugucuacuuccuccugcuuccccgccgccgccgccgccaucaagcuuaccauggagcugcccauccucaagaccaacgccauuacaacuauacuugcugcagugacgcugugcuucgccagcucccagaauaucaccgaagaguuuuaccaaucuacauguucagcggucaguaaaggcuauuugagcgcuuuaagaacugggugguacaccuccguuauuacaaucgaacugucuaacauuaaggagaauaaaugcaacggaaccgacgccaaggugaaacuaaucaagcaggaacucgauaaguauaaaaaugcaguaacugagcugcagcuucugaugcagucgaccccugccgcugguucaggcagcgcaauagccagugggaucgcuguguguaaggucuugcaccucgagggagaagugaacaaaauuaagaaugcccugcuguccacaaacaaagcgguugugucucucagcggcugcggugucuccguguuaacguucaagguacuggaccuuaagaauuacaucgauaaacaauugcugccaauucuaaacaagcagucauguaguaucagcaauauagagacuguuauugaauuucagcagaaaaacaauaggcuccuggagaucacccgggaguucucugugaacgcaggggucacaacuccgguguccaccuauaugcuuacaaauucagaacuguugagccucauuaacgacaugcccaucaccaacgaucaaaagaaacugaugaguaauaacgugcagaucguccgccagcagucuuacuccauuaugugcauaaucaaggaggaaguuuuagccuaugugguacaacugccucucuacggagugauugacacgccauguuggaaacuucauacuagcccccugugcacaaccaauacuaaggagggcucgaacaucuguuugacacgaaccgaucguggcugguacugcgacaaugcugggucugucuccuuuuucccucaggccgaaacguguaaggugcagucaaacagaguguuuugcgauaccaugaauaguagaacacugccaagcgaggugaaccucugcaauauagacauuuucaaccccaaauaugauuguaagaucaugacuuccaaaaccgacgucucuagcucagugaucacaagucugggagcaauuguauccugcuacgguaagacuaaauguaccgcuagcaauaagugcaggggcaucauuaagacauuuucuaacgggugugauuauguuucaaauaaaggaguggacaccgucagugugggcaacacucuuuacuaugucaauaagcaagaggguaaaagccuguacgugaagggggaaccuauaaucaacuucuaugacccauugguuuuuccguccgaugaguucgacgccucuauuucgcagguuaacgagaaaaucaaucagagccucgcguuuauccggaaguccgaugaacuguuacacaacguaaaugucggaaagucaacgacaaacauuaugauaaccacuaucauuaucgugauuaucguuauacugcuacuccugaucgccgugggccuuuucuuguacugcaaagcacgcugaggacuaguguccaccugucccuccugggcugcuggauugucucguuuuccugccaaauaaacaggaucagcgcuuuacagaucuaaaaaaaaaaaaaaaaaaaaaaaaaaaaaaaaaaaaaaaaaaaaaaaaaaaaaaaaaaaaaaaaugcaucccccccccccccccccccccccccccccccaaaggcucuuuucagagccaccagaauu

SEQ ID NO: 17434 - RNA, 1877 nt, Artificial Sequence
  mRNA product Design e-1 comprising derived and/or modified sequence from HRSV(Memphis-37)__AIY60640.1__F-del_DSCav1_mut5 (opt4)
gggagaauauaagcguuggcggagcgucgguuguagcacucugcgcgcccgcucuucugcugcuguuugucuacuuccuccugcuuccccgccgccgccgccgccaucaagcuuaccauggagcugcccauccugaagaccaacgccaucaccaccauccuggccgccgugacccugugcuucgccagcagccagaacaucaccgaggaguucuaccagagcaccugcagcgccgugagcaagggcuaccugagcgcccugagaaccggcugguacaccagcgugaucaccaucgagcugagcaacaucaaggagaacaagugcaacggcaccgacgccaaggugaagcugaucaagcaggagcuggacaaguacaagaacgccgugaccgagcugcagcugcugaugcagagcacccccgccgccggcagcggcagcgccaucgccagcggcaucgccgugugcaaggugcugcaccuggagggcgaggugaacaagaucaagaacgcccugcugagcaccaacaaggccguggugagccugagcggcugcggcgugagcgugcugaccuucaaggugcuggaccugaagaacuacaucgacaagcagcugcugcccauccugaacaagcagagcugcagcaucagcaacaucgagaccgugaucgaguuccagcagaagaacaacagacugcuggagaucaccagagaguucagcgugaacgccggcgugaccacccccgugagcaccuacaugcugaccaacagcgagcugcugagccugaucaacgacaugcccaucaccaacgaccagaagaagcugaugagcaacaacgugcagaucgugagacagcagagcuacagcaucaugugcaucaucaaggaggaggugcuggccuacguggugcagcugccccuguacggcgugaucgacacccccugcuggaagcugcacaccagcccccugugcaccaccaacaccaaggagggcagcaacaucugccugaccagaaccgacagaggcugguacugcgacaacgccggcagcgugagcuucuucccccaggccgagaccugcaaggugcagagcaacagaguguucugcgacaccaugaacagcagaacccugcccagcgaggugaaccugugcaacaucgacaucuucaaccccaaguacgacugcaagaucaugaccagcaagaccgacgugagcagcagcgugaucaccagccugggcgccaucgugagcugcuacggcaagaccaagugcaccgccagcaacaagugcagaggcaucaucaagaccuucagcaacggcugcgacuacgugagcaacaagggcguggacaccgugagcgugggcaacacccuguacuacgugaacaagcaggagggcaagagccuguacgugaagggcgagcccaucaucaacuucuacgacccccugguguuccccagcgacgaguucgacgccagcaucagccaggugaacgagaagaucaaccagagccuggccuucaucagaaagagcgacgagcugcugcacaacgugaacgugggcaagagcaccaccaacaucaugaucaccaccaucaucaucgugaucaucgugauccugcugcugcugaucgccgugggccuguuccuguacugcaaggccagaugaggacuaguguccaccugucccuccugggcugcuggauugucucguuuuccugccaaauaaacaggaucagcgcuuuacagaucuaaaaaaaaaaaaaaaaaaaaaaaaaaaaaaaaaaaaaaaaaaaaaaaaaaaaaaaaaaaaaaaaugcaucccccccccccccccccccccccccccccccaaaggcucuuuucagagccaccagaauu

SEQ ID NO: 17435 - RNA, 1877 nt, Artificial Sequence
  mRNA product Design e-1 comprising derived and/or modified sequence from HRSV(Memphis-37)__AIY60640.1__F-del_DSCav1_mut5 (opt5)
gggagaauauaagcguuggcggagcgucgguuguagcacucugcgcgcccgcucuucugcugcuguuugucuacuuccuccugcuuccccgccgccgccgccgccaucaagcuuaccauggagcugcccauccucaagaccaacgccauuacaacgauccuggcugccgugacccuuugcuucgcgagcucccagaauauuacagaagaguuuuaccaaucuaccuguagcgcugucuccaaaggcuaucugucugcccucagaacagggugguacaccagcguuaucacaauugaacuguccaacaucaaggagaauaaaugcaacggaaccgacgccaaggugaaacuuaucaagcaggaacuggauaaguauaaaaaugcugugacggagcuccagcugcugaugcagucuaccccugccgcuggcagcggguccgccauugcgagcggaaucgccgucuguaaggugcuccaccuggagggcgaaguuaacaaaauuaagaaugcccuucugucuacaaacaaagcuguggucucccucagcgggugcggagugucuguucugaccuucaaggugcuugaccugaagaauuacaucgauaaacaacuccugccgauucugaacaagcaguccuguagcaucucuaauauugagacagucaucgaauuucagcagaaaaacaaucggcuccuggagaucacccgcgaguucuccgugaacgcuggcgugacgacacccgucagcaccuauaugcuuacaaauuccgaacugcucucucugauuaacgacaugccuaucaccaacgaucaaaagaaacuuaugagcaauaacguucagauugugagacagcaguccuacagcaucaugugcauuaucaaggaggaagugcuggccuaugucgugcaacucccccuguacggcguuaucgacaccccuuguuggaaacugcauacaucuccccucugcacgaccaauacaaaggagggguccaacauuugucugacccggacagaucgcggaugguacugcgacaaugcgggcagcgugagcuuuuucccucaggccgaaaccuguaagguccagucuaacagaguguuuugcgauacgaugaacuccagaacacugccgucugagguuaaucucugcaauaucgacauuuucaaccccaaauaugauuguaagaucaugaccagcaaaaccgacguguccagcucugucauuacaucccugggggcuaucgugagcugcuacggaaagaccaaauguacagccucuaauaagugccggggcaucauuaagacguuuuccaacgggugugauuaugucagcaauaaaggaguggacaccguuuccgugggcaacacacuuuacuaugucaauaagcaagagggcaaaucucuguacgugaagggggaaccuaucauuaacuucuaugacccccucguuuuuccuagcgaugaguucgacgcuuccaucucucaggugaacgagaaaauuaaucagagccuggccuuuauccgcaaguccgaugaacugcuccacaacgucaaugugggaaagagcaccacaaacauuaugaucaccacgaucauuaucgugauuaucguuauucugcuucugcucaucgccgucggccuguuccuguacugcaaagcuagaugaggacuaguguccaccugucccuccugggcugcuggauugucucguuuuccugccaaauaaacaggaucagcgcuuuacagaucuaaaaaaaaaaaaaaaaaaaaaaaaaaaaaaaaaaaaaaaaaaaaaaaaaaaaaaaaaaaaaaaaugcaucccccccccccccccccccccccccccccccaaaggcucuuuucagagccaccagaauu

SEQ ID NO: 17436 - RNA, 1877 nt, Artificial Sequence
  mRNA product Design e-1 comprising derived and/or modified sequence from HRSV(Memphis-37)__AIY60640.1__F-del_DSCav1_mut5 (opt6)
gggagaauauaagcguuggcggagcgucgguuguagcacucugcgcgcccgcucuucugcugcuguuugucuacuuccuccugcuuccccgccgccgccgccgccaucaagcuuaccauggaauuacccaucuuaaaaacaaaugcaauaacaacaauacuagcagccguaacauuaugcuucgccucaagccaaaacauaacagaagaauuuuaccaaagcacauguuccgccguaucaaaaggauaucucucagcacuacguacuggaugguauacauccguaaucacaauugaacuaucaaacauuaaagaaaacaaaugcaauggaacagaugcgaaaguaaaacuaauaaaacaagaauuagauaaauauaaaaaugcaguaaccgaacuacaacuacuaaugcaaucaacucccgcugccgguagcggauccgccauagcaagcggaauugcuguauguaaaguccuacaucuugaaggcgaagucaacaaaaucaaaaaugcauuacucucgaccaacaaagcagucguaucacuaucaggaugcggagucucaguauuaacuuuuaaaguccuugaccuaaaaaacuacauagacaaacaacuacuaccaauucuaaauaaacaaaguugcagcauauccaauaucgaaacaguuauagaauuucaacaaaaaaacaaccgccuacuagaaaucacuagagaauuuucaguaaaugcaggcguaaccacaccagucucuaccuauaugcuuaccaacucugaauuauuaucacuuauaaacgacaugcccauaacaaaugaucaaaaaaaacuaaugagcaacaacguacaaauaguaagacaacaaagcuacagcauuauguguauaauaaaagaagaaguguuagcuuauguaguccaacuaccccucuauggcguuaucgauacaccaugcuggaaauuacacacaagcccucuaugcacaacuaacaccaaagaaggcucuaacauaugcuuaacaagaacagauagaggaugguauugcgauaacgcaggaucaguaucauucuuuccacaagcagaaacauguaaaguacaaucuaaccgaguauucugcgacacaaugaacucuagaacacuacccucagaaguuaaucucuguaauauugacauuuucaauccaaaauacgauugcaaaauaaugaccucuaaaaccgacguaucauccucaguuauaacguccuuaggagcaaucguaagcugcuauggcaaaacaaaauguaccgcaucaaacaaaugcagaggaauaauaaaaacauucucaaacggcugugacuacguaagcaauaaagguguugacacaguuucaguaggaaauacacuauacuauguaaauaaacaagaaggaaaaucucucuauguaaaaggagaacccauaauaaacuucuacgacccacucguauuuccaagcgaugaauuugaugcgagcauuucccagguaaaugaaaaaauaaaucaaucacuagcauucaucagaaaaagugaugaauuacuacacaauguuaacguaggaaaaucaacaacaaauaucaugauaacaacaaucauaauagucauaaucguaauauuacuauuacuaauagcaguagguuuauuucuauacuguaaagcaagguaaggacuaguguccaccugucccuccugggcugcuggauugucucguuuuccugccaaauaaacaggaucagcgcuuuacagaucuaaaaaaaaaaaaaaaaaaaaaaaaaaaaaaaaaaaaaaaaaaaaaaaaaaaaaaaaaaaaaaaaugcaucccccccccccccccccccccccccccccccaaaggcucuuuucagagccaccagaauu

SEQ ID NO: 17437 - RNA, 1877 nt, Artificial Sequence
  mRNA product Design e-1 comprising derived and/or modified sequence from HRSV(Memphis-37)__AIY60640.1__F-del_DSCav1_mut5 (opt11)
gggagaauauaagcguuggcggagcgucgguuguagcacucugcgcgcccgcucuucugcugcuguuugucuacuuccuccugcuuccccgccgccgccgccgccaucaagcuuaccauggaacuucccauccuaaaaaccaacgccauaacaacaauccucgcagcagucacccucugcuucgccucuucacaaaacaucaccgaagaauuuuaccaaucaaccugcuccgccguguccaaaggcuaccucucagcacugcgcacaggaugguauaccagcguaaucaccaucgaacucuccaacaucaaggaaaacaaaugcaacggcaccgaugccaaagucaaacucaucaagcaagaacuugacaaauacaaaaacgccgugaccgagcuacaacuccucaugcaguccacuccagccgccggcuccggcagcgccaucgccuccggcaucgccguaugcaaaguccuccaccucgaaggcgaaguaaacaaaaucaagaacgcacuccuaagcaccaacaaagccgucgucucacucuccgguugcggcgucagcguccuaacauucaaaguucucgaccucaaaaacuacauagacaaacaacuccuccccauccucaacaaacaauccugcuccauaucaaacaucgaaaccguuaucgaauuucaacaaaaaaacaaccgccuccuagaaaucacccgcgaauuuuccgucaacgcaggcgucaccacccccguuuccaccuauaugcucaccaacuccgaacuccucucccucaucaacgacaugcccauuaccaacgaccaaaagaaacuuaugagcaacaacguucaaaucguccgacaacaaucauacuccaucaugugcauuaucaaagaagaaguacucgccuacguaguacaauuaccccucuacggcguaaucgacaccccaugcuggaaacuacacaccuccccccucuguaccaccaacaccaaagaaggcucuaacaucugccucacccgcacagaccguggcugguauugcgauaacgcagggucugucuccuucuucccccaagccgaaacaugcaaaguccaauccaacagagucuucugcgacaccaugaacucgagaacccuccccuccgaagucaaccuaugcaacaucgacaucuucaacccaaaauacgacugcaaaaucaugacuucaaaaacagacgugagcucguccgucaucacaagccuaggagcuaucguauccugcuacggaaaaacaaaaugcacugcuuccaacaaaugccgcggaaucauaaaaaccuucuccaacggcugcgacuacgucagcaacaaaggcgucgacacagucuccguaggcaacacccuauacuacgucaauaaacaagaaggcaagucccuauaugucaaaggcgagcccaucaucaauuucuaugauccccucguuuucccauccgacgaauuugacgcauccaucucccaagucaacgaaaaaauaaaccaaagccucgcauucauccgcaaauccgacgaacuccuccacaacguaaacguaggaaaauccacaacuaacaucaugaucaccaccaucaucaucgucauuaucgucauccuacuccuccucauagcagucggccucuuccucuacugcaaagcacgcuagggacuaguguccaccugucccuccugggcugcuggauugucucguuuuccugccaaauaaacaggaucagcgcuuuacagaucuaaaaaaaaaaaaaaaaaaaaaaaaaaaaaaaaaaaaaaaaaaaaaaaaaaaaaaaaaaaaaaaaugcaucccccccccccccccccccccccccccccccaaaggcucuuuucagagccaccagaauu

SEQ ID NO: 17438 - RNA, 1859 nt, Artificial Sequence
  mRNA product Design e-2 comprising derived and/or modified sequence from HRSV(Memphis-37)__AIY60640.1__F-del_DSCav1_mut5 (opt1)
gggagacccgugacccggaaguuguacggcuacgcgacuuucccucccacaaacccucgcgcccuuccuuuccuacuugggcccggcagaaagcuuaccauggagcugcccauccucaagaccaacgccaucaccacgauccuggccgcggugacccugugcuucgccagcucccagaacaucaccgaggaguucuaccagagcacgugcuccgccgucagcaagggcuaccucuccgcccugcgcaccgggugguacaccagcgugaucaccaucgagcuguccaacaucaaggagaacaagugcaacggcaccgacgccaaggugaagcucaucaagcaggagcuggacaaguacaagaacgcggucacggagcugcagcuccugaugcagagcaccccggccgccggcuccgggagcgcgaucgccuccggcaucgccgucugcaaggugcugcaccucgagggcgaggugaacaagaucaagaacgcccugcuguccaccaacaaggccgucgugagccucuccggcugcggggugagcguccugaccuucaaggugcuggaccucaagaacuacaucgacaagcagcugcugcccauccugaacaagcagagcugcuccaucagcaacaucgagaccgucaucgaguuccagcagaagaacaaccgccuccuggagaucacgcgggaguucagcgugaacgcgggcgugaccacccccgucuccaccuacaugcugacgaacagcgagcuccugucccugaucaacgacaugccgaucaccaacgaccagaagaagcucaugagcaacaacgugcagaucgugcgccagcaguccuacagcaucaugugcaucaucaaggaggagguccuggccuacguggugcagcugccccucuacggggucaucgacacccccugcuggaagcugcacaccagcccccugugcacgaccaacaccaaggagggcuccaacaucugccucacccggacggaccgcgggugguacugcgacaacgccggcagcguguccuucuucccgcaggccgagaccugcaagguccagagcaaccggguguucugcgacaccaugaacucccggacccugcccagcgaggugaaccucugcaacaucgacaucuucaaccccaaguacgacugcaagaucaugacguccaagaccgacgucagcuccagcgugaucaccucccugggcgccaucgugagcugcuacgggaagaccaagugcacggcgagcaacaagugccgcggcaucaucaagaccuucuccaacgggugcgacuacgucagcaacaagggcguggacaccguguccgucggcaacacccuguacuacgugaacaagcaggagggcaagagccucuacgugaagggggagcccaucaucaacuucuacgacccgcuggucuuccccuccgacgaguucgacgccagcaucucccaggugaacgagaagaucaaccagagccuggccuucauccggaaguccgacgagcuccugcacaacgugaacgucggcaagagcaccacgaacaucaugaucaccaccaucaucaucgugaucaucgugauccugcugcuccugaucgccgucgggcuguuccucuacugcaaggcccgcugaggacuaguguccaccugucccuccugggcugcuggauugucucguuuuccugccaaauaaacaggaucagcgcuuuacagaucuaaaaaaaaaaaaaaaaaaaaaaaaaaaaaaaaaaaaaaaaaaaaaaaaaaaaaaaaaaaaaaaaugcaucccccccccccccccccccccccccccccccaaaggcucuuuucagagccaccagaauu

SEQ ID NO: 17439 - RNA, 1859 nt, Artificial Sequence
  mRNA product Design e-2 comprising derived and/or modified sequence from HRSV(Memphis-37)__AIY60640.1__F-del_DSCav1_mut5 (opt1)
gggagacccgugacccggaaguuguacggcuacgcgacuuucccucccacaaacccucgcgcccuuccuuuccuacuugggcccggcagaaagcuuaccauggagcugcccauccucaagaccaacgccaucaccacgauccuggccgcggugacccugugcuucgccagcucccagaacaucaccgaggaguucuaccagagcacgugcuccgccgucagcaagggcuaccucuccgcccugcgcaccgggugguacaccagcgugaucaccaucgagcuguccaacaucaaggagaacaagugcaacggcaccgacgccaaggugaagcucaucaagcaggagcuggacaaguacaagaacgcggucacggagcugcagcuccugaugcagagcaccccggccgccggguccggcagcgccaucgcguccgggaucgccgugugcaaggugcugcaccucgagggcgaggucaacaagaucaagaacgcccugcugagcaccaacaaggccguggugucccucagcggcugcggggucuccgugcugaccuucaaggugcuggaccucaagaacuacaucgacaagcagcugcugcccauccucaacaagcagagcugcuccaucagcaacaucgagacggucaucgaguuccagcagaagaacaaccggcugcuggagaucacccgcgaguucuccgugaacgccggcgugaccacccccgucagcacguacaugcucaccaacagcgagcugcugucccucaucaacgacaugcccaucaccaacgaccagaagaagcugaugagcaacaacgugcagaucgugcggcagcaguccuacagcaucaugugcaucaucaaggaggagguccuggcguacguggugcagcucccgcuguacggggucaucgacacccccugcuggaagcugcacacgagcccccucugcaccaccaacaccaaggagggcuccaacaucugccugacgcgcaccgaccgggggugguacugcgacaacgccggcuccgugagcuucuucccccaggccgagaccugcaaggugcaguccaaccgcgucuucugcgacaccaugaacagccggacgcucccguccgaggugaaccugugcaacaucgacaucuucaaccccaaguacgacugcaagaucaugaccagcaagaccgacgucuccagcuccgugaucaccagccugggcgccaucguguccugcuacgggaagacgaagugcaccgccagcaacaagugccggggcaucaucaagaccuucuccaacgggugcgacuacgucagcaacaagggcguggacaccgugagcgucggcaacacgcucuacuacgugaacaagcaggaggggaagucccuguacgugaagggcgagcccaucaucaacuucuacgacccccuggucuucccgagcgacgaguucgacgcguccaucagccaggugaacgagaagaucaaccagucccucgccuucauccgcaagagcgacgagcugcugcacaacgugaacgucgggaaguccaccaccaacaucaugaucaccaccaucaucaucgugaucaucgugauccuccugcugcucaucgccgucggccuguuccuguacugcaaggcccggugaggacuaguguccaccugucccuccugggcugcuggauugucucguuuuccugccaaauaaacaggaucagcgcuuuacagaucuaaaaaaaaaaaaaaaaaaaaaaaaaaaaaaaaaaaaaaaaaaaaaaaaaaaaaaaaaaaaaaaaugcaucccccccccccccccccccccccccccccccaaaggcucuuuucagagccaccagaauu

SEQ ID NO: 17440 - RNA, 1859 nt, Artificial Sequence
  mRNA product Design e-2 comprising derived and/or modified sequence from HRSV(Memphis-37)__AIY60640.1__F-del_DSCav1_mut5 (opt2)
gggagacccgugacccggaaguuguacggcuacgcgacuuucccucccacaaacccucgcgcccuuccuuuccuacuugggcccggcagaaagcuuaccauggagcuccccauccucaagaccaacgccaucaccaccauccucgccgccgucacccucugcuucgccuccucccagaacaucaccgaggaguucuaccaguccaccugcuccgccgucuccaagggcuaccucuccgcccuccgcaccggcugguacaccuccgucaucaccaucgagcucuccaacaucaaggagaacaagugcaacggcaccgacgccaaggucaagcucaucaagcaggagcucgacaaguacaagaacgccgucaccgagcuccagcuccucaugcaguccacccccgccgccggcuccggcuccgccaucgccuccggcaucgccgucugcaagguccuccaccucgagggcgaggucaacaagaucaagaacgcccuccucuccaccaacaaggccgucgucucccucuccggcugcggcgucuccguccucaccuucaagguccucgaccucaagaacuacaucgacaagcagcuccuccccauccucaacaagcaguccugcuccaucuccaacaucgagaccgucaucgaguuccagcagaagaacaaccgccuccucgagaucacccgcgaguucuccgucaacgccggcgucaccacccccgucuccaccuacaugcucaccaacuccgagcuccucucccucaucaacgacaugcccaucaccaacgaccagaagaagcucauguccaacaacguccagaucguccgccagcaguccuacuccaucaugugcaucaucaaggaggagguccucgccuacgucguccagcucccccucuacggcgucaucgacacccccugcuggaagcuccacaccuccccccucugcaccaccaacaccaaggagggcuccaacaucugccucacccgcaccgaccgcggcugguacugcgacaacgccggcuccgucuccuucuucccccaggccgagaccugcaagguccaguccaaccgcgucuucugcgacaccaugaacucccgcacccuccccuccgaggucaaccucugcaacaucgacaucuucaaccccaaguacgacugcaagaucaugaccuccaagaccgacgucuccuccuccgucaucaccucccucggcgccaucgucuccugcuacggcaagaccaagugcaccgccuccaacaagugccgcggcaucaucaagaccuucuccaacggcugcgacuacgucuccaacaagggcgucgacaccgucuccgucggcaacacccucuacuacgucaacaagcaggagggcaagucccucuacgucaagggcgagcccaucaucaacuucuacgacccccucgucuuccccuccgacgaguucgacgccuccaucucccaggucaacgagaagaucaaccagucccucgccuucauccgcaaguccgacgagcuccuccacaacgucaacgucggcaaguccaccaccaacaucaugaucaccaccaucaucaucgucaucaucgucauccuccuccuccucaucgccgucggccucuuccucuacugcaaggcccgcugaggacuaguguccaccugucccuccugggcugcuggauugucucguuuuccugccaaauaaacaggaucagcgcuuuacagaucuaaaaaaaaaaaaaaaaaaaaaaaaaaaaaaaaaaaaaaaaaaaaaaaaaaaaaaaaaaaaaaaaugcaucccccccccccccccccccccccccccccccaaaggcucuuuucagagccaccagaauu

SEQ ID NO: 17441 - RNA, 1859 nt, Artificial Sequence
  mRNA product Design e-2 comprising derived and/or modified sequence from HRSV(Memphis-37)__AIY60640.1__F-del_DSCav1_mut5 (opt3)
gggagacccgugacccggaaguuguacggcuacgcgacuuucccucccacaaacccucgcgcccuuccuuuccuacuugggcccggcagaaagcuuaccauggagcugcccauccucaagaccaacgccauuacaacuauacuugcugcagugacgcugugcuucgccagcucccagaauaucaccgaagaguuuuaccaaucuacauguucagcggucaguaaaggcuauuugagcgcuuuaagaacugggugguacaccuccguuauuacaaucgaacugucuaacauuaaggagaauaaaugcaacggaaccgacgccaaggugaaacuaaucaagcaggaacucgauaaguauaaaaaugcaguaacugagcugcagcuucugaugcagucgaccccugccgcugguucaggcagcgcaauagccagugggaucgcuguguguaaggucuugcaccucgagggagaagugaacaaaauuaagaaugcccugcuguccacaaacaaagcgguugugucucucagcggcugcggugucuccguguuaacguucaagguacuggaccuuaagaauuacaucgauaaacaauugcugccaauucuaaacaagcagucauguaguaucagcaauauagagacuguuauugaauuucagcagaaaaacaauaggcuccuggagaucacccgggaguucucugugaacgcaggggucacaacuccgguguccaccuauaugcuuacaaauucagaacuguugagccucauuaacgacaugcccaucaccaacgaucaaaagaaacugaugaguaauaacgugcagaucguccgccagcagucuuacuccauuaugugcauaaucaaggaggaaguuuuagccuaugugguacaacugccucucuacggagugauugacacgccauguuggaaacuucauacuagcccccugugcacaaccaauacuaaggagggcucgaacaucuguuugacacgaaccgaucguggcugguacugcgacaaugcugggucugucuccuuuuucccucaggccgaaacguguaaggugcagucaaacagaguguuuugcgauaccaugaauaguagaacacugccaagcgaggugaaccucugcaauauagacauuuucaaccccaaauaugauuguaagaucaugacuuccaaaaccgacgucucuagcucagugaucacaagucugggagcaauuguauccugcuacgguaagacuaaauguaccgcuagcaauaagugcaggggcaucauuaagacauuuucuaacgggugugauuauguuucaaauaaaggaguggacaccgucagugugggcaacacucuuuacuaugucaauaagcaagaggguaaaagccuguacgugaagggggaaccuauaaucaacuucuaugacccauugguuuuuccguccgaugaguucgacgccucuauuucgcagguuaacgagaaaaucaaucagagccucgcguuuauccggaaguccgaugaacuguuacacaacguaaaugucggaaagucaacgacaaacauuaugauaaccacuaucauuaucgugauuaucguuauacugcuacuccugaucgccgugggccuuuucuuguacugcaaagcacgcugaggacuaguguccaccugucccuccugggcugcuggauugucucguuuuccugccaaauaaacaggaucagcgcuuuacagaucuaaaaaaaaaaaaaaaaaaaaaaaaaaaaaaaaaaaaaaaaaaaaaaaaaaaaaaaaaaaaaaaaugcaucccccccccccccccccccccccccccccccaaaggcucuuuucagagccaccagaauu

SEQ ID NO: 17442 - RNA, 1859 nt, Artificial Sequence
  mRNA product Design e-2 comprising derived and/or modified sequence from HRSV(Memphis-37)__AIY60640.1__F-del_DSCav1_mut5 (opt4)
gggagacccgugacccggaaguuguacggcuacgcgacuuucccucccacaaacccucgcgcccuuccuuuccuacuugggcccggcagaaagcuuaccauggagcugcccauccugaagaccaacgccaucaccaccauccuggccgccgugacccugugcuucgccagcagccagaacaucaccgaggaguucuaccagagcaccugcagcgccgugagcaagggcuaccugagcgcccugagaaccggcugguacaccagcgugaucaccaucgagcugagcaacaucaaggagaacaagugcaacggcaccgacgccaaggugaagcugaucaagcaggagcuggacaaguacaagaacgccgugaccgagcugcagcugcugaugcagagcacccccgccgccggcagcggcagcgccaucgccagcggcaucgccgugugcaaggugcugcaccuggagggcgaggugaacaagaucaagaacgcccugcugagcaccaacaaggccguggugagccugagcggcugcggcgugagcgugcugaccuucaaggugcuggaccugaagaacuacaucgacaagcagcugcugcccauccugaacaagcagagcugcagcaucagcaacaucgagaccgugaucgaguuccagcagaagaacaacagacugcuggagaucaccagagaguucagcgugaacgccggcgugaccacccccgugagcaccuacaugcugaccaacagcgagcugcugagccugaucaacgacaugcccaucaccaacgaccagaagaagcugaugagcaacaacgugcagaucgugagacagcagagcuacagcaucaugugcaucaucaaggaggaggugcuggccuacguggugcagcugccccuguacggcgugaucgacacccccugcuggaagcugcacaccagcccccugugcaccaccaacaccaaggagggcagcaacaucugccugaccagaaccgacagaggcugguacugcgacaacgccggcagcgugagcuucuucccccaggccgagaccugcaaggugcagagcaacagaguguucugcgacaccaugaacagcagaacccugcccagcgaggugaaccugugcaacaucgacaucuucaaccccaaguacgacugcaagaucaugaccagcaagaccgacgugagcagcagcgugaucaccagccugggcgccaucgugagcugcuacggcaagaccaagugcaccgccagcaacaagugcagaggcaucaucaagaccuucagcaacggcugcgacuacgugagcaacaagggcguggacaccgugagcgugggcaacacccuguacuacgugaacaagcaggagggcaagagccuguacgugaagggcgagcccaucaucaacuucuacgacccccugguguuccccagcgacgaguucgacgccagcaucagccaggugaacgagaagaucaaccagagccuggccuucaucagaaagagcgacgagcugcugcacaacgugaacgugggcaagagcaccaccaacaucaugaucaccaccaucaucaucgugaucaucgugauccugcugcugcugaucgccgugggccuguuccuguacugcaaggccagaugaggacuaguguccaccugucccuccugggcugcuggauugucucguuuuccugccaaauaaacaggaucagcgcuuuacagaucuaaaaaaaaaaaaaaaaaaaaaaaaaaaaaaaaaaaaaaaaaaaaaaaaaaaaaaaaaaaaaaaaugcaucccccccccccccccccccccccccccccccaaaggcucuuuucagagccaccagaauu

SEQ ID NO: 17443 - RNA, 1859 nt, Artificial Sequence
  mRNA product Design e-2 comprising derived and/or modified sequence from HRSV(Memphis-37)__AIY60640.1__F-del_DSCav1_mut5 (opt5)
gggagacccgugacccggaaguuguacggcuacgcgacuuucccucccacaaacccucgcgcccuuccuuuccuacuugggcccggcagaaagcuuaccauggagcugcccauccucaagaccaacgccauuacaacgauccuggcugccgugacccuuugcuucgcgagcucccagaauauuacagaagaguuuuaccaaucuaccuguagcgcugucuccaaaggcuaucugucugcccucagaacagggugguacaccagcguuaucacaauugaacuguccaacaucaaggagaauaaaugcaacggaaccgacgccaaggugaaacuuaucaagcaggaacuggauaaguauaaaaaugcugugacggagcuccagcugcugaugcagucuaccccugccgcuggcagcggguccgccauugcgagcggaaucgccgucuguaaggugcuccaccuggagggcgaaguuaacaaaauuaagaaugcccuucugucuacaaacaaagcuguggucucccucagcgggugcggagugucuguucugaccuucaaggugcuugaccugaagaauuacaucgauaaacaacuccugccgauucugaacaagcaguccuguagcaucucuaauauugagacagucaucgaauuucagcagaaaaacaaucggcuccuggagaucacccgcgaguucuccgugaacgcuggcgugacgacacccgucagcaccuauaugcuuacaaauuccgaacugcucucucugauuaacgacaugccuaucaccaacgaucaaaagaaacuuaugagcaauaacguucagauugugagacagcaguccuacagcaucaugugcauuaucaaggaggaagugcuggccuaugucgugcaacucccccuguacggcguuaucgacaccccuuguuggaaacugcauacaucuccccucugcacgaccaauacaaaggagggguccaacauuugucugacccggacagaucgcggaugguacugcgacaaugcgggcagcgugagcuuuuucccucaggccgaaaccuguaagguccagucuaacagaguguuuugcgauacgaugaacuccagaacacugccgucugagguuaaucucugcaauaucgacauuuucaaccccaaauaugauuguaagaucaugaccagcaaaaccgacguguccagcucugucauuacaucccugggggcuaucgugagcugcuacggaaagaccaaauguacagccucuaauaagugccggggcaucauuaagacguuuuccaacgggugugauuaugucagcaauaaaggaguggacaccguuuccgugggcaacacacuuuacuaugucaauaagcaagagggcaaaucucuguacgugaagggggaaccuaucauuaacuucuaugacccccucguuuuuccuagcgaugaguucgacgcuuccaucucucaggugaacgagaaaauuaaucagagccuggccuuuauccgcaaguccgaugaacugcuccacaacgucaaugugggaaagagcaccacaaacauuaugaucaccacgaucauuaucgugauuaucguuauucugcuucugcucaucgccgucggccuguuccuguacugcaaagcuagaugaggacuaguguccaccugucccuccugggcugcuggauugucucguuuuccugccaaauaaacaggaucagcgcuuuacagaucuaaaaaaaaaaaaaaaaaaaaaaaaaaaaaaaaaaaaaaaaaaaaaaaaaaaaaaaaaaaaaaaaugcaucccccccccccccccccccccccccccccccaaaggcucuuuucagagccaccagaauu

SEQ ID NO: 17444 - RNA, 1859 nt, Artificial Sequence
  mRNA product Design e-2 comprising derived and/or modified sequence from HRSV(Memphis-37)__AIY60640.1__F-del_DSCav1_mut5 (opt6)
gggagacccgugacccggaaguuguacggcuacgcgacuuucccucccacaaacccucgcgcccuuccuuuccuacuugggcccggcagaaagcuuaccauggaauuacccaucuuaaaaacaaaugcaauaacaacaauacuagcagccguaacauuaugcuucgccucaagccaaaacauaacagaagaauuuuaccaaagcacauguuccgccguaucaaaaggauaucucucagcacuacguacuggaugguauacauccguaaucacaauugaacuaucaaacauuaaagaaaacaaaugcaauggaacagaugcgaaaguaaaacuaauaaaacaagaauuagauaaauauaaaaaugcaguaaccgaacuacaacuacuaaugcaaucaacucccgcugccgguagcggauccgccauagcaagcggaauugcuguauguaaaguccuacaucuugaaggcgaagucaacaaaaucaaaaaugcauuacucucgaccaacaaagcagucguaucacuaucaggaugcggagucucaguauuaacuuuuaaaguccuugaccuaaaaaacuacauagacaaacaacuacuaccaauucuaaauaaacaaaguugcagcauauccaauaucgaaacaguuauagaauuucaacaaaaaaacaaccgccuacuagaaaucacuagagaauuuucaguaaaugcaggcguaaccacaccagucucuaccuauaugcuuaccaacucugaauuauuaucacuuauaaacgacaugcccauaacaaaugaucaaaaaaaacuaaugagcaacaacguacaaauaguaagacaacaaagcuacagcauuauguguauaauaaaagaagaaguguuagcuuauguaguccaacuaccccucuauggcguuaucgauacaccaugcuggaaauuacacacaagcccucuaugcacaacuaacaccaaagaaggcucuaacauaugcuuaacaagaacagauagaggaugguauugcgauaacgcaggaucaguaucauucuuuccacaagcagaaacauguaaaguacaaucuaaccgaguauucugcgacacaaugaacucuagaacacuacccucagaaguuaaucucuguaauauugacauuuucaauccaaaauacgauugcaaaauaaugaccucuaaaaccgacguaucauccucaguuauaacguccuuaggagcaaucguaagcugcuauggcaaaacaaaauguaccgcaucaaacaaaugcagaggaauaauaaaaacauucucaaacggcugugacuacguaagcaauaaagguguugacacaguuucaguaggaaauacacuauacuauguaaauaaacaagaaggaaaaucucucuauguaaaaggagaacccauaauaaacuucuacgacccacucguauuuccaagcgaugaauuugaugcgagcauuucccagguaaaugaaaaaauaaaucaaucacuagcauucaucagaaaaagugaugaauuacuacacaauguuaacguaggaaaaucaacaacaaauaucaugauaacaacaaucauaauagucauaaucguaauauuacuauuacuaauagcaguagguuuauuucuauacuguaaagcaagguaaggacuaguguccaccugucccuccugggcugcuggauugucucguuuuccugccaaauaaacaggaucagcgcuuuacagaucuaaaaaaaaaaaaaaaaaaaaaaaaaaaaaaaaaaaaaaaaaaaaaaaaaaaaaaaaaaaaaaaaugcaucccccccccccccccccccccccccccccccaaaggcucuuuucagagccaccagaauu

SEQ ID NO: 17445 - RNA, 1859 nt, Artificial Sequence
  mRNA product Design e-2 comprising derived and/or modified sequence from HRSV(Memphis-37)__AIY60640.1__F-del_DSCav1_mut5 (opt11)
gggagacccgugacccggaaguuguacggcuacgcgacuuucccucccacaaacccucgcgcccuuccuuuccuacuugggcccggcagaaagcuuaccauggaacuucccauccuaaaaaccaacgccauaacaacaauccucgcagcagucacccucugcuucgccucuucacaaaacaucaccgaagaauuuuaccaaucaaccugcuccgccguguccaaaggcuaccucucagcacugcgcacaggaugguauaccagcguaaucaccaucgaacucuccaacaucaaggaaaacaaaugcaacggcaccgaugccaaagucaaacucaucaagcaagaacuugacaaauacaaaaacgccgugaccgagcuacaacuccucaugcaguccacuccagccgccggcuccggcagcgccaucgccuccggcaucgccguaugcaaaguccuccaccucgaaggcgaaguaaacaaaaucaagaacgcacuccuaagcaccaacaaagccgucgucucacucuccgguugcggcgucagcguccuaacauucaaaguucucgaccucaaaaacuacauagacaaacaacuccuccccauccucaacaaacaauccugcuccauaucaaacaucgaaaccguuaucgaauuucaacaaaaaaacaaccgccuccuagaaaucacccgcgaauuuuccgucaacgcaggcgucaccacccccguuuccaccuauaugcucaccaacuccgaacuccucucccucaucaacgacaugcccauuaccaacgaccaaaagaaacuuaugagcaacaacguucaaaucguccgacaacaaucauacuccaucaugugcauuaucaaagaagaaguacucgccuacguaguacaauuaccccucuacggcguaaucgacaccccaugcuggaaacuacacaccuccccccucuguaccaccaacaccaaagaaggcucuaacaucugccucacccgcacagaccguggcugguauugcgauaacgcagggucugucuccuucuucccccaagccgaaacaugcaaaguccaauccaacagagucuucugcgacaccaugaacucgagaacccuccccuccgaagucaaccuaugcaacaucgacaucuucaacccaaaauacgacugcaaaaucaugacuucaaaaacagacgugagcucguccgucaucacaagccuaggagcuaucguauccugcuacggaaaaacaaaaugcacugcuuccaacaaaugccgcggaaucauaaaaaccuucuccaacggcugcgacuacgucagcaacaaaggcgucgacacagucuccguaggcaacacccuauacuacgucaauaaacaagaaggcaagucccuauaugucaaaggcgagcccaucaucaauuucuaugauccccucguuuucccauccgacgaauuugacgcauccaucucccaagucaacgaaaaaauaaaccaaagccucgcauucauccgcaaauccgacgaacuccuccacaacguaaacguaggaaaauccacaacuaacaucaugaucaccaccaucaucaucgucauuaucgucauccuacuccuccucauagcagucggccucuuccucuacugcaaagcacgcuagggacuaguguccaccugucccuccugggcugcuggauugucucguuuuccugccaaauaaacaggaucagcgcuuuacagaucuaaaaaaaaaaaaaaaaaaaaaaaaaaaaaaaaaaaaaaaaaaaaaaaaaaaaaaaaaaaaaaaaugcaucccccccccccccccccccccccccccccccaaaggcucuuuucagagccaccagaauu

SEQ ID NO: 17446 - RNA, 1829 nt, Artificial Sequence
  mRNA product Design e-3 comprising derived and/or modified sequence from HRSV(Memphis-37)__AIY60640.1__F-del_DSCav1_mut5 (opt1)
gggagacuuucccauucuguagcagaauuugguguugccuguggucuuggucccgcggagaagcuuaccauggagcugcccauccucaagaccaacgccaucaccacgauccuggccgcggugacccugugcuucgccagcucccagaacaucaccgaggaguucuaccagagcacgugcuccgccgucagcaagggcuaccucuccgcccugcgcaccgggugguacaccagcgugaucaccaucgagcuguccaacaucaaggagaacaagugcaacggcaccgacgccaaggugaagcucaucaagcaggagcuggacaaguacaagaacgcggucacggagcugcagcuccugaugcagagcaccccggccgccggcuccgggagcgcgaucgccuccggcaucgccgucugcaaggugcugcaccucgagggcgaggugaacaagaucaagaacgcccugcuguccaccaacaaggccgucgugagccucuccggcugcggggugagcguccugaccuucaaggugcuggaccucaagaacuacaucgacaagcagcugcugcccauccugaacaagcagagcugcuccaucagcaacaucgagaccgucaucgaguuccagcagaagaacaaccgccuccuggagaucacgcgggaguucagcgugaacgcgggcgugaccacccccgucuccaccuacaugcugacgaacagcgagcuccugucccugaucaacgacaugccgaucaccaacgaccagaagaagcucaugagcaacaacgugcagaucgugcgccagcaguccuacagcaucaugugcaucaucaaggaggagguccuggccuacguggugcagcugccccucuacggggucaucgacacccccugcuggaagcugcacaccagcccccugugcacgaccaacaccaaggagggcuccaacaucugccucacccggacggaccgcgggugguacugcgacaacgccggcagcguguccuucuucccgcaggccgagaccugcaagguccagagcaaccggguguucugcgacaccaugaacucccggacccugcccagcgaggugaaccucugcaacaucgacaucuucaaccccaaguacgacugcaagaucaugacguccaagaccgacgucagcuccagcgugaucaccucccugggcgccaucgugagcugcuacgggaagaccaagugcacggcgagcaacaagugccgcggcaucaucaagaccuucuccaacgggugcgacuacgucagcaacaagggcguggacaccguguccgucggcaacacccuguacuacgugaacaagcaggagggcaagagccucuacgugaagggggagcccaucaucaacuucuacgacccgcuggucuuccccuccgacgaguucgacgccagcaucucccaggugaacgagaagaucaaccagagccuggccuucauccggaaguccgacgagcuccugcacaacgugaacgucggcaagagcaccacgaacaucaugaucaccaccaucaucaucgugaucaucgugauccugcugcuccugaucgccgucgggcuguuccucuacugcaaggcccgcugaggacuaguguccaccugucccuccugggcugcuggauugucucguuuuccugccaaauaaacaggaucagcgcuuuacagaucuaaaaaaaaaaaaaaaaaaaaaaaaaaaaaaaaaaaaaaaaaaaaaaaaaaaaaaaaaaaaaaaaugcaucccccccccccccccccccccccccccccccaaaggcucuuuucagagccaccagaauu

SEQ ID NO: 17447 - RNA, 1829 nt, Artificial Sequence
  mRNA product Design e-3 comprising derived and/or modified sequence from HRSV(Memphis-37)__AIY60640.1__F-del_DSCav1_mut5 (opt1)
gggagacuuucccauucuguagcagaauuugguguugccuguggucuuggucccgcggagaagcuuaccauggagcugcccauccucaagaccaacgccaucaccacgauccuggccgcggugacccugugcuucgccagcucccagaacaucaccgaggaguucuaccagagcacgugcuccgccgucagcaagggcuaccucuccgcccugcgcaccgggugguacaccagcgugaucaccaucgagcuguccaacaucaaggagaacaagugcaacggcaccgacgccaaggugaagcucaucaagcaggagcuggacaaguacaagaacgcggucacggagcugcagcuccugaugcagagcaccccggccgccggguccggcagcgccaucgcguccgggaucgccgugugcaaggugcugcaccucgagggcgaggucaacaagaucaagaacgcccugcugagcaccaacaaggccguggugucccucagcggcugcggggucuccgugcugaccuucaaggugcuggaccucaagaacuacaucgacaagcagcugcugcccauccucaacaagcagagcugcuccaucagcaacaucgagacggucaucgaguuccagcagaagaacaaccggcugcuggagaucacccgcgaguucuccgugaacgccggcgugaccacccccgucagcacguacaugcucaccaacagcgagcugcugucccucaucaacgacaugcccaucaccaacgaccagaagaagcugaugagcaacaacgugcagaucgugcggcagcaguccuacagcaucaugugcaucaucaaggaggagguccuggcguacguggugcagcucccgcuguacggggucaucgacacccccugcuggaagcugcacacgagcccccucugcaccaccaacaccaaggagggcuccaacaucugccugacgcgcaccgaccgggggugguacugcgacaacgccggcuccgugagcuucuucccccaggccgagaccugcaaggugcaguccaaccgcgucuucugcgacaccaugaacagccggacgcucccguccgaggugaaccugugcaacaucgacaucuucaaccccaaguacgacugcaagaucaugaccagcaagaccgacgucuccagcuccgugaucaccagccugggcgccaucguguccugcuacgggaagacgaagugcaccgccagcaacaagugccggggcaucaucaagaccuucuccaacgggugcgacuacgucagcaacaagggcguggacaccgugagcgucggcaacacgcucuacuacgugaacaagcaggaggggaagucccuguacgugaagggcgagcccaucaucaacuucuacgacccccuggucuucccgagcgacgaguucgacgcguccaucagccaggugaacgagaagaucaaccagucccucgccuucauccgcaagagcgacgagcugcugcacaacgugaacgucgggaaguccaccaccaacaucaugaucaccaccaucaucaucgugaucaucgugauccuccugcugcucaucgccgucggccuguuccuguacugcaaggcccggugaggacuaguguccaccugucccuccugggcugcuggauugucucguuuuccugccaaauaaacaggaucagcgcuuuacagaucuaaaaaaaaaaaaaaaaaaaaaaaaaaaaaaaaaaaaaaaaaaaaaaaaaaaaaaaaaaaaaaaaugcaucccccccccccccccccccccccccccccccaaaggcucuuuucagagccaccagaauu

SEQ ID NO: 17448 - RNA, 1829 nt, Artificial Sequence
  mRNA product Design e-3 comprising derived and/or modified sequence from HRSV(Memphis-37)__AIY60640.1__F-del_DSCav1_mut5 (opt2)
gggagacuuucccauucuguagcagaauuugguguugccuguggucuuggucccgcggagaagcuuaccauggagcuccccauccucaagaccaacgccaucaccaccauccucgccgccgucacccucugcuucgccuccucccagaacaucaccgaggaguucuaccaguccaccugcuccgccgucuccaagggcuaccucuccgcccuccgcaccggcugguacaccuccgucaucaccaucgagcucuccaacaucaaggagaacaagugcaacggcaccgacgccaaggucaagcucaucaagcaggagcucgacaaguacaagaacgccgucaccgagcuccagcuccucaugcaguccacccccgccgccggcuccggcuccgccaucgccuccggcaucgccgucugcaagguccuccaccucgagggcgaggucaacaagaucaagaacgcccuccucuccaccaacaaggccgucgucucccucuccggcugcggcgucuccguccucaccuucaagguccucgaccucaagaacuacaucgacaagcagcuccuccccauccucaacaagcaguccugcuccaucuccaacaucgagaccgucaucgaguuccagcagaagaacaaccgccuccucgagaucacccgcgaguucuccgucaacgccggcgucaccacccccgucuccaccuacaugcucaccaacuccgagcuccucucccucaucaacgacaugcccaucaccaacgaccagaagaagcucauguccaacaacguccagaucguccgccagcaguccuacuccaucaugugcaucaucaaggaggagguccucgccuacgucguccagcucccccucuacggcgucaucgacacccccugcuggaagcuccacaccuccccccucugcaccaccaacaccaaggagggcuccaacaucugccucacccgcaccgaccgcggcugguacugcgacaacgccggcuccgucuccuucuucccccaggccgagaccugcaagguccaguccaaccgcgucuucugcgacaccaugaacucccgcacccuccccuccgaggucaaccucugcaacaucgacaucuucaaccccaaguacgacugcaagaucaugaccuccaagaccgacgucuccuccuccgucaucaccucccucggcgccaucgucuccugcuacggcaagaccaagugcaccgccuccaacaagugccgcggcaucaucaagaccuucuccaacggcugcgacuacgucuccaacaagggcgucgacaccgucuccgucggcaacacccucuacuacgucaacaagcaggagggcaagucccucuacgucaagggcgagcccaucaucaacuucuacgacccccucgucuuccccuccgacgaguucgacgccuccaucucccaggucaacgagaagaucaaccagucccucgccuucauccgcaaguccgacgagcuccuccacaacgucaacgucggcaaguccaccaccaacaucaugaucaccaccaucaucaucgucaucaucgucauccuccuccuccucaucgccgucggccucuuccucuacugcaaggcccgcugaggacuaguguccaccugucccuccugggcugcuggauugucucguuuuccugccaaauaaacaggaucagcgcuuuacagaucuaaaaaaaaaaaaaaaaaaaaaaaaaaaaaaaaaaaaaaaaaaaaaaaaaaaaaaaaaaaaaaaaugcaucccccccccccccccccccccccccccccccaaaggcucuuuucagagccaccagaauu

SEQ ID NO: 17449 - RNA, 1829 nt, Artificial Sequence
  mRNA product Design e-3 comprising derived and/or modified sequence from HRSV(Memphis-37)__AIY60640.1__F-del_DSCav1_mut5 (opt3)
gggagacuuucccauucuguagcagaauuugguguugccuguggucuuggucccgcggagaagcuuaccauggagcugcccauccucaagaccaacgccauuacaacuauacuugcugcagugacgcugugcuucgccagcucccagaauaucaccgaagaguuuuaccaaucuacauguucagcggucaguaaaggcuauuugagcgcuuuaagaacugggugguacaccuccguuauuacaaucgaacugucuaacauuaaggagaauaaaugcaacggaaccgacgccaaggugaaacuaaucaagcaggaacucgauaaguauaaaaaugcaguaacugagcugcagcuucugaugcagucgaccccugccgcugguucaggcagcgcaauagccagugggaucgcuguguguaaggucuugcaccucgagggagaagugaacaaaauuaagaaugcccugcuguccacaaacaaagcgguugugucucucagcggcugcggugucuccguguuaacguucaagguacuggaccuuaagaauuacaucgauaaacaauugcugccaauucuaaacaagcagucauguaguaucagcaauauagagacuguuauugaauuucagcagaaaaacaauaggcuccuggagaucacccgggaguucucugugaacgcaggggucacaacuccgguguccaccuauaugcuuacaaauucagaacuguugagccucauuaacgacaugcccaucaccaacgaucaaaagaaacugaugaguaauaacgugcagaucguccgccagcagucuuacuccauuaugugcauaaucaaggaggaaguuuuagccuaugugguacaacugccucucuacggagugauugacacgccauguuggaaacuucauacuagcccccugugcacaaccaauacuaaggagggcucgaacaucuguuugacacgaaccgaucguggcugguacugcgacaaugcugggucugucuccuuuuucccucaggccgaaacguguaaggugcagucaaacagaguguuuugcgauaccaugaauaguagaacacugccaagcgaggugaaccucugcaauauagacauuuucaaccccaaauaugauuguaagaucaugacuuccaaaaccgacgucucuagcucagugaucacaagucugggagcaauuguauccugcuacgguaagacuaaauguaccgcuagcaauaagugcaggggcaucauuaagacauuuucuaacgggugugauuauguuucaaauaaaggaguggacaccgucagugugggcaacacucuuuacuaugucaauaagcaagaggguaaaagccuguacgugaagggggaaccuauaaucaacuucuaugacccauugguuuuuccguccgaugaguucgacgccucuauuucgcagguuaacgagaaaaucaaucagagccucgcguuuauccggaaguccgaugaacuguuacacaacguaaaugucggaaagucaacgacaaacauuaugauaaccacuaucauuaucgugauuaucguuauacugcuacuccugaucgccgugggccuuuucuuguacugcaaagcacgcugaggacuaguguccaccugucccuccugggcugcuggauugucucguuuuccugccaaauaaacaggaucagcgcuuuacagaucuaaaaaaaaaaaaaaaaaaaaaaaaaaaaaaaaaaaaaaaaaaaaaaaaaaaaaaaaaaaaaaaaugcaucccccccccccccccccccccccccccccccaaaggcucuuuucagagccaccagaauu

SEQ ID NO: 17450 - RNA, 1829 nt, Artificial Sequence
  mRNA product Design e-3 comprising derived and/or modified sequence from HRSV(Memphis-37)__AIY60640.1__F-del_DSCav1_mut5 (opt4)
gggagacuuucccauucuguagcagaauuugguguugccuguggucuuggucccgcggagaagcuuaccauggagcugcccauccugaagaccaacgccaucaccaccauccuggccgccgugacccugugcuucgccagcagccagaacaucaccgaggaguucuaccagagcaccugcagcgccgugagcaagggcuaccugagcgcccugagaaccggcugguacaccagcgugaucaccaucgagcugagcaacaucaaggagaacaagugcaacggcaccgacgccaaggugaagcugaucaagcaggagcuggacaaguacaagaacgccgugaccgagcugcagcugcugaugcagagcacccccgccgccggcagcggcagcgccaucgccagcggcaucgccgugugcaaggugcugcaccuggagggcgaggugaacaagaucaagaacgcccugcugagcaccaacaaggccguggugagccugagcggcugcggcgugagcgugcugaccuucaaggugcuggaccugaagaacuacaucgacaagcagcugcugcccauccugaacaagcagagcugcagcaucagcaacaucgagaccgugaucgaguuccagcagaagaacaacagacugcuggagaucaccagagaguucagcgugaacgccggcgugaccacccccgugagcaccuacaugcugaccaacagcgagcugcugagccugaucaacgacaugcccaucaccaacgaccagaagaagcugaugagcaacaacgugcagaucgugagacagcagagcuacagcaucaugugcaucaucaaggaggaggugcuggccuacguggugcagcugccccuguacggcgugaucgacacccccugcuggaagcugcacaccagcccccugugcaccaccaacaccaaggagggcagcaacaucugccugaccagaaccgacagaggcugguacugcgacaacgccggcagcgugagcuucuucccccaggccgagaccugcaaggugcagagcaacagaguguucugcgacaccaugaacagcagaacccugcccagcgaggugaaccugugcaacaucgacaucuucaaccccaaguacgacugcaagaucaugaccagcaagaccgacgugagcagcagcgugaucaccagccugggcgccaucgugagcugcuacggcaagaccaagugcaccgccagcaacaagugcagaggcaucaucaagaccuucagcaacggcugcgacuacgugagcaacaagggcguggacaccgugagcgugggcaacacccuguacuacgugaacaagcaggagggcaagagccuguacgugaagggcgagcccaucaucaacuucuacgacccccugguguuccccagcgacgaguucgacgccagcaucagccaggugaacgagaagaucaaccagagccuggccuucaucagaaagagcgacgagcugcugcacaacgugaacgugggcaagagcaccaccaacaucaugaucaccaccaucaucaucgugaucaucgugauccugcugcugcugaucgccgugggccuguuccuguacugcaaggccagaugaggacuaguguccaccugucccuccugggcugcuggauugucucguuuuccugccaaauaaacaggaucagcgcuuuacagaucuaaaaaaaaaaaaaaaaaaaaaaaaaaaaaaaaaaaaaaaaaaaaaaaaaaaaaaaaaaaaaaaaugcaucccccccccccccccccccccccccccccccaaaggcucuuuucagagccaccagaauu

SEQ ID NO: 17451 - RNA, 1829 nt, Artificial Sequence
  mRNA product Design e-3 comprising derived and/or modified sequence from HRSV(Memphis-37)__AIY60640.1__F-del_DSCav1_mut5 (opt5)
gggagacuuucccauucuguagcagaauuugguguugccuguggucuuggucccgcggagaagcuuaccauggagcugcccauccucaagaccaacgccauuacaacgauccuggcugccgugacccuuugcuucgcgagcucccagaauauuacagaagaguuuuaccaaucuaccuguagcgcugucuccaaaggcuaucugucugcccucagaacagggugguacaccagcguuaucacaauugaacuguccaacaucaaggagaauaaaugcaacggaaccgacgccaaggugaaacuuaucaagcaggaacuggauaaguauaaaaaugcugugacggagcuccagcugcugaugcagucuaccccugccgcuggcagcggguccgccauugcgagcggaaucgccgucuguaaggugcuccaccuggagggcgaaguuaacaaaauuaagaaugcccuucugucuacaaacaaagcuguggucucccucagcgggugcggagugucuguucugaccuucaaggugcuugaccugaagaauuacaucgauaaacaacuccugccgauucugaacaagcaguccuguagcaucucuaauauugagacagucaucgaauuucagcagaaaaacaaucggcuccuggagaucacccgcgaguucuccgugaacgcuggcgugacgacacccgucagcaccuauaugcuuacaaauuccgaacugcucucucugauuaacgacaugccuaucaccaacgaucaaaagaaacuuaugagcaauaacguucagauugugagacagcaguccuacagcaucaugugcauuaucaaggaggaagugcuggccuaugucgugcaacucccccuguacggcguuaucgacaccccuuguuggaaacugcauacaucuccccucugcacgaccaauacaaaggagggguccaacauuugucugacccggacagaucgcggaugguacugcgacaaugcgggcagcgugagcuuuuucccucaggccgaaaccuguaagguccagucuaacagaguguuuugcgauacgaugaacuccagaacacugccgucugagguuaaucucugcaauaucgacauuuucaaccccaaauaugauuguaagaucaugaccagcaaaaccgacguguccagcucugucauuacaucccugggggcuaucgugagcugcuacggaaagaccaaauguacagccucuaauaagugccggggcaucauuaagacguuuuccaacgggugugauuaugucagcaauaaaggaguggacaccguuuccgugggcaacacacuuuacuaugucaauaagcaagagggcaaaucucuguacgugaagggggaaccuaucauuaacuucuaugacccccucguuuuuccuagcgaugaguucgacgcuuccaucucucaggugaacgagaaaauuaaucagagccuggccuuuauccgcaaguccgaugaacugcuccacaacgucaaugugggaaagagcaccacaaacauuaugaucaccacgaucauuaucgugauuaucguuauucugcuucugcucaucgccgucggccuguuccuguacugcaaagcuagaugaggacuaguguccaccugucccuccugggcugcuggauugucucguuuuccugccaaauaaacaggaucagcgcuuuacagaucuaaaaaaaaaaaaaaaaaaaaaaaaaaaaaaaaaaaaaaaaaaaaaaaaaaaaaaaaaaaaaaaaugcaucccccccccccccccccccccccccccccccaaaggcucuuuucagagccaccagaauu

SEQ ID NO: 17452 - RNA, 1829 nt, Artificial Sequence
  mRNA product Design e-3 comprising derived and/or modified sequence from HRSV(Memphis-37)__AIY60640.1__F-del_DSCav1_mut5 (opt6)
gggagacuuucccauucuguagcagaauuugguguugccuguggucuuggucccgcggagaagcuuaccauggaauuacccaucuuaaaaacaaaugcaauaacaacaauacuagcagccguaacauuaugcuucgccucaagccaaaacauaacagaagaauuuuaccaaagcacauguuccgccguaucaaaaggauaucucucagcacuacguacuggaugguauacauccguaaucacaauugaacuaucaaacauuaaagaaaacaaaugcaauggaacagaugcgaaaguaaaacuaauaaaacaagaauuagauaaauauaaaaaugcaguaaccgaacuacaacuacuaaugcaaucaacucccgcugccgguagcggauccgccauagcaagcggaauugcuguauguaaaguccuacaucuugaaggcgaagucaacaaaaucaaaaaugcauuacucucgaccaacaaagcagucguaucacuaucaggaugcggagucucaguauuaacuuuuaaaguccuugaccuaaaaaacuacauagacaaacaacuacuaccaauucuaaauaaacaaaguugcagcauauccaauaucgaaacaguuauagaauuucaacaaaaaaacaaccgccuacuagaaaucacuagagaauuuucaguaaaugcaggcguaaccacaccagucucuaccuauaugcuuaccaacucugaauuauuaucacuuauaaacgacaugcccauaacaaaugaucaaaaaaaacuaaugagcaacaacguacaaauaguaagacaacaaagcuacagcauuauguguauaauaaaagaagaaguguuagcuuauguaguccaacuaccccucuauggcguuaucgauacaccaugcuggaaauuacacacaagcccucuaugcacaacuaacaccaaagaaggcucuaacauaugcuuaacaagaacagauagaggaugguauugcgauaacgcaggaucaguaucauucuuuccacaagcagaaacauguaaaguacaaucuaaccgaguauucugcgacacaaugaacucuagaacacuacccucagaaguuaaucucuguaauauugacauuuucaauccaaaauacgauugcaaaauaaugaccucuaaaaccgacguaucauccucaguuauaacguccuuaggagcaaucguaagcugcuauggcaaaacaaaauguaccgcaucaaacaaaugcagaggaauaauaaaaacauucucaaacggcugugacuacguaagcaauaaagguguugacacaguuucaguaggaaauacacuauacuauguaaauaaacaagaaggaaaaucucucuauguaaaaggagaacccauaauaaacuucuacgacccacucguauuuccaagcgaugaauuugaugcgagcauuucccagguaaaugaaaaaauaaaucaaucacuagcauucaucagaaaaagugaugaauuacuacacaauguuaacguaggaaaaucaacaacaaauaucaugauaacaacaaucauaauagucauaaucguaauauuacuauuacuaauagcaguagguuuauuucuauacuguaaagcaagguaaggacuaguguccaccugucccuccugggcugcuggauugucucguuuuccugccaaauaaacaggaucagcgcuuuacagaucuaaaaaaaaaaaaaaaaaaaaaaaaaaaaaaaaaaaaaaaaaaaaaaaaaaaaaaaaaaaaaaaaugcaucccccccccccccccccccccccccccccccaaaggcucuuuucagagccaccagaauu

SEQ ID NO: 17453 - RNA, 1829 nt, Artificial Sequence
  mRNA product Design e-3 comprising derived and/or modified sequence from HRSV(Memphis-37)__AIY60640.1__F-del_DSCav1_mut5 (opt11)
gggagacuuucccauucuguagcagaauuugguguugccuguggucuuggucccgcggagaagcuuaccauggaacuucccauccuaaaaaccaacgccauaacaacaauccucgcagcagucacccucugcuucgccucuucacaaaacaucaccgaagaauuuuaccaaucaaccugcuccgccguguccaaaggcuaccucucagcacugcgcacaggaugguauaccagcguaaucaccaucgaacucuccaacaucaaggaaaacaaaugcaacggcaccgaugccaaagucaaacucaucaagcaagaacuugacaaauacaaaaacgccgugaccgagcuacaacuccucaugcaguccacuccagccgccggcuccggcagcgccaucgccuccggcaucgccguaugcaaaguccuccaccucgaaggcgaaguaaacaaaaucaagaacgcacuccuaagcaccaacaaagccgucgucucacucuccgguugcggcgucagcguccuaacauucaaaguucucgaccucaaaaacuacauagacaaacaacuccuccccauccucaacaaacaauccugcuccauaucaaacaucgaaaccguuaucgaauuucaacaaaaaaacaaccgccuccuagaaaucacccgcgaauuuuccgucaacgcaggcgucaccacccccguuuccaccuauaugcucaccaacuccgaacuccucucccucaucaacgacaugcccauuaccaacgaccaaaagaaacuuaugagcaacaacguucaaaucguccgacaacaaucauacuccaucaugugcauuaucaaagaagaaguacucgccuacguaguacaauuaccccucuacggcguaaucgacaccccaugcuggaaacuacacaccuccccccucuguaccaccaacaccaaagaaggcucuaacaucugccucacccgcacagaccguggcugguauugcgauaacgcagggucugucuccuucuucccccaagccgaaacaugcaaaguccaauccaacagagucuucugcgacaccaugaacucgagaacccuccccuccgaagucaaccuaugcaacaucgacaucuucaacccaaaauacgacugcaaaaucaugacuucaaaaacagacgugagcucguccgucaucacaagccuaggagcuaucguauccugcuacggaaaaacaaaaugcacugcuuccaacaaaugccgcggaaucauaaaaaccuucuccaacggcugcgacuacgucagcaacaaaggcgucgacacagucuccguaggcaacacccuauacuacgucaauaaacaagaaggcaagucccuauaugucaaaggcgagcccaucaucaauuucuaugauccccucguuuucccauccgacgaauuugacgcauccaucucccaagucaacgaaaaaauaaaccaaagccucgcauucauccgcaaauccgacgaacuccuccacaacguaaacguaggaaaauccacaacuaacaucaugaucaccaccaucaucaucgucauuaucgucauccuacuccuccucauagcagucggccucuuccucuacugcaaagcacgcuagggacuaguguccaccugucccuccugggcugcuggauugucucguuuuccugccaaauaaacaggaucagcgcuuuacagaucuaaaaaaaaaaaaaaaaaaaaaaaaaaaaaaaaaaaaaaaaaaaaaaaaaaaaaaaaaaaaaaaaugcaucccccccccccccccccccccccccccccccaaaggcucuuuucagagccaccagaauu

SEQ ID NO: 17454 - RNA, 1883 nt, Artificial Sequence
  mRNA product Design e-4 comprising derived and/or modified sequence from HRSV(Memphis-37)__AIY60640.1__F-del_DSCav1_mut5 (opt1)
gggagacuccugucgggcggaaguaggaggaguagaguuuaaaaacaguacucuuuuuccgguucgggacguaguugaagcaacgacaagccggauaaccgcucuugagacaggaagcuuaccauggagcugcccauccucaagaccaacgccaucaccacgauccuggccgcggugacccugugcuucgccagcucccagaacaucaccgaggaguucuaccagagcacgugcuccgccgucagcaagggcuaccucuccgcccugcgcaccgggugguacaccagcgugaucaccaucgagcuguccaacaucaaggagaacaagugcaacggcaccgacgccaaggugaagcucaucaagcaggagcuggacaaguacaagaacgcggucacggagcugcagcuccugaugcagagcaccccggccgccggcuccgggagcgcgaucgccuccggcaucgccgucugcaaggugcugcaccucgagggcgaggugaacaagaucaagaacgcccugcuguccaccaacaaggccgucgugagccucuccggcugcggggugagcguccugaccuucaaggugcuggaccucaagaacuacaucgacaagcagcugcugcccauccugaacaagcagagcugcuccaucagcaacaucgagaccgucaucgaguuccagcagaagaacaaccgccuccuggagaucacgcgggaguucagcgugaacgcgggcgugaccacccccgucuccaccuacaugcugacgaacagcgagcuccugucccugaucaacgacaugccgaucaccaacgaccagaagaagcucaugagcaacaacgugcagaucgugcgccagcaguccuacagcaucaugugcaucaucaaggaggagguccuggccuacguggugcagcugccccucuacggggucaucgacacccccugcuggaagcugcacaccagcccccugugcacgaccaacaccaaggagggcuccaacaucugccucacccggacggaccgcgggugguacugcgacaacgccggcagcguguccuucuucccgcaggccgagaccugcaagguccagagcaaccggguguucugcgacaccaugaacucccggacccugcccagcgaggugaaccucugcaacaucgacaucuucaaccccaaguacgacugcaagaucaugacguccaagaccgacgucagcuccagcgugaucaccucccugggcgccaucgugagcugcuacgggaagaccaagugcacggcgagcaacaagugccgcggcaucaucaagaccuucuccaacgggugcgacuacgucagcaacaagggcguggacaccguguccgucggcaacacccuguacuacgugaacaagcaggagggcaagagccucuacgugaagggggagcccaucaucaacuucuacgacccgcuggucuuccccuccgacgaguucgacgccagcaucucccaggugaacgagaagaucaaccagagccuggccuucauccggaaguccgacgagcuccugcacaacgugaacgucggcaagagcaccacgaacaucaugaucaccaccaucaucaucgugaucaucgugauccugcugcuccugaucgccgucgggcuguuccucuacugcaaggcccgcugaggacuaguguccaccugucccuccugggcugcuggauugucucguuuuccugccaaauaaacaggaucagcgcuuuacagaucuaaaaaaaaaaaaaaaaaaaaaaaaaaaaaaaaaaaaaaaaaaaaaaaaaaaaaaaaaaaaaaaaugcaucccccccccccccccccccccccccccccccaaaggcucuuuucagagccaccagaauu

SEQ ID NO: 17455 - RNA, 1883 nt, Artificial Sequence
  mRNA product Design e-4 comprising derived and/or modified sequence from HRSV(Memphis-37)__AIY60640.1__F-del_DSCav1_mut5 (opt1)
gggagacuccugucgggcggaaguaggaggaguagaguuuaaaaacaguacucuuuuuccgguucgggacguaguugaagcaacgacaagccggauaaccgcucuugagacaggaagcuuaccauggagcugcccauccucaagaccaacgccaucaccacgauccuggccgcggugacccugugcuucgccagcucccagaacaucaccgaggaguucuaccagagcacgugcuccgccgucagcaagggcuaccucuccgcccugcgcaccgggugguacaccagcgugaucaccaucgagcuguccaacaucaaggagaacaagugcaacggcaccgacgccaaggugaagcucaucaagcaggagcuggacaaguacaagaacgcggucacggagcugcagcuccugaugcagagcaccccggccgccggguccggcagcgccaucgcguccgggaucgccgugugcaaggugcugcaccucgagggcgaggucaacaagaucaagaacgcccugcugagcaccaacaaggccguggugucccucagcggcugcggggucuccgugcugaccuucaaggugcuggaccucaagaacuacaucgacaagcagcugcugcccauccucaacaagcagagcugcuccaucagcaacaucgagacggucaucgaguuccagcagaagaacaaccggcugcuggagaucacccgcgaguucuccgugaacgccggcgugaccacccccgucagcacguacaugcucaccaacagcgagcugcugucccucaucaacgacaugcccaucaccaacgaccagaagaagcugaugagcaacaacgugcagaucgugcggcagcaguccuacagcaucaugugcaucaucaaggaggagguccuggcguacguggugcagcucccgcuguacggggucaucgacacccccugcuggaagcugcacacgagcccccucugcaccaccaacaccaaggagggcuccaacaucugccugacgcgcaccgaccgggggugguacugcgacaacgccggcuccgugagcuucuucccccaggccgagaccugcaaggugcaguccaaccgcgucuucugcgacaccaugaacagccggacgcucccguccgaggugaaccugugcaacaucgacaucuucaaccccaaguacgacugcaagaucaugaccagcaagaccgacgucuccagcuccgugaucaccagccugggcgccaucguguccugcuacgggaagacgaagugcaccgccagcaacaagugccggggcaucaucaagaccuucuccaacgggugcgacuacgucagcaacaagggcguggacaccgugagcgucggcaacacgcucuacuacgugaacaagcaggaggggaagucccuguacgugaagggcgagcccaucaucaacuucuacgacccccuggucuucccgagcgacgaguucgacgcguccaucagccaggugaacgagaagaucaaccagucccucgccuucauccgcaagagcgacgagcugcugcacaacgugaacgucgggaaguccaccaccaacaucaugaucaccaccaucaucaucgugaucaucgugauccuccugcugcucaucgccgucggccuguuccuguacugcaaggcccggugaggacuaguguccaccugucccuccugggcugcuggauugucucguuuuccugccaaauaaacaggaucagcgcuuuacagaucuaaaaaaaaaaaaaaaaaaaaaaaaaaaaaaaaaaaaaaaaaaaaaaaaaaaaaaaaaaaaaaaaugcaucccccccccccccccccccccccccccccccaaaggcucuuuucagagccaccagaauu

SEQ ID NO: 17456 - RNA, 1883 nt, Artificial Sequence
  mRNA product Design e-4 comprising derived and/or modified sequence from HRSV(Memphis-37)__AIY60640.1__F-del_DSCav1_mut5 (opt2)
gggagacuccugucgggcggaaguaggaggaguagaguuuaaaaacaguacucuuuuuccgguucgggacguaguugaagcaacgacaagccggauaaccgcucuugagacaggaagcuuaccauggagcuccccauccucaagaccaacgccaucaccaccauccucgccgccgucacccucugcuucgccuccucccagaacaucaccgaggaguucuaccaguccaccugcuccgccgucuccaagggcuaccucuccgcccuccgcaccggcugguacaccuccgucaucaccaucgagcucuccaacaucaaggagaacaagugcaacggcaccgacgccaaggucaagcucaucaagcaggagcucgacaaguacaagaacgccgucaccgagcuccagcuccucaugcaguccacccccgccgccggcuccggcuccgccaucgccuccggcaucgccgucugcaagguccuccaccucgagggcgaggucaacaagaucaagaacgcccuccucuccaccaacaaggccgucgucucccucuccggcugcggcgucuccguccucaccuucaagguccucgaccucaagaacuacaucgacaagcagcuccuccccauccucaacaagcaguccugcuccaucuccaacaucgagaccgucaucgaguuccagcagaagaacaaccgccuccucgagaucacccgcgaguucuccgucaacgccggcgucaccacccccgucuccaccuacaugcucaccaacuccgagcuccucucccucaucaacgacaugcccaucaccaacgaccagaagaagcucauguccaacaacguccagaucguccgccagcaguccuacuccaucaugugcaucaucaaggaggagguccucgccuacgucguccagcucccccucuacggcgucaucgacacccccugcuggaagcuccacaccuccccccucugcaccaccaacaccaaggagggcuccaacaucugccucacccgcaccgaccgcggcugguacugcgacaacgccggcuccgucuccuucuucccccaggccgagaccugcaagguccaguccaaccgcgucuucugcgacaccaugaacucccgcacccuccccuccgaggucaaccucugcaacaucgacaucuucaaccccaaguacgacugcaagaucaugaccuccaagaccgacgucuccuccuccgucaucaccucccucggcgccaucgucuccugcuacggcaagaccaagugcaccgccuccaacaagugccgcggcaucaucaagaccuucuccaacggcugcgacuacgucuccaacaagggcgucgacaccgucuccgucggcaacacccucuacuacgucaacaagcaggagggcaagucccucuacgucaagggcgagcccaucaucaacuucuacgacccccucgucuuccccuccgacgaguucgacgccuccaucucccaggucaacgagaagaucaaccagucccucgccuucauccgcaaguccgacgagcuccuccacaacgucaacgucggcaaguccaccaccaacaucaugaucaccaccaucaucaucgucaucaucgucauccuccuccuccucaucgccgucggccucuuccucuacugcaaggcccgcugaggacuaguguccaccugucccuccugggcugcuggauugucucguuuuccugccaaauaaacaggaucagcgcuuuacagaucuaaaaaaaaaaaaaaaaaaaaaaaaaaaaaaaaaaaaaaaaaaaaaaaaaaaaaaaaaaaaaaaaugcaucccccccccccccccccccccccccccccccaaaggcucuuuucagagccaccagaauu

SEQ ID NO: 17457 - RNA, 1883 nt, Artificial Sequence
  mRNA product Design e-4 comprising derived and/or modified sequence from HRSV(Memphis-37)__AIY60640.1__F-del_DSCav1_mut5 (opt3)
gggagacuccugucgggcggaaguaggaggaguagaguuuaaaaacaguacucuuuuuccgguucgggacguaguugaagcaacgacaagccggauaaccgcucuugagacaggaagcuuaccauggagcugcccauccucaagaccaacgccauuacaacuauacuugcugcagugacgcugugcuucgccagcucccagaauaucaccgaagaguuuuaccaaucuacauguucagcggucaguaaaggcuauuugagcgcuuuaagaacugggugguacaccuccguuauuacaaucgaacugucuaacauuaaggagaauaaaugcaacggaaccgacgccaaggugaaacuaaucaagcaggaacucgauaaguauaaaaaugcaguaacugagcugcagcuucugaugcagucgaccccugccgcugguucaggcagcgcaauagccagugggaucgcuguguguaaggucuugcaccucgagggagaagugaacaaaauuaagaaugcccugcuguccacaaacaaagcgguugugucucucagcggcugcggugucuccguguuaacguucaagguacuggaccuuaagaauuacaucgauaaacaauugcugccaauucuaaacaagcagucauguaguaucagcaauauagagacuguuauugaauuucagcagaaaaacaauaggcuccuggagaucacccgggaguucucugugaacgcaggggucacaacuccgguguccaccuauaugcuuacaaauucagaacuguugagccucauuaacgacaugcccaucaccaacgaucaaaagaaacugaugaguaauaacgugcagaucguccgccagcagucuuacuccauuaugugcauaaucaaggaggaaguuuuagccuaugugguacaacugccucucuacggagugauugacacgccauguuggaaacuucauacuagcccccugugcacaaccaauacuaaggagggcucgaacaucuguuugacacgaaccgaucguggcugguacugcgacaaugcugggucugucuccuuuuucccucaggccgaaacguguaaggugcagucaaacagaguguuuugcgauaccaugaauaguagaacacugccaagcgaggugaaccucugcaauauagacauuuucaaccccaaauaugauuguaagaucaugacuuccaaaaccgacgucucuagcucagugaucacaagucugggagcaauuguauccugcuacgguaagacuaaauguaccgcuagcaauaagugcaggggcaucauuaagacauuuucuaacgggugugauuauguuucaaauaaaggaguggacaccgucagugugggcaacacucuuuacuaugucaauaagcaagaggguaaaagccuguacgugaagggggaaccuauaaucaacuucuaugacccauugguuuuuccguccgaugaguucgacgccucuauuucgcagguuaacgagaaaaucaaucagagccucgcguuuauccggaaguccgaugaacuguuacacaacguaaaugucggaaagucaacgacaaacauuaugauaaccacuaucauuaucgugauuaucguuauacugcuacuccugaucgccgugggccuuuucuuguacugcaaagcacgcugaggacuaguguccaccugucccuccugggcugcuggauugucucguuuuccugccaaauaaacaggaucagcgcuuuacagaucuaaaaaaaaaaaaaaaaaaaaaaaaaaaaaaaaaaaaaaaaaaaaaaaaaaaaaaaaaaaaaaaaugcaucccccccccccccccccccccccccccccccaaaggcucuuuucagagccaccagaauu

SEQ ID NO: 17458 - RNA, 1883 nt, Artificial Sequence
  mRNA product Design e-4 comprising derived and/or modified sequence from HRSV(Memphis-37)__AIY60640.1__F-del_DSCav1_mut5 (opt4)
gggagacuccugucgggcggaaguaggaggaguagaguuuaaaaacaguacucuuuuuccgguucgggacguaguugaagcaacgacaagccggauaaccgcucuugagacaggaagcuuaccauggagcugcccauccugaagaccaacgccaucaccaccauccuggccgccgugacccugugcuucgccagcagccagaacaucaccgaggaguucuaccagagcaccugcagcgccgugagcaagggcuaccugagcgcccugagaaccggcugguacaccagcgugaucaccaucgagcugagcaacaucaaggagaacaagugcaacggcaccgacgccaaggugaagcugaucaagcaggagcuggacaaguacaagaacgccgugaccgagcugcagcugcugaugcagagcacccccgccgccggcagcggcagcgccaucgccagcggcaucgccgugugcaaggugcugcaccuggagggcgaggugaacaagaucaagaacgcccugcugagcaccaacaaggccguggugagccugagcggcugcggcgugagcgugcugaccuucaaggugcuggaccugaagaacuacaucgacaagcagcugcugcccauccugaacaagcagagcugcagcaucagcaacaucgagaccgugaucgaguuccagcagaagaacaacagacugcuggagaucaccagagaguucagcgugaacgccggcgugaccacccccgugagcaccuacaugcugaccaacagcgagcugcugagccugaucaacgacaugcccaucaccaacgaccagaagaagcugaugagcaacaacgugcagaucgugagacagcagagcuacagcaucaugugcaucaucaaggaggaggugcuggccuacguggugcagcugccccuguacggcgugaucgacacccccugcuggaagcugcacaccagcccccugugcaccaccaacaccaaggagggcagcaacaucugccugaccagaaccgacagaggcugguacugcgacaacgccggcagcgugagcuucuucccccaggccgagaccugcaaggugcagagcaacagaguguucugcgacaccaugaacagcagaacccugcccagcgaggugaaccugugcaacaucgacaucuucaaccccaaguacgacugcaagaucaugaccagcaagaccgacgugagcagcagcgugaucaccagccugggcgccaucgugagcugcuacggcaagaccaagugcaccgccagcaacaagugcagaggcaucaucaagaccuucagcaacggcugcgacuacgugagcaacaagggcguggacaccgugagcgugggcaacacccuguacuacgugaacaagcaggagggcaagagccuguacgugaagggcgagcccaucaucaacuucuacgacccccugguguuccccagcgacgaguucgacgccagcaucagccaggugaacgagaagaucaaccagagccuggccuucaucagaaagagcgacgagcugcugcacaacgugaacgugggcaagagcaccaccaacaucaugaucaccaccaucaucaucgugaucaucgugauccugcugcugcugaucgccgugggccuguuccuguacugcaaggccagaugaggacuaguguccaccugucccuccugggcugcuggauugucucguuuuccugccaaauaaacaggaucagcgcuuuacagaucuaaaaaaaaaaaaaaaaaaaaaaaaaaaaaaaaaaaaaaaaaaaaaaaaaaaaaaaaaaaaaaaaugcaucccccccccccccccccccccccccccccccaaaggcucuuuucagagccaccagaauu

SEQ ID NO: 17459 - RNA, 1883 nt, Artificial Sequence
  mRNA product Design e-4 comprising derived and/or modified sequence from HRSV(Memphis-37)__AIY60640.1__F-del_DSCav1_mut5 (opt5)
gggagacuccugucgggcggaaguaggaggaguagaguuuaaaaacaguacucuuuuuccgguucgggacguaguugaagcaacgacaagccggauaaccgcucuugagacaggaagcuuaccauggagcugcccauccucaagaccaacgccauuacaacgauccuggcugccgugacccuuugcuucgcgagcucccagaauauuacagaagaguuuuaccaaucuaccuguagcgcugucuccaaaggcuaucugucugcccucagaacagggugguacaccagcguuaucacaauugaacuguccaacaucaaggagaauaaaugcaacggaaccgacgccaaggugaaacuuaucaagcaggaacuggauaaguauaaaaaugcugugacggagcuccagcugcugaugcagucuaccccugccgcuggcagcggguccgccauugcgagcggaaucgccgucuguaaggugcuccaccuggagggcgaaguuaacaaaauuaagaaugcccuucugucuacaaacaaagcuguggucucccucagcgggugcggagugucuguucugaccuucaaggugcuugaccugaagaauuacaucgauaaacaacuccugccgauucugaacaagcaguccuguagcaucucuaauauugagacagucaucgaauuucagcagaaaaacaaucggcuccuggagaucacccgcgaguucuccgugaacgcuggcgugacgacacccgucagcaccuauaugcuuacaaauuccgaacugcucucucugauuaacgacaugccuaucaccaacgaucaaaagaaacuuaugagcaauaacguucagauugugagacagcaguccuacagcaucaugugcauuaucaaggaggaagugcuggccuaugucgugcaacucccccuguacggcguuaucgacaccccuuguuggaaacugcauacaucuccccucugcacgaccaauacaaaggagggguccaacauuugucugacccggacagaucgcggaugguacugcgacaaugcgggcagcgugagcuuuuucccucaggccgaaaccuguaagguccagucuaacagaguguuuugcgauacgaugaacuccagaacacugccgucugagguuaaucucugcaauaucgacauuuucaaccccaaauaugauuguaagaucaugaccagcaaaaccgacguguccagcucugucauuacaucccugggggcuaucgugagcugcuacggaaagaccaaauguacagccucuaauaagugccggggcaucauuaagacguuuuccaacgggugugauuaugucagcaauaaaggaguggacaccguuuccgugggcaacacacuuuacuaugucaauaagcaagagggcaaaucucuguacgugaagggggaaccuaucauuaacuucuaugacccccucguuuuuccuagcgaugaguucgacgcuuccaucucucaggugaacgagaaaauuaaucagagccuggccuuuauccgcaaguccgaugaacugcuccacaacgucaaugugggaaagagcaccacaaacauuaugaucaccacgaucauuaucgugauuaucguuauucugcuucugcucaucgccgucggccuguuccuguacugcaaagcuagaugaggacuaguguccaccugucccuccugggcugcuggauugucucguuuuccugccaaauaaacaggaucagcgcuuuacagaucuaaaaaaaaaaaaaaaaaaaaaaaaaaaaaaaaaaaaaaaaaaaaaaaaaaaaaaaaaaaaaaaaugcaucccccccccccccccccccccccccccccccaaaggcucuuuucagagccaccagaauu

SEQ ID NO: 17460 - RNA, 1883 nt, Artificial Sequence
  mRNA product Design e-4 comprising derived and/or modified sequence from HRSV(Memphis-37)__AIY60640.1__F-del_DSCav1_mut5 (opt6)
gggagacuccugucgggcggaaguaggaggaguagaguuuaaaaacaguacucuuuuuccgguucgggacguaguugaagcaacgacaagccggauaaccgcucuugagacaggaagcuuaccauggaauuacccaucuuaaaaacaaaugcaauaacaacaauacuagcagccguaacauuaugcuucgccucaagccaaaacauaacagaagaauuuuaccaaagcacauguuccgccguaucaaaaggauaucucucagcacuacguacuggaugguauacauccguaaucacaauugaacuaucaaacauuaaagaaaacaaaugcaauggaacagaugcgaaaguaaaacuaauaaaacaagaauuagauaaauauaaaaaugcaguaaccgaacuacaacuacuaaugcaaucaacucccgcugccgguagcggauccgccauagcaagcggaauugcuguauguaaaguccuacaucuugaaggcgaagucaacaaaaucaaaaaugcauuacucucgaccaacaaagcagucguaucacuaucaggaugcggagucucaguauuaacuuuuaaaguccuugaccuaaaaaacuacauagacaaacaacuacuaccaauucuaaauaaacaaaguugcagcauauccaauaucgaaacaguuauagaauuucaacaaaaaaacaaccgccuacuagaaaucacuagagaauuuucaguaaaugcaggcguaaccacaccagucucuaccuauaugcuuaccaacucugaauuauuaucacuuauaaacgacaugcccauaacaaaugaucaaaaaaaacuaaugagcaacaacguacaaauaguaagacaacaaagcuacagcauuauguguauaauaaaagaagaaguguuagcuuauguaguccaacuaccccucuauggcguuaucgauacaccaugcuggaaauuacacacaagcccucuaugcacaacuaacaccaaagaaggcucuaacauaugcuuaacaagaacagauagaggaugguauugcgauaacgcaggaucaguaucauucuuuccacaagcagaaacauguaaaguacaaucuaaccgaguauucugcgacacaaugaacucuagaacacuacccucagaaguuaaucucuguaauauugacauuuucaauccaaaauacgauugcaaaauaaugaccucuaaaaccgacguaucauccucaguuauaacguccuuaggagcaaucguaagcugcuauggcaaaacaaaauguaccgcaucaaacaaaugcagaggaauaauaaaaacauucucaaacggcugugacuacguaagcaauaaagguguugacacaguuucaguaggaaauacacuauacuauguaaauaaacaagaaggaaaaucucucuauguaaaaggagaacccauaauaaacuucuacgacccacucguauuuccaagcgaugaauuugaugcgagcauuucccagguaaaugaaaaaauaaaucaaucacuagcauucaucagaaaaagugaugaauuacuacacaauguuaacguaggaaaaucaacaacaaauaucaugauaacaacaaucauaauagucauaaucguaauauuacuauuacuaauagcaguagguuuauuucuauacuguaaagcaagguaaggacuaguguccaccugucccuccugggcugcuggauugucucguuuuccugccaaauaaacaggaucagcgcuuuacagaucuaaaaaaaaaaaaaaaaaaaaaaaaaaaaaaaaaaaaaaaaaaaaaaaaaaaaaaaaaaaaaaaaugcaucccccccccccccccccccccccccccccccaaaggcucuuuucagagccaccagaauu

SEQ ID NO: 17461 - RNA, 1883 nt, Artificial Sequence
  mRNA product Design e-4 comprising derived and/or modified sequence from HRSV(Memphis-37)__AIY60640.1__F-del_DSCav1_mut5 (opt11)
gggagacuccugucgggcggaaguaggaggaguagaguuuaaaaacaguacucuuuuuccgguucgggacguaguugaagcaacgacaagccggauaaccgcucuugagacaggaagcuuaccauggaacuucccauccuaaaaaccaacgccauaacaacaauccucgcagcagucacccucugcuucgccucuucacaaaacaucaccgaagaauuuuaccaaucaaccugcuccgccguguccaaaggcuaccucucagcacugcgcacaggaugguauaccagcguaaucaccaucgaacucuccaacaucaaggaaaacaaaugcaacggcaccgaugccaaagucaaacucaucaagcaagaacuugacaaauacaaaaacgccgugaccgagcuacaacuccucaugcaguccacuccagccgccggcuccggcagcgccaucgccuccggcaucgccguaugcaaaguccuccaccucgaaggcgaaguaaacaaaaucaagaacgcacuccuaagcaccaacaaagccgucgucucacucuccgguugcggcgucagcguccuaacauucaaaguucucgaccucaaaaacuacauagacaaacaacuccuccccauccucaacaaacaauccugcuccauaucaaacaucgaaaccguuaucgaauuucaacaaaaaaacaaccgccuccuagaaaucacccgcgaauuuuccgucaacgcaggcgucaccacccccguuuccaccuauaugcucaccaacuccgaacuccucucccucaucaacgacaugcccauuaccaacgaccaaaagaaacuuaugagcaacaacguucaaaucguccgacaacaaucauacuccaucaugugcauuaucaaagaagaaguacucgccuacguaguacaauuaccccucuacggcguaaucgacaccccaugcuggaaacuacacaccuccccccucuguaccaccaacaccaaagaaggcucuaacaucugccucacccgcacagaccguggcugguauugcgauaacgcagggucugucuccuucuucccccaagccgaaacaugcaaaguccaauccaacagagucuucugcgacaccaugaacucgagaacccuccccuccgaagucaaccuaugcaacaucgacaucuucaacccaaaauacgacugcaaaaucaugacuucaaaaacagacgugagcucguccgucaucacaagccuaggagcuaucguauccugcuacggaaaaacaaaaugcacugcuuccaacaaaugccgcggaaucauaaaaaccuucuccaacggcugcgacuacgucagcaacaaaggcgucgacacagucuccguaggcaacacccuauacuacgucaauaaacaagaaggcaagucccuauaugucaaaggcgagcccaucaucaauuucuaugauccccucguuuucccauccgacgaauuugacgcauccaucucccaagucaacgaaaaaauaaaccaaagccucgcauucauccgcaaauccgacgaacuccuccacaacguaaacguaggaaaauccacaacuaacaucaugaucaccaccaucaucaucgucauuaucgucauccuacuccuccucauagcagucggccucuuccucuacugcaaagcacgcuagggacuaguguccaccugucccuccugggcugcuggauugucucguuuuccugccaaauaaacaggaucagcgcuuuacagaucuaaaaaaaaaaaaaaaaaaaaaaaaaaaaaaaaaaaaaaaaaaaaaaaaaaaaaaaaaaaaaaaaugcaucccccccccccccccccccccccccccccccaaaggcucuuuucagagccaccagaauu

SEQ ID NO: 17462 - RNA, 1850 nt, Artificial Sequence
  mRNA product Design e-5 comprising derived and/or modified sequence from HRSV(Memphis-37)__AIY60640.1__F-del_DSCav1_mut5 (opt1)
gggagagcggcucggccauuuugucccagucaguccggaggcugcggcugcagaaguaccgccugcggaguaacugcaaagaagcuuaccauggagcugcccauccucaagaccaacgccaucaccacgauccuggccgcggugacccugugcuucgccagcucccagaacaucaccgaggaguucuaccagagcacgugcuccgccgucagcaagggcuaccucuccgcccugcgcaccgggugguacaccagcgugaucaccaucgagcuguccaacaucaaggagaacaagugcaacggcaccgacgccaaggugaagcucaucaagcaggagcuggacaaguacaagaacgcggucacggagcugcagcuccugaugcagagcaccccggccgccggcuccgggagcgcgaucgccuccggcaucgccgucugcaaggugcugcaccucgagggcgaggugaacaagaucaagaacgcccugcuguccaccaacaaggccgucgugagccucuccggcugcggggugagcguccugaccuucaaggugcuggaccucaagaacuacaucgacaagcagcugcugcccauccugaacaagcagagcugcuccaucagcaacaucgagaccgucaucgaguuccagcagaagaacaaccgccuccuggagaucacgcgggaguucagcgugaacgcgggcgugaccacccccgucuccaccuacaugcugacgaacagcgagcuccugucccugaucaacgacaugccgaucaccaacgaccagaagaagcucaugagcaacaacgugcagaucgugcgccagcaguccuacagcaucaugugcaucaucaaggaggagguccuggccuacguggugcagcugccccucuacggggucaucgacacccccugcuggaagcugcacaccagcccccugugcacgaccaacaccaaggagggcuccaacaucugccucacccggacggaccgcgggugguacugcgacaacgccggcagcguguccuucuucccgcaggccgagaccugcaagguccagagcaaccggguguucugcgacaccaugaacucccggacccugcccagcgaggugaaccucugcaacaucgacaucuucaaccccaaguacgacugcaagaucaugacguccaagaccgacgucagcuccagcgugaucaccucccugggcgccaucgugagcugcuacgggaagaccaagugcacggcgagcaacaagugccgcggcaucaucaagaccuucuccaacgggugcgacuacgucagcaacaagggcguggacaccguguccgucggcaacacccuguacuacgugaacaagcaggagggcaagagccucuacgugaagggggagcccaucaucaacuucuacgacccgcuggucuuccccuccgacgaguucgacgccagcaucucccaggugaacgagaagaucaaccagagccuggccuucauccggaaguccgacgagcuccugcacaacgugaacgucggcaagagcaccacgaacaucaugaucaccaccaucaucaucgugaucaucgugauccugcugcuccugaucgccgucgggcuguuccucuacugcaaggcccgcugaggacuaguguccaccugucccuccugggcugcuggauugucucguuuuccugccaaauaaacaggaucagcgcuuuacagaucuaaaaaaaaaaaaaaaaaaaaaaaaaaaaaaaaaaaaaaaaaaaaaaaaaaaaaaaaaaaaaaaaugcaucccccccccccccccccccccccccccccccaaaggcucuuuucagagccaccagaauu

SEQ ID NO: 17463 - RNA, 1850 nt, Artificial Sequence
  mRNA product Design e-5 comprising derived and/or modified sequence from HRSV(Memphis-37)__AIY60640.1__F-del_DSCav1_mut5 (opt1)
gggagagcggcucggccauuuugucccagucaguccggaggcugcggcugcagaaguaccgccugcggaguaacugcaaagaagcuuaccauggagcugcccauccucaagaccaacgccaucaccacgauccuggccgcggugacccugugcuucgccagcucccagaacaucaccgaggaguucuaccagagcacgugcuccgccgucagcaagggcuaccucuccgcccugcgcaccgggugguacaccagcgugaucaccaucgagcuguccaacaucaaggagaacaagugcaacggcaccgacgccaaggugaagcucaucaagcaggagcuggacaaguacaagaacgcggucacggagcugcagcuccugaugcagagcaccccggccgccggguccggcagcgccaucgcguccgggaucgccgugugcaaggugcugcaccucgagggcgaggucaacaagaucaagaacgcccugcugagcaccaacaaggccguggugucccucagcggcugcggggucuccgugcugaccuucaaggugcuggaccucaagaacuacaucgacaagcagcugcugcccauccucaacaagcagagcugcuccaucagcaacaucgagacggucaucgaguuccagcagaagaacaaccggcugcuggagaucacccgcgaguucuccgugaacgccggcgugaccacccccgucagcacguacaugcucaccaacagcgagcugcugucccucaucaacgacaugcccaucaccaacgaccagaagaagcugaugagcaacaacgugcagaucgugcggcagcaguccuacagcaucaugugcaucaucaaggaggagguccuggcguacguggugcagcucccgcuguacggggucaucgacacccccugcuggaagcugcacacgagcccccucugcaccaccaacaccaaggagggcuccaacaucugccugacgcgcaccgaccgggggugguacugcgacaacgccggcuccgugagcuucuucccccaggccgagaccugcaaggugcaguccaaccgcgucuucugcgacaccaugaacagccggacgcucccguccgaggugaaccugugcaacaucgacaucuucaaccccaaguacgacugcaagaucaugaccagcaagaccgacgucuccagcuccgugaucaccagccugggcgccaucguguccugcuacgggaagacgaagugcaccgccagcaacaagugccggggcaucaucaagaccuucuccaacgggugcgacuacgucagcaacaagggcguggacaccgugagcgucggcaacacgcucuacuacgugaacaagcaggaggggaagucccuguacgugaagggcgagcccaucaucaacuucuacgacccccuggucuucccgagcgacgaguucgacgcguccaucagccaggugaacgagaagaucaaccagucccucgccuucauccgcaagagcgacgagcugcugcacaacgugaacgucgggaaguccaccaccaacaucaugaucaccaccaucaucaucgugaucaucgugauccuccugcugcucaucgccgucggccuguuccuguacugcaaggcccggugaggacuaguguccaccugucccuccugggcugcuggauugucucguuuuccugccaaauaaacaggaucagcgcuuuacagaucuaaaaaaaaaaaaaaaaaaaaaaaaaaaaaaaaaaaaaaaaaaaaaaaaaaaaaaaaaaaaaaaaugcaucccccccccccccccccccccccccccccccaaaggcucuuuucagagccaccagaauu

SEQ ID NO: 17464 - RNA, 1850 nt, Artificial Sequence
  mRNA product Design e-5 comprising derived and/or modified sequence from HRSV(Memphis-37)__AIY60640.1__F-del_DSCav1_mut5 (opt2)
gggagagcggcucggccauuuugucccagucaguccggaggcugcggcugcagaaguaccgccugcggaguaacugcaaagaagcuuaccauggagcuccccauccucaagaccaacgccaucaccaccauccucgccgccgucacccucugcuucgccuccucccagaacaucaccgaggaguucuaccaguccaccugcuccgccgucuccaagggcuaccucuccgcccuccgcaccggcugguacaccuccgucaucaccaucgagcucuccaacaucaaggagaacaagugcaacggcaccgacgccaaggucaagcucaucaagcaggagcucgacaaguacaagaacgccgucaccgagcuccagcuccucaugcaguccacccccgccgccggcuccggcuccgccaucgccuccggcaucgccgucugcaagguccuccaccucgagggcgaggucaacaagaucaagaacgcccuccucuccaccaacaaggccgucgucucccucuccggcugcggcgucuccguccucaccuucaagguccucgaccucaagaacuacaucgacaagcagcuccuccccauccucaacaagcaguccugcuccaucuccaacaucgagaccgucaucgaguuccagcagaagaacaaccgccuccucgagaucacccgcgaguucuccgucaacgccggcgucaccacccccgucuccaccuacaugcucaccaacuccgagcuccucucccucaucaacgacaugcccaucaccaacgaccagaagaagcucauguccaacaacguccagaucguccgccagcaguccuacuccaucaugugcaucaucaaggaggagguccucgccuacgucguccagcucccccucuacggcgucaucgacacccccugcuggaagcuccacaccuccccccucugcaccaccaacaccaaggagggcuccaacaucugccucacccgcaccgaccgcggcugguacugcgacaacgccggcuccgucuccuucuucccccaggccgagaccugcaagguccaguccaaccgcgucuucugcgacaccaugaacucccgcacccuccccuccgaggucaaccucugcaacaucgacaucuucaaccccaaguacgacugcaagaucaugaccuccaagaccgacgucuccuccuccgucaucaccucccucggcgccaucgucuccugcuacggcaagaccaagugcaccgccuccaacaagugccgcggcaucaucaagaccuucuccaacggcugcgacuacgucuccaacaagggcgucgacaccgucuccgucggcaacacccucuacuacgucaacaagcaggagggcaagucccucuacgucaagggcgagcccaucaucaacuucuacgacccccucgucuuccccuccgacgaguucgacgccuccaucucccaggucaacgagaagaucaaccagucccucgccuucauccgcaaguccgacgagcuccuccacaacgucaacgucggcaaguccaccaccaacaucaugaucaccaccaucaucaucgucaucaucgucauccuccuccuccucaucgccgucggccucuuccucuacugcaaggcccgcugaggacuaguguccaccugucccuccugggcugcuggauugucucguuuuccugccaaauaaacaggaucagcgcuuuacagaucuaaaaaaaaaaaaaaaaaaaaaaaaaaaaaaaaaaaaaaaaaaaaaaaaaaaaaaaaaaaaaaaaugcaucccccccccccccccccccccccccccccccaaaggcucuuuucagagccaccagaauu

SEQ ID NO: 17465 - RNA, 1850 nt, Artificial Sequence
  mRNA product Design e-5 comprising derived and/or modified sequence from HRSV(Memphis-37)__AIY60640.1__F-del_DSCav1_mut5 (opt3)
gggagagcggcucggccauuuugucccagucaguccggaggcugcggcugcagaaguaccgccugcggaguaacugcaaagaagcuuaccauggagcugcccauccucaagaccaacgccauuacaacuauacuugcugcagugacgcugugcuucgccagcucccagaauaucaccgaagaguuuuaccaaucuacauguucagcggucaguaaaggcuauuugagcgcuuuaagaacugggugguacaccuccguuauuacaaucgaacugucuaacauuaaggagaauaaaugcaacggaaccgacgccaaggugaaacuaaucaagcaggaacucgauaaguauaaaaaugcaguaacugagcugcagcuucugaugcagucgaccccugccgcugguucaggcagcgcaauagccagugggaucgcuguguguaaggucuugcaccucgagggagaagugaacaaaauuaagaaugcccugcuguccacaaacaaagcgguugugucucucagcggcugcggugucuccguguuaacguucaagguacuggaccuuaagaauuacaucgauaaacaauugcugccaauucuaaacaagcagucauguaguaucagcaauauagagacuguuauugaauuucagcagaaaaacaauaggcuccuggagaucacccgggaguucucugugaacgcaggggucacaacuccgguguccaccuauaugcuuacaaauucagaacuguugagccucauuaacgacaugcccaucaccaacgaucaaaagaaacugaugaguaauaacgugcagaucguccgccagcagucuuacuccauuaugugcauaaucaaggaggaaguuuuagccuaugugguacaacugccucucuacggagugauugacacgccauguuggaaacuucauacuagcccccugugcacaaccaauacuaaggagggcucgaacaucuguuugacacgaaccgaucguggcugguacugcgacaaugcugggucugucuccuuuuucccucaggccgaaacguguaaggugcagucaaacagaguguuuugcgauaccaugaauaguagaacacugccaagcgaggugaaccucugcaauauagacauuuucaaccccaaauaugauuguaagaucaugacuuccaaaaccgacgucucuagcucagugaucacaagucugggagcaauuguauccugcuacgguaagacuaaauguaccgcuagcaauaagugcaggggcaucauuaagacauuuucuaacgggugugauuauguuucaaauaaaggaguggacaccgucagugugggcaacacucuuuacuaugucaauaagcaagaggguaaaagccuguacgugaagggggaaccuauaaucaacuucuaugacccauugguuuuuccguccgaugaguucgacgccucuauuucgcagguuaacgagaaaaucaaucagagccucgcguuuauccggaaguccgaugaacuguuacacaacguaaaugucggaaagucaacgacaaacauuaugauaaccacuaucauuaucgugauuaucguuauacugcuacuccugaucgccgugggccuuuucuuguacugcaaagcacgcugaggacuaguguccaccugucccuccugggcugcuggauugucucguuuuccugccaaauaaacaggaucagcgcuuuacagaucuaaaaaaaaaaaaaaaaaaaaaaaaaaaaaaaaaaaaaaaaaaaaaaaaaaaaaaaaaaaaaaaaugcaucccccccccccccccccccccccccccccccaaaggcucuuuucagagccaccagaauu

SEQ ID NO: 17466 - RNA, 1850 nt, Artificial Sequence
  mRNA product Design e-5 comprising derived and/or modified sequence from HRSV(Memphis-37)__AIY60640.1__F-del_DSCav1_mut5 (opt4)
gggagagcggcucggccauuuugucccagucaguccggaggcugcggcugcagaaguaccgccugcggaguaacugcaaagaagcuuaccauggagcugcccauccugaagaccaacgccaucaccaccauccuggccgccgugacccugugcuucgccagcagccagaacaucaccgaggaguucuaccagagcaccugcagcgccgugagcaagggcuaccugagcgcccugagaaccggcugguacaccagcgugaucaccaucgagcugagcaacaucaaggagaacaagugcaacggcaccgacgccaaggugaagcugaucaagcaggagcuggacaaguacaagaacgccgugaccgagcugcagcugcugaugcagagcacccccgccgccggcagcggcagcgccaucgccagcggcaucgccgugugcaaggugcugcaccuggagggcgaggugaacaagaucaagaacgcccugcugagcaccaacaaggccguggugagccugagcggcugcggcgugagcgugcugaccuucaaggugcuggaccugaagaacuacaucgacaagcagcugcugcccauccugaacaagcagagcugcagcaucagcaacaucgagaccgugaucgaguuccagcagaagaacaacagacugcuggagaucaccagagaguucagcgugaacgccggcgugaccacccccgugagcaccuacaugcugaccaacagcgagcugcugagccugaucaacgacaugcccaucaccaacgaccagaagaagcugaugagcaacaacgugcagaucgugagacagcagagcuacagcaucaugugcaucaucaaggaggaggugcuggccuacguggugcagcugccccuguacggcgugaucgacacccccugcuggaagcugcacaccagcccccugugcaccaccaacaccaaggagggcagcaacaucugccugaccagaaccgacagaggcugguacugcgacaacgccggcagcgugagcuucuucccccaggccgagaccugcaaggugcagagcaacagaguguucugcgacaccaugaacagcagaacccugcccagcgaggugaaccugugcaacaucgacaucuucaaccccaaguacgacugcaagaucaugaccagcaagaccgacgugagcagcagcgugaucaccagccugggcgccaucgugagcugcuacggcaagaccaagugcaccgccagcaacaagugcagaggcaucaucaagaccuucagcaacggcugcgacuacgugagcaacaagggcguggacaccgugagcgugggcaacacccuguacuacgugaacaagcaggagggcaagagccuguacgugaagggcgagcccaucaucaacuucuacgacccccugguguuccccagcgacgaguucgacgccagcaucagccaggugaacgagaagaucaaccagagccuggccuucaucagaaagagcgacgagcugcugcacaacgugaacgugggcaagagcaccaccaacaucaugaucaccaccaucaucaucgugaucaucgugauccugcugcugcugaucgccgugggccuguuccuguacugcaaggccagaugaggacuaguguccaccugucccuccugggcugcuggauugucucguuuuccugccaaauaaacaggaucagcgcuuuacagaucuaaaaaaaaaaaaaaaaaaaaaaaaaaaaaaaaaaaaaaaaaaaaaaaaaaaaaaaaaaaaaaaaugcaucccccccccccccccccccccccccccccccaaaggcucuuuucagagccaccagaauu

SEQ ID NO: 17467 - RNA, 1850 nt, Artificial Sequence
  mRNA product Design e-5 comprising derived and/or modified sequence from HRSV(Memphis-37)__AIY60640.1__F-del_DSCav1_mut5 (opt5)
gggagagcggcucggccauuuugucccagucaguccggaggcugcggcugcagaaguaccgccugcggaguaacugcaaagaagcuuaccauggagcugcccauccucaagaccaacgccauuacaacgauccuggcugccgugacccuuugcuucgcgagcucccagaauauuacagaagaguuuuaccaaucuaccuguagcgcugucuccaaaggcuaucugucugcccucagaacagggugguacaccagcguuaucacaauugaacuguccaacaucaaggagaauaaaugcaacggaaccgacgccaaggugaaacuuaucaagcaggaacuggauaaguauaaaaaugcugugacggagcuccagcugcugaugcagucuaccccugccgcuggcagcggguccgccauugcgagcggaaucgccgucuguaaggugcuccaccuggagggcgaaguuaacaaaauuaagaaugcccuucugucuacaaacaaagcuguggucucccucagcgggugcggagugucuguucugaccuucaaggugcuugaccugaagaauuacaucgauaaacaacuccugccgauucugaacaagcaguccuguagcaucucuaauauugagacagucaucgaauuucagcagaaaaacaaucggcuccuggagaucacccgcgaguucuccgugaacgcuggcgugacgacacccgucagcaccuauaugcuuacaaauuccgaacugcucucucugauuaacgacaugccuaucaccaacgaucaaaagaaacuuaugagcaauaacguucagauugugagacagcaguccuacagcaucaugugcauuaucaaggaggaagugcuggccuaugucgugcaacucccccuguacggcguuaucgacaccccuuguuggaaacugcauacaucuccccucugcacgaccaauacaaaggagggguccaacauuugucugacccggacagaucgcggaugguacugcgacaaugcgggcagcgugagcuuuuucccucaggccgaaaccuguaagguccagucuaacagaguguuuugcgauacgaugaacuccagaacacugccgucugagguuaaucucugcaauaucgacauuuucaaccccaaauaugauuguaagaucaugaccagcaaaaccgacguguccagcucugucauuacaucccugggggcuaucgugagcugcuacggaaagaccaaauguacagccucuaauaagugccggggcaucauuaagacguuuuccaacgggugugauuaugucagcaauaaaggaguggacaccguuuccgugggcaacacacuuuacuaugucaauaagcaagagggcaaaucucuguacgugaagggggaaccuaucauuaacuucuaugacccccucguuuuuccuagcgaugaguucgacgcuuccaucucucaggugaacgagaaaauuaaucagagccuggccuuuauccgcaaguccgaugaacugcuccacaacgucaaugugggaaagagcaccacaaacauuaugaucaccacgaucauuaucgugauuaucguuauucugcuucugcucaucgccgucggccuguuccuguacugcaaagcuagaugaggacuaguguccaccugucccuccugggcugcuggauugucucguuuuccugccaaauaaacaggaucagcgcuuuacagaucuaaaaaaaaaaaaaaaaaaaaaaaaaaaaaaaaaaaaaaaaaaaaaaaaaaaaaaaaaaaaaaaaugcaucccccccccccccccccccccccccccccccaaaggcucuuuucagagccaccagaauu

SEQ ID NO: 17468 - RNA, 1850 nt, Artificial Sequence
  mRNA product Design e-5 comprising derived and/or modified sequence from HRSV(Memphis-37)__AIY60640.1__F-del_DSCav1_mut5 (opt6)
gggagagcggcucggccauuuugucccagucaguccggaggcugcggcugcagaaguaccgccugcggaguaacugcaaagaagcuuaccauggaauuacccaucuuaaaaacaaaugcaauaacaacaauacuagcagccguaacauuaugcuucgccucaagccaaaacauaacagaagaauuuuaccaaagcacauguuccgccguaucaaaaggauaucucucagcacuacguacuggaugguauacauccguaaucacaauugaacuaucaaacauuaaagaaaacaaaugcaauggaacagaugcgaaaguaaaacuaauaaaacaagaauuagauaaauauaaaaaugcaguaaccgaacuacaacuacuaaugcaaucaacucccgcugccgguagcggauccgccauagcaagcggaauugcuguauguaaaguccuacaucuugaaggcgaagucaacaaaaucaaaaaugcauuacucucgaccaacaaagcagucguaucacuaucaggaugcggagucucaguauuaacuuuuaaaguccuugaccuaaaaaacuacauagacaaacaacuacuaccaauucuaaauaaacaaaguugcagcauauccaauaucgaaacaguuauagaauuucaacaaaaaaacaaccgccuacuagaaaucacuagagaauuuucaguaaaugcaggcguaaccacaccagucucuaccuauaugcuuaccaacucugaauuauuaucacuuauaaacgacaugcccauaacaaaugaucaaaaaaaacuaaugagcaacaacguacaaauaguaagacaacaaagcuacagcauuauguguauaauaaaagaagaaguguuagcuuauguaguccaacuaccccucuauggcguuaucgauacaccaugcuggaaauuacacacaagcccucuaugcacaacuaacaccaaagaaggcucuaacauaugcuuaacaagaacagauagaggaugguauugcgauaacgcaggaucaguaucauucuuuccacaagcagaaacauguaaaguacaaucuaaccgaguauucugcgacacaaugaacucuagaacacuacccucagaaguuaaucucuguaauauugacauuuucaauccaaaauacgauugcaaaauaaugaccucuaaaaccgacguaucauccucaguuauaacguccuuaggagcaaucguaagcugcuauggcaaaacaaaauguaccgcaucaaacaaaugcagaggaauaauaaaaacauucucaaacggcugugacuacguaagcaauaaagguguugacacaguuucaguaggaaauacacuauacuauguaaauaaacaagaaggaaaaucucucuauguaaaaggagaacccauaauaaacuucuacgacccacucguauuuccaagcgaugaauuugaugcgagcauuucccagguaaaugaaaaaauaaaucaaucacuagcauucaucagaaaaagugaugaauuacuacacaauguuaacguaggaaaaucaacaacaaauaucaugauaacaacaaucauaauagucauaaucguaauauuacuauuacuaauagcaguagguuuauuucuauacuguaaagcaagguaaggacuaguguccaccugucccuccugggcugcuggauugucucguuuuccugccaaauaaacaggaucagcgcuuuacagaucuaaaaaaaaaaaaaaaaaaaaaaaaaaaaaaaaaaaaaaaaaaaaaaaaaaaaaaaaaaaaaaaaugcaucccccccccccccccccccccccccccccccaaaggcucuuuucagagccaccagaauu

SEQ ID NO: 17469 - RNA, 1850 nt, Artificial Sequence
  mRNA product Design e-5 comprising derived and/or modified sequence from HRSV(Memphis-37)__AIY60640.1__F-del_DSCav1_mut5 (opt11)
gggagagcggcucggccauuuugucccagucaguccggaggcugcggcugcagaaguaccgccugcggaguaacugcaaagaagcuuaccauggaacuucccauccuaaaaaccaacgccauaacaacaauccucgcagcagucacccucugcuucgccucuucacaaaacaucaccgaagaauuuuaccaaucaaccugcuccgccguguccaaaggcuaccucucagcacugcgcacaggaugguauaccagcguaaucaccaucgaacucuccaacaucaaggaaaacaaaugcaacggcaccgaugccaaagucaaacucaucaagcaagaacuugacaaauacaaaaacgccgugaccgagcuacaacuccucaugcaguccacuccagccgccggcuccggcagcgccaucgccuccggcaucgccguaugcaaaguccuccaccucgaaggcgaaguaaacaaaaucaagaacgcacuccuaagcaccaacaaagccgucgucucacucuccgguugcggcgucagcguccuaacauucaaaguucucgaccucaaaaacuacauagacaaacaacuccuccccauccucaacaaacaauccugcuccauaucaaacaucgaaaccguuaucgaauuucaacaaaaaaacaaccgccuccuagaaaucacccgcgaauuuuccgucaacgcaggcgucaccacccccguuuccaccuauaugcucaccaacuccgaacuccucucccucaucaacgacaugcccauuaccaacgaccaaaagaaacuuaugagcaacaacguucaaaucguccgacaacaaucauacuccaucaugugcauuaucaaagaagaaguacucgccuacguaguacaauuaccccucuacggcguaaucgacaccccaugcuggaaacuacacaccuccccccucuguaccaccaacaccaaagaaggcucuaacaucugccucacccgcacagaccguggcugguauugcgauaacgcagggucugucuccuucuucccccaagccgaaacaugcaaaguccaauccaacagagucuucugcgacaccaugaacucgagaacccuccccuccgaagucaaccuaugcaacaucgacaucuucaacccaaaauacgacugcaaaaucaugacuucaaaaacagacgugagcucguccgucaucacaagccuaggagcuaucguauccugcuacggaaaaacaaaaugcacugcuuccaacaaaugccgcggaaucauaaaaaccuucuccaacggcugcgacuacgucagcaacaaaggcgucgacacagucuccguaggcaacacccuauacuacgucaauaaacaagaaggcaagucccuauaugucaaaggcgagcccaucaucaauuucuaugauccccucguuuucccauccgacgaauuugacgcauccaucucccaagucaacgaaaaaauaaaccaaagccucgcauucauccgcaaauccgacgaacuccuccacaacguaaacguaggaaaauccacaacuaacaucaugaucaccaccaucaucaucgucauuaucgucauccuacuccuccucauagcagucggccucuuccucuacugcaaagcacgcuagggacuaguguccaccugucccuccugggcugcuggauugucucguuuuccugccaaauaaacaggaucagcgcuuuacagaucuaaaaaaaaaaaaaaaaaaaaaaaaaaaaaaaaaaaaaaaaaaaaaaaaaaaaaaaaaaaaaaaaugcaucccccccccccccccccccccccccccccccaaaggcucuuuucagagccaccagaauu

SEQ ID NO: 17470 - RNA, 1917 nt, Artificial Sequence
  mRNA product Design e-6 comprising derived and/or modified sequence from HRSV(Memphis-37)__AIY60640.1__F-del_DSCav1_mut5 (opt1)
gggagagcggcucggccauuuugucccagucaguccggaggcugcggcugcagaaguaccgccugcggaguaacugcaaagaagcuuaccauggagcugcccauccucaagaccaacgccaucaccacgauccuggccgcggugacccugugcuucgccagcucccagaacaucaccgaggaguucuaccagagcacgugcuccgccgucagcaagggcuaccucuccgcccugcgcaccgggugguacaccagcgugaucaccaucgagcuguccaacaucaaggagaacaagugcaacggcaccgacgccaaggugaagcucaucaagcaggagcuggacaaguacaagaacgcggucacggagcugcagcuccugaugcagagcaccccggccgccggcuccgggagcgcgaucgccuccggcaucgccgucugcaaggugcugcaccucgagggcgaggugaacaagaucaagaacgcccugcuguccaccaacaaggccgucgugagccucuccggcugcggggugagcguccugaccuucaaggugcuggaccucaagaacuacaucgacaagcagcugcugcccauccugaacaagcagagcugcuccaucagcaacaucgagaccgucaucgaguuccagcagaagaacaaccgccuccuggagaucacgcgggaguucagcgugaacgcgggcgugaccacccccgucuccaccuacaugcugacgaacagcgagcuccugucccugaucaacgacaugccgaucaccaacgaccagaagaagcucaugagcaacaacgugcagaucgugcgccagcaguccuacagcaucaugugcaucaucaaggaggagguccuggccuacguggugcagcugccccucuacggggucaucgacacccccugcuggaagcugcacaccagcccccugugcacgaccaacaccaaggagggcuccaacaucugccucacccggacggaccgcgggugguacugcgacaacgccggcagcguguccuucuucccgcaggccgagaccugcaagguccagagcaaccggguguucugcgacaccaugaacucccggacccugcccagcgaggugaaccucugcaacaucgacaucuucaaccccaaguacgacugcaagaucaugacguccaagaccgacgucagcuccagcgugaucaccucccugggcgccaucgugagcugcuacgggaagaccaagugcacggcgagcaacaagugccgcggcaucaucaagaccuucuccaacgggugcgacuacgucagcaacaagggcguggacaccguguccgucggcaacacccuguacuacgugaacaagcaggagggcaagagccucuacgugaagggggagcccaucaucaacuucuacgacccgcuggucuuccccuccgacgaguucgacgccagcaucucccaggugaacgagaagaucaaccagagccuggccuucauccggaaguccgacgagcuccugcacaacgugaacgucggcaagagcaccacgaacaucaugaucaccaccaucaucaucgugaucaucgugauccugcugcuccugaucgccgucgggcuguuccucuacugcaaggcccgcugaggacuaguacuggcugcaucucccuuuccucuguccuccauccuucucccaggauggugaagggggaccugguacccagugauccccaccccaggauccuaaaucaugacuuaccugcuaauaaaaacucauuggaaaagugagaagaucuaaaaaaaaaaaaaaaaaaaaaaaaaaaaaaaaaaaaaaaaaaaaaaaaaaaaaaaaaaaaaaaaugcaucccccccccccccccccccccccccccccccaaaggcucuuuucagagccaccagaauu

SEQ ID NO: 17471 - RNA, 1917 nt, Artificial Sequence
  mRNA product Design e-6 comprising derived and/or modified sequence from HRSV(Memphis-37)__AIY60640.1__F-del_DSCav1_mut5 (opt1)
gggagagcggcucggccauuuugucccagucaguccggaggcugcggcugcagaaguaccgccugcggaguaacugcaaagaagcuuaccauggagcugcccauccucaagaccaacgccaucaccacgauccuggccgcggugacccugugcuucgccagcucccagaacaucaccgaggaguucuaccagagcacgugcuccgccgucagcaagggcuaccucuccgcccugcgcaccgggugguacaccagcgugaucaccaucgagcuguccaacaucaaggagaacaagugcaacggcaccgacgccaaggugaagcucaucaagcaggagcuggacaaguacaagaacgcggucacggagcugcagcuccugaugcagagcaccccggccgccggguccggcagcgccaucgcguccgggaucgccgugugcaaggugcugcaccucgagggcgaggucaacaagaucaagaacgcccugcugagcaccaacaaggccguggugucccucagcggcugcggggucuccgugcugaccuucaaggugcuggaccucaagaacuacaucgacaagcagcugcugcccauccucaacaagcagagcugcuccaucagcaacaucgagacggucaucgaguuccagcagaagaacaaccggcugcuggagaucacccgcgaguucuccgugaacgccggcgugaccacccccgucagcacguacaugcucaccaacagcgagcugcugucccucaucaacgacaugcccaucaccaacgaccagaagaagcugaugagcaacaacgugcagaucgugcggcagcaguccuacagcaucaugugcaucaucaaggaggagguccuggcguacguggugcagcucccgcuguacggggucaucgacacccccugcuggaagcugcacacgagcccccucugcaccaccaacaccaaggagggcuccaacaucugccugacgcgcaccgaccgggggugguacugcgacaacgccggcuccgugagcuucuucccccaggccgagaccugcaaggugcaguccaaccgcgucuucugcgacaccaugaacagccggacgcucccguccgaggugaaccugugcaacaucgacaucuucaaccccaaguacgacugcaagaucaugaccagcaagaccgacgucuccagcuccgugaucaccagccugggcgccaucguguccugcuacgggaagacgaagugcaccgccagcaacaagugccggggcaucaucaagaccuucuccaacgggugcgacuacgucagcaacaagggcguggacaccgugagcgucggcaacacgcucuacuacgugaacaagcaggaggggaagucccuguacgugaagggcgagcccaucaucaacuucuacgacccccuggucuucccgagcgacgaguucgacgcguccaucagccaggugaacgagaagaucaaccagucccucgccuucauccgcaagagcgacgagcugcugcacaacgugaacgucgggaaguccaccaccaacaucaugaucaccaccaucaucaucgugaucaucgugauccuccugcugcucaucgccgucggccuguuccuguacugcaaggcccggugaggacuaguacuggcugcaucucccuuuccucuguccuccauccuucucccaggauggugaagggggaccugguacccagugauccccaccccaggauccuaaaucaugacuuaccugcuaauaaaaacucauuggaaaagugagaagaucuaaaaaaaaaaaaaaaaaaaaaaaaaaaaaaaaaaaaaaaaaaaaaaaaaaaaaaaaaaaaaaaaugcaucccccccccccccccccccccccccccccccaaaggcucuuuucagagccaccagaauu

SEQ ID NO: 17472 - RNA, 1917 nt, Artificial Sequence
  mRNA product Design e-6 comprising derived and/or modified sequence from HRSV(Memphis-37)__AIY60640.1__F-del_DSCav1_mut5 (opt2)
gggagagcggcucggccauuuugucccagucaguccggaggcugcggcugcagaaguaccgccugcggaguaacugcaaagaagcuuaccauggagcuccccauccucaagaccaacgccaucaccaccauccucgccgccgucacccucugcuucgccuccucccagaacaucaccgaggaguucuaccaguccaccugcuccgccgucuccaagggcuaccucuccgcccuccgcaccggcugguacaccuccgucaucaccaucgagcucuccaacaucaaggagaacaagugcaacggcaccgacgccaaggucaagcucaucaagcaggagcucgacaaguacaagaacgccgucaccgagcuccagcuccucaugcaguccacccccgccgccggcuccggcuccgccaucgccuccggcaucgccgucugcaagguccuccaccucgagggcgaggucaacaagaucaagaacgcccuccucuccaccaacaaggccgucgucucccucuccggcugcggcgucuccguccucaccuucaagguccucgaccucaagaacuacaucgacaagcagcuccuccccauccucaacaagcaguccugcuccaucuccaacaucgagaccgucaucgaguuccagcagaagaacaaccgccuccucgagaucacccgcgaguucuccgucaacgccggcgucaccacccccgucuccaccuacaugcucaccaacuccgagcuccucucccucaucaacgacaugcccaucaccaacgaccagaagaagcucauguccaacaacguccagaucguccgccagcaguccuacuccaucaugugcaucaucaaggaggagguccucgccuacgucguccagcucccccucuacggcgucaucgacacccccugcuggaagcuccacaccuccccccucugcaccaccaacaccaaggagggcuccaacaucugccucacccgcaccgaccgcggcugguacugcgacaacgccggcuccgucuccuucuucccccaggccgagaccugcaagguccaguccaaccgcgucuucugcgacaccaugaacucccgcacccuccccuccgaggucaaccucugcaacaucgacaucuucaaccccaaguacgacugcaagaucaugaccuccaagaccgacgucuccuccuccgucaucaccucccucggcgccaucgucuccugcuacggcaagaccaagugcaccgccuccaacaagugccgcggcaucaucaagaccuucuccaacggcugcgacuacgucuccaacaagggcgucgacaccgucuccgucggcaacacccucuacuacgucaacaagcaggagggcaagucccucuacgucaagggcgagcccaucaucaacuucuacgacccccucgucuuccccuccgacgaguucgacgccuccaucucccaggucaacgagaagaucaaccagucccucgccuucauccgcaaguccgacgagcuccuccacaacgucaacgucggcaaguccaccaccaacaucaugaucaccaccaucaucaucgucaucaucgucauccuccuccuccucaucgccgucggccucuuccucuacugcaaggcccgcugaggacuaguacuggcugcaucucccuuuccucuguccuccauccuucucccaggauggugaagggggaccugguacccagugauccccaccccaggauccuaaaucaugacuuaccugcuaauaaaaacucauuggaaaagugagaagaucuaaaaaaaaaaaaaaaaaaaaaaaaaaaaaaaaaaaaaaaaaaaaaaaaaaaaaaaaaaaaaaaaugcaucccccccccccccccccccccccccccccccaaaggcucuuuucagagccaccagaauu

SEQ ID NO: 17473 - RNA, 1917 nt, Artificial Sequence
  mRNA product Design e-6 comprising derived and/or modified sequence from HRSV(Memphis-37)__AIY60640.1__F-del_DSCav1_mut5 (opt3)
gggagagcggcucggccauuuugucccagucaguccggaggcugcggcugcagaaguaccgccugcggaguaacugcaaagaagcuuaccauggagcugcccauccucaagaccaacgccauuacaacuauacuugcugcagugacgcugugcuucgccagcucccagaauaucaccgaagaguuuuaccaaucuacauguucagcggucaguaaaggcuauuugagcgcuuuaagaacugggugguacaccuccguuauuacaaucgaacugucuaacauuaaggagaauaaaugcaacggaaccgacgccaaggugaaacuaaucaagcaggaacucgauaaguauaaaaaugcaguaacugagcugcagcuucugaugcagucgaccccugccgcugguucaggcagcgcaauagccagugggaucgcuguguguaaggucuugcaccucgagggagaagugaacaaaauuaagaaugcccugcuguccacaaacaaagcgguugugucucucagcggcugcggugucuccguguuaacguucaagguacuggaccuuaagaauuacaucgauaaacaauugcugccaauucuaaacaagcagucauguaguaucagcaauauagagacuguuauugaauuucagcagaaaaacaauaggcuccuggagaucacccgggaguucucugugaacgcaggggucacaacuccgguguccaccuauaugcuuacaaauucagaacuguugagccucauuaacgacaugcccaucaccaacgaucaaaagaaacugaugaguaauaacgugcagaucguccgccagcagucuuacuccauuaugugcauaaucaaggaggaaguuuuagccuaugugguacaacugccucucuacggagugauugacacgccauguuggaaacuucauacuagcccccugugcacaaccaauacuaaggagggcucgaacaucuguuugacacgaaccgaucguggcugguacugcgacaaugcugggucugucuccuuuuucccucaggccgaaacguguaaggugcagucaaacagaguguuuugcgauaccaugaauaguagaacacugccaagcgaggugaaccucugcaauauagacauuuucaaccccaaauaugauuguaagaucaugacuuccaaaaccgacgucucuagcucagugaucacaagucugggagcaauuguauccugcuacgguaagacuaaauguaccgcuagcaauaagugcaggggcaucauuaagacauuuucuaacgggugugauuauguuucaaauaaaggaguggacaccgucagugugggcaacacucuuuacuaugucaauaagcaagaggguaaaagccuguacgugaagggggaaccuauaaucaacuucuaugacccauugguuuuuccguccgaugaguucgacgccucuauuucgcagguuaacgagaaaaucaaucagagccucgcguuuauccggaaguccgaugaacuguuacacaacguaaaugucggaaagucaacgacaaacauuaugauaaccacuaucauuaucgugauuaucguuauacugcuacuccugaucgccgugggccuuuucuuguacugcaaagcacgcugaggacuaguacuggcugcaucucccuuuccucuguccuccauccuucucccaggauggugaagggggaccugguacccagugauccccaccccaggauccuaaaucaugacuuaccugcuaauaaaaacucauuggaaaagugagaagaucuaaaaaaaaaaaaaaaaaaaaaaaaaaaaaaaaaaaaaaaaaaaaaaaaaaaaaaaaaaaaaaaaugcaucccccccccccccccccccccccccccccccaaaggcucuuuucagagccaccagaauu

SEQ ID NO: 17474 - RNA, 1917 nt, Artificial Sequence
  mRNA product Design e-6 comprising derived and/or modified sequence from HRSV(Memphis-37)__AIY60640.1__F-del_DSCav1_mut5 (opt4)
gggagagcggcucggccauuuugucccagucaguccggaggcugcggcugcagaaguaccgccugcggaguaacugcaaagaagcuuaccauggagcugcccauccugaagaccaacgccaucaccaccauccuggccgccgugacccugugcuucgccagcagccagaacaucaccgaggaguucuaccagagcaccugcagcgccgugagcaagggcuaccugagcgcccugagaaccggcugguacaccagcgugaucaccaucgagcugagcaacaucaaggagaacaagugcaacggcaccgacgccaaggugaagcugaucaagcaggagcuggacaaguacaagaacgccgugaccgagcugcagcugcugaugcagagcacccccgccgccggcagcggcagcgccaucgccagcggcaucgccgugugcaaggugcugcaccuggagggcgaggugaacaagaucaagaacgcccugcugagcaccaacaaggccguggugagccugagcggcugcggcgugagcgugcugaccuucaaggugcuggaccugaagaacuacaucgacaagcagcugcugcccauccugaacaagcagagcugcagcaucagcaacaucgagaccgugaucgaguuccagcagaagaacaacagacugcuggagaucaccagagaguucagcgugaacgccggcgugaccacccccgugagcaccuacaugcugaccaacagcgagcugcugagccugaucaacgacaugcccaucaccaacgaccagaagaagcugaugagcaacaacgugcagaucgugagacagcagagcuacagcaucaugugcaucaucaaggaggaggugcuggccuacguggugcagcugccccuguacggcgugaucgacacccccugcuggaagcugcacaccagcccccugugcaccaccaacaccaaggagggcagcaacaucugccugaccagaaccgacagaggcugguacugcgacaacgccggcagcgugagcuucuucccccaggccgagaccugcaaggugcagagcaacagaguguucugcgacaccaugaacagcagaacccugcccagcgaggugaaccugugcaacaucgacaucuucaaccccaaguacgacugcaagaucaugaccagcaagaccgacgugagcagcagcgugaucaccagccugggcgccaucgugagcugcuacggcaagaccaagugcaccgccagcaacaagugcagaggcaucaucaagaccuucagcaacggcugcgacuacgugagcaacaagggcguggacaccgugagcgugggcaacacccuguacuacgugaacaagcaggagggcaagagccuguacgugaagggcgagcccaucaucaacuucuacgacccccugguguuccccagcgacgaguucgacgccagcaucagccaggugaacgagaagaucaaccagagccuggccuucaucagaaagagcgacgagcugcugcacaacgugaacgugggcaagagcaccaccaacaucaugaucaccaccaucaucaucgugaucaucgugauccugcugcugcugaucgccgugggccuguuccuguacugcaaggccagaugaggacuaguacuggcugcaucucccuuuccucuguccuccauccuucucccaggauggugaagggggaccugguacccagugauccccaccccaggauccuaaaucaugacuuaccugcuaauaaaaacucauuggaaaagugagaagaucuaaaaaaaaaaaaaaaaaaaaaaaaaaaaaaaaaaaaaaaaaaaaaaaaaaaaaaaaaaaaaaaaugcaucccccccccccccccccccccccccccccccaaaggcucuuuucagagccaccagaauu

SEQ ID NO: 17475 - RNA, 1917 nt, Artificial Sequence
  mRNA product Design e-6 comprising derived and/or modified sequence from HRSV(Memphis-37)__AIY60640.1__F-del_DSCav1_mut5 (opt5)
gggagagcggcucggccauuuugucccagucaguccggaggcugcggcugcagaaguaccgccugcggaguaacugcaaagaagcuuaccauggagcugcccauccucaagaccaacgccauuacaacgauccuggcugccgugacccuuugcuucgcgagcucccagaauauuacagaagaguuuuaccaaucuaccuguagcgcugucuccaaaggcuaucugucugcccucagaacagggugguacaccagcguuaucacaauugaacuguccaacaucaaggagaauaaaugcaacggaaccgacgccaaggugaaacuuaucaagcaggaacuggauaaguauaaaaaugcugugacggagcuccagcugcugaugcagucuaccccugccgcuggcagcggguccgccauugcgagcggaaucgccgucuguaaggugcuccaccuggagggcgaaguuaacaaaauuaagaaugcccuucugucuacaaacaaagcuguggucucccucagcgggugcggagugucuguucugaccuucaaggugcuugaccugaagaauuacaucgauaaacaacuccugccgauucugaacaagcaguccuguagcaucucuaauauugagacagucaucgaauuucagcagaaaaacaaucggcuccuggagaucacccgcgaguucuccgugaacgcuggcgugacgacacccgucagcaccuauaugcuuacaaauuccgaacugcucucucugauuaacgacaugccuaucaccaacgaucaaaagaaacuuaugagcaauaacguucagauugugagacagcaguccuacagcaucaugugcauuaucaaggaggaagugcuggccuaugucgugcaacucccccuguacggcguuaucgacaccccuuguuggaaacugcauacaucuccccucugcacgaccaauacaaaggagggguccaacauuugucugacccggacagaucgcggaugguacugcgacaaugcgggcagcgugagcuuuuucccucaggccgaaaccuguaagguccagucuaacagaguguuuugcgauacgaugaacuccagaacacugccgucugagguuaaucucugcaauaucgacauuuucaaccccaaauaugauuguaagaucaugaccagcaaaaccgacguguccagcucugucauuacaucccugggggcuaucgugagcugcuacggaaagaccaaauguacagccucuaauaagugccggggcaucauuaagacguuuuccaacgggugugauuaugucagcaauaaaggaguggacaccguuuccgugggcaacacacuuuacuaugucaauaagcaagagggcaaaucucuguacgugaagggggaaccuaucauuaacuucuaugacccccucguuuuuccuagcgaugaguucgacgcuuccaucucucaggugaacgagaaaauuaaucagagccuggccuuuauccgcaaguccgaugaacugcuccacaacgucaaugugggaaagagcaccacaaacauuaugaucaccacgaucauuaucgugauuaucguuauucugcuucugcucaucgccgucggccuguuccuguacugcaaagcuagaugaggacuaguacuggcugcaucucccuuuccucuguccuccauccuucucccaggauggugaagggggaccugguacccagugauccccaccccaggauccuaaaucaugacuuaccugcuaauaaaaacucauuggaaaagugagaagaucuaaaaaaaaaaaaaaaaaaaaaaaaaaaaaaaaaaaaaaaaaaaaaaaaaaaaaaaaaaaaaaaaugcaucccccccccccccccccccccccccccccccaaaggcucuuuucagagccaccagaauu

SEQ ID NO: 17476 - RNA, 1917 nt, Artificial Sequence
  mRNA product Design e-6 comprising derived and/or modified sequence from HRSV(Memphis-37)__AIY60640.1__F-del_DSCav1_mut5 (opt6)
gggagagcggcucggccauuuugucccagucaguccggaggcugcggcugcagaaguaccgccugcggaguaacugcaaagaagcuuaccauggaauuacccaucuuaaaaacaaaugcaauaacaacaauacuagcagccguaacauuaugcuucgccucaagccaaaacauaacagaagaauuuuaccaaagcacauguuccgccguaucaaaaggauaucucucagcacuacguacuggaugguauacauccguaaucacaauugaacuaucaaacauuaaagaaaacaaaugcaauggaacagaugcgaaaguaaaacuaauaaaacaagaauuagauaaauauaaaaaugcaguaaccgaacuacaacuacuaaugcaaucaacucccgcugccgguagcggauccgccauagcaagcggaauugcuguauguaaaguccuacaucuugaaggcgaagucaacaaaaucaaaaaugcauuacucucgaccaacaaagcagucguaucacuaucaggaugcggagucucaguauuaacuuuuaaaguccuugaccuaaaaaacuacauagacaaacaacuacuaccaauucuaaauaaacaaaguugcagcauauccaauaucgaaacaguuauagaauuucaacaaaaaaacaaccgccuacuagaaaucacuagagaauuuucaguaaaugcaggcguaaccacaccagucucuaccuauaugcuuaccaacucugaauuauuaucacuuauaaacgacaugcccauaacaaaugaucaaaaaaaacuaaugagcaacaacguacaaauaguaagacaacaaagcuacagcauuauguguauaauaaaagaagaaguguuagcuuauguaguccaacuaccccucuauggcguuaucgauacaccaugcuggaaauuacacacaagcccucuaugcacaacuaacaccaaagaaggcucuaacauaugcuuaacaagaacagauagaggaugguauugcgauaacgcaggaucaguaucauucuuuccacaagcagaaacauguaaaguacaaucuaaccgaguauucugcgacacaaugaacucuagaacacuacccucagaaguuaaucucuguaauauugacauuuucaauccaaaauacgauugcaaaauaaugaccucuaaaaccgacguaucauccucaguuauaacguccuuaggagcaaucguaagcugcuauggcaaaacaaaauguaccgcaucaaacaaaugcagaggaauaauaaaaacauucucaaacggcugugacuacguaagcaauaaagguguugacacaguuucaguaggaaauacacuauacuauguaaauaaacaagaaggaaaaucucucuauguaaaaggagaacccauaauaaacuucuacgacccacucguauuuccaagcgaugaauuugaugcgagcauuucccagguaaaugaaaaaauaaaucaaucacuagcauucaucagaaaaagugaugaauuacuacacaauguuaacguaggaaaaucaacaacaaauaucaugauaacaacaaucauaauagucauaaucguaauauuacuauuacuaauagcaguagguuuauuucuauacuguaaagcaagguaaggacuaguacuggcugcaucucccuuuccucuguccuccauccuucucccaggauggugaagggggaccugguacccagugauccccaccccaggauccuaaaucaugacuuaccugcuaauaaaaacucauuggaaaagugagaagaucuaaaaaaaaaaaaaaaaaaaaaaaaaaaaaaaaaaaaaaaaaaaaaaaaaaaaaaaaaaaaaaaaugcaucccccccccccccccccccccccccccccccaaaggcucuuuucagagccaccagaauu

SEQ ID NO: 17477 - RNA, 1917 nt, Artificial Sequence
  mRNA product Design e-6 comprising derived and/or modified sequence from HRSV(Memphis-37)__AIY60640.1__F-del_DSCav1_mut5 (opt11)
gggagagcggcucggccauuuugucccagucaguccggaggcugcggcugcagaaguaccgccugcggaguaacugcaaagaagcuuaccauggaacuucccauccuaaaaaccaacgccauaacaacaauccucgcagcagucacccucugcuucgccucuucacaaaacaucaccgaagaauuuuaccaaucaaccugcuccgccguguccaaaggcuaccucucagcacugcgcacaggaugguauaccagcguaaucaccaucgaacucuccaacaucaaggaaaacaaaugcaacggcaccgaugccaaagucaaacucaucaagcaagaacuugacaaauacaaaaacgccgugaccgagcuacaacuccucaugcaguccacuccagccgccggcuccggcagcgccaucgccuccggcaucgccguaugcaaaguccuccaccucgaaggcgaaguaaacaaaaucaagaacgcacuccuaagcaccaacaaagccgucgucucacucuccgguugcggcgucagcguccuaacauucaaaguucucgaccucaaaaacuacauagacaaacaacuccuccccauccucaacaaacaauccugcuccauaucaaacaucgaaaccguuaucgaauuucaacaaaaaaacaaccgccuccuagaaaucacccgcgaauuuuccgucaacgcaggcgucaccacccccguuuccaccuauaugcucaccaacuccgaacuccucucccucaucaacgacaugcccauuaccaacgaccaaaagaaacuuaugagcaacaacguucaaaucguccgacaacaaucauacuccaucaugugcauuaucaaagaagaaguacucgccuacguaguacaauuaccccucuacggcguaaucgacaccccaugcuggaaacuacacaccuccccccucuguaccaccaacaccaaagaaggcucuaacaucugccucacccgcacagaccguggcugguauugcgauaacgcagggucugucuccuucuucccccaagccgaaacaugcaaaguccaauccaacagagucuucugcgacaccaugaacucgagaacccuccccuccgaagucaaccuaugcaacaucgacaucuucaacccaaaauacgacugcaaaaucaugacuucaaaaacagacgugagcucguccgucaucacaagccuaggagcuaucguauccugcuacggaaaaacaaaaugcacugcuuccaacaaaugccgcggaaucauaaaaaccuucuccaacggcugcgacuacgucagcaacaaaggcgucgacacagucuccguaggcaacacccuauacuacgucaauaaacaagaaggcaagucccuauaugucaaaggcgagcccaucaucaauuucuaugauccccucguuuucccauccgacgaauuugacgcauccaucucccaagucaacgaaaaaauaaaccaaagccucgcauucauccgcaaauccgacgaacuccuccacaacguaaacguaggaaaauccacaacuaacaucaugaucaccaccaucaucaucgucauuaucgucauccuacuccuccucauagcagucggccucuuccucuacugcaaagcacgcuagggacuaguacuggcugcaucucccuuuccucuguccuccauccuucucccaggauggugaagggggaccugguacccagugauccccaccccaggauccuaaaucaugacuuaccugcuaauaaaaacucauuggaaaagugagaagaucuaaaaaaaaaaaaaaaaaaaaaaaaaaaaaaaaaaaaaaaaaaaaaaaaaaaaaaaaaaaaaaaaugcaucccccccccccccccccccccccccccccccaaaggcucuuuucagagccaccagaauu

SEQ ID NO: 17478 - RNA, 2133 nt, Artificial Sequence
  mRNA product Design f-1 comprising derived and/or modified sequence from HRSV(Memphis-37)__AIY60640.1__F-del_DSCav1_mut5 (opt1)
gggagagcggcucggccauuuugucccagucaguccggaggcugcggcugcagaaguaccgccugcggaguaacugcaaagaagcuuaccauggagcugcccauccucaagaccaacgccaucaccacgauccuggccgcggugacccugugcuucgccagcucccagaacaucaccgaggaguucuaccagagcacgugcuccgccgucagcaagggcuaccucuccgcccugcgcaccgggugguacaccagcgugaucaccaucgagcuguccaacaucaaggagaacaagugcaacggcaccgacgccaaggugaagcucaucaagcaggagcuggacaaguacaagaacgcggucacggagcugcagcuccugaugcagagcaccccggccgccggcuccgggagcgcgaucgccuccggcaucgccgucugcaaggugcugcaccucgagggcgaggugaacaagaucaagaacgcccugcuguccaccaacaaggccgucgugagccucuccggcugcggggugagcguccugaccuucaaggugcuggaccucaagaacuacaucgacaagcagcugcugcccauccugaacaagcagagcugcuccaucagcaacaucgagaccgucaucgaguuccagcagaagaacaaccgccuccuggagaucacgcgggaguucagcgugaacgcgggcgugaccacccccgucuccaccuacaugcugacgaacagcgagcuccugucccugaucaacgacaugccgaucaccaacgaccagaagaagcucaugagcaacaacgugcagaucgugcgccagcaguccuacagcaucaugugcaucaucaaggaggagguccuggccuacguggugcagcugccccucuacggggucaucgacacccccugcuggaagcugcacaccagcccccugugcacgaccaacaccaaggagggcuccaacaucugccucacccggacggaccgcgggugguacugcgacaacgccggcagcguguccuucuucccgcaggccgagaccugcaagguccagagcaaccggguguucugcgacaccaugaacucccggacccugcccagcgaggugaaccucugcaacaucgacaucuucaaccccaaguacgacugcaagaucaugacguccaagaccgacgucagcuccagcgugaucaccucccugggcgccaucgugagcugcuacgggaagaccaagugcacggcgagcaacaagugccgcggcaucaucaagaccuucuccaacgggugcgacuacgucagcaacaagggcguggacaccguguccgucggcaacacccuguacuacgugaacaagcaggagggcaagagccucuacgugaagggggagcccaucaucaacuucuacgacccgcuggucuuccccuccgacgaguucgacgccagcaucucccaggugaacgagaagaucaaccagagccuggccuucauccggaaguccgacgagcuccugcacaacgugaacgucggcaagagcaccacgaacaucaugaucaccaccaucaucaucgugaucaucgugauccugcugcuccugaucgccgucgggcuguuccucuacugcaaggcccgcugaggacuagugaagggaacacccaaauuuaauucagccuuaagcacaauuaauuaagagugaaacguaauuguacaagcaguuggucacccaccauagggcaugaucaacaccgcaaccuuuccuuuuucccccagugauucugaaaaaccccucuucccuucagcuugcuuagauguuccaaauuuaguaagcuuaaggcggccuacagaagaaaaagaaaaaaaaggccacaaaaguucccucucacuuucaguaaauaaaauaaaagcagcaacagaaauaaagaaauaaaugaaauucaaaaugaaauaaauauuguguugugcagcauuaaaaaaucaauaaaaauuaaaaaugagcaagaucuaaaaaaaaaaaaaaaaaaaaaaaaaaaaaaaaaaaaaaaaaaaaaaaaaaaaaaaaaaaaaaaaugcaucccccccccccccccccccccccccccccccaaaggcucuuuucagagccaccagaauu

SEQ ID NO: 17479 - RNA, 2133 nt, Artificial Sequence
  mRNA product Design f-1 comprising derived and/or modified sequence from HRSV(Memphis-37)__AIY60640.1__F-del_DSCav1_mut5 (opt1)
gggagagcggcucggccauuuugucccagucaguccggaggcugcggcugcagaaguaccgccugcggaguaacugcaaagaagcuuaccauggagcugcccauccucaagaccaacgccaucaccacgauccuggccgcggugacccugugcuucgccagcucccagaacaucaccgaggaguucuaccagagcacgugcuccgccgucagcaagggcuaccucuccgcccugcgcaccgggugguacaccagcgugaucaccaucgagcuguccaacaucaaggagaacaagugcaacggcaccgacgccaaggugaagcucaucaagcaggagcuggacaaguacaagaacgcggucacggagcugcagcuccugaugcagagcaccccggccgccggguccggcagcgccaucgcguccgggaucgccgugugcaaggugcugcaccucgagggcgaggucaacaagaucaagaacgcccugcugagcaccaacaaggccguggugucccucagcggcugcggggucuccgugcugaccuucaaggugcuggaccucaagaacuacaucgacaagcagcugcugcccauccucaacaagcagagcugcuccaucagcaacaucgagacggucaucgaguuccagcagaagaacaaccggcugcuggagaucacccgcgaguucuccgugaacgccggcgugaccacccccgucagcacguacaugcucaccaacagcgagcugcugucccucaucaacgacaugcccaucaccaacgaccagaagaagcugaugagcaacaacgugcagaucgugcggcagcaguccuacagcaucaugugcaucaucaaggaggagguccuggcguacguggugcagcucccgcuguacggggucaucgacacccccugcuggaagcugcacacgagcccccucugcaccaccaacaccaaggagggcuccaacaucugccugacgcgcaccgaccgggggugguacugcgacaacgccggcuccgugagcuucuucccccaggccgagaccugcaaggugcaguccaaccgcgucuucugcgacaccaugaacagccggacgcucccguccgaggugaaccugugcaacaucgacaucuucaaccccaaguacgacugcaagaucaugaccagcaagaccgacgucuccagcuccgugaucaccagccugggcgccaucguguccugcuacgggaagacgaagugcaccgccagcaacaagugccggggcaucaucaagaccuucuccaacgggugcgacuacgucagcaacaagggcguggacaccgugagcgucggcaacacgcucuacuacgugaacaagcaggaggggaagucccuguacgugaagggcgagcccaucaucaacuucuacgacccccuggucuucccgagcgacgaguucgacgcguccaucagccaggugaacgagaagaucaaccagucccucgccuucauccgcaagagcgacgagcugcugcacaacgugaacgucgggaaguccaccaccaacaucaugaucaccaccaucaucaucgugaucaucgugauccuccugcugcucaucgccgucggccuguuccuguacugcaaggcccggugaggacuagugaagggaacacccaaauuuaauucagccuuaagcacaauuaauuaagagugaaacguaauuguacaagcaguuggucacccaccauagggcaugaucaacaccgcaaccuuuccuuuuucccccagugauucugaaaaaccccucuucccuucagcuugcuuagauguuccaaauuuaguaagcuuaaggcggccuacagaagaaaaagaaaaaaaaggccacaaaaguucccucucacuuucaguaaauaaaauaaaagcagcaacagaaauaaagaaauaaaugaaauucaaaaugaaauaaauauuguguugugcagcauuaaaaaaucaauaaaaauuaaaaaugagcaagaucuaaaaaaaaaaaaaaaaaaaaaaaaaaaaaaaaaaaaaaaaaaaaaaaaaaaaaaaaaaaaaaaaugcaucccccccccccccccccccccccccccccccaaaggcucuuuucagagccaccagaauu

SEQ ID NO: 17480 - RNA, 2133 nt, Artificial Sequence
  mRNA product Design f-1 comprising derived and/or modified sequence from HRSV(Memphis-37)__AIY60640.1__F-del_DSCav1_mut5 (opt2)
gggagagcggcucggccauuuugucccagucaguccggaggcugcggcugcagaaguaccgccugcggaguaacugcaaagaagcuuaccauggagcuccccauccucaagaccaacgccaucaccaccauccucgccgccgucacccucugcuucgccuccucccagaacaucaccgaggaguucuaccaguccaccugcuccgccgucuccaagggcuaccucuccgcccuccgcaccggcugguacaccuccgucaucaccaucgagcucuccaacaucaaggagaacaagugcaacggcaccgacgccaaggucaagcucaucaagcaggagcucgacaaguacaagaacgccgucaccgagcuccagcuccucaugcaguccacccccgccgccggcuccggcuccgccaucgccuccggcaucgccgucugcaagguccuccaccucgagggcgaggucaacaagaucaagaacgcccuccucuccaccaacaaggccgucgucucccucuccggcugcggcgucuccguccucaccuucaagguccucgaccucaagaacuacaucgacaagcagcuccuccccauccucaacaagcaguccugcuccaucuccaacaucgagaccgucaucgaguuccagcagaagaacaaccgccuccucgagaucacccgcgaguucuccgucaacgccggcgucaccacccccgucuccaccuacaugcucaccaacuccgagcuccucucccucaucaacgacaugcccaucaccaacgaccagaagaagcucauguccaacaacguccagaucguccgccagcaguccuacuccaucaugugcaucaucaaggaggagguccucgccuacgucguccagcucccccucuacggcgucaucgacacccccugcuggaagcuccacaccuccccccucugcaccaccaacaccaaggagggcuccaacaucugccucacccgcaccgaccgcggcugguacugcgacaacgccggcuccgucuccuucuucccccaggccgagaccugcaagguccaguccaaccgcgucuucugcgacaccaugaacucccgcacccuccccuccgaggucaaccucugcaacaucgacaucuucaaccccaaguacgacugcaagaucaugaccuccaagaccgacgucuccuccuccgucaucaccucccucggcgccaucgucuccugcuacggcaagaccaagugcaccgccuccaacaagugccgcggcaucaucaagaccuucuccaacggcugcgacuacgucuccaacaagggcgucgacaccgucuccgucggcaacacccucuacuacgucaacaagcaggagggcaagucccucuacgucaagggcgagcccaucaucaacuucuacgacccccucgucuuccccuccgacgaguucgacgccuccaucucccaggucaacgagaagaucaaccagucccucgccuucauccgcaaguccgacgagcuccuccacaacgucaacgucggcaaguccaccaccaacaucaugaucaccaccaucaucaucgucaucaucgucauccuccuccuccucaucgccgucggccucuuccucuacugcaaggcccgcugaggacuagugaagggaacacccaaauuuaauucagccuuaagcacaauuaauuaagagugaaacguaauuguacaagcaguuggucacccaccauagggcaugaucaacaccgcaaccuuuccuuuuucccccagugauucugaaaaaccccucuucccuucagcuugcuuagauguuccaaauuuaguaagcuuaaggcggccuacagaagaaaaagaaaaaaaaggccacaaaaguucccucucacuuucaguaaauaaaauaaaagcagcaacagaaauaaagaaauaaaugaaauucaaaaugaaauaaauauuguguugugcagcauuaaaaaaucaauaaaaauuaaaaaugagcaagaucuaaaaaaaaaaaaaaaaaaaaaaaaaaaaaaaaaaaaaaaaaaaaaaaaaaaaaaaaaaaaaaaaugcaucccccccccccccccccccccccccccccccaaaggcucuuuucagagccaccagaauu

SEQ ID NO: 17481 - RNA, 2133 nt, Artificial Sequence
  mRNA product Design f-1 comprising derived and/or modified sequence from HRSV(Memphis-37)__AIY60640.1__F-del_DSCav1_mut5 (opt3)
gggagagcggcucggccauuuugucccagucaguccggaggcugcggcugcagaaguaccgccugcggaguaacugcaaagaagcuuaccauggagcugcccauccucaagaccaacgccauuacaacuauacuugcugcagugacgcugugcuucgccagcucccagaauaucaccgaagaguuuuaccaaucuacauguucagcggucaguaaaggcuauuugagcgcuuuaagaacugggugguacaccuccguuauuacaaucgaacugucuaacauuaaggagaauaaaugcaacggaaccgacgccaaggugaaacuaaucaagcaggaacucgauaaguauaaaaaugcaguaacugagcugcagcuucugaugcagucgaccccugccgcugguucaggcagcgcaauagccagugggaucgcuguguguaaggucuugcaccucgagggagaagugaacaaaauuaagaaugcccugcuguccacaaacaaagcgguugugucucucagcggcugcggugucuccguguuaacguucaagguacuggaccuuaagaauuacaucgauaaacaauugcugccaauucuaaacaagcagucauguaguaucagcaauauagagacuguuauugaauuucagcagaaaaacaauaggcuccuggagaucacccgggaguucucugugaacgcaggggucacaacuccgguguccaccuauaugcuuacaaauucagaacuguugagccucauuaacgacaugcccaucaccaacgaucaaaagaaacugaugaguaauaacgugcagaucguccgccagcagucuuacuccauuaugugcauaaucaaggaggaaguuuuagccuaugugguacaacugccucucuacggagugauugacacgccauguuggaaacuucauacuagcccccugugcacaaccaauacuaaggagggcucgaacaucuguuugacacgaaccgaucguggcugguacugcgacaaugcugggucugucuccuuuuucccucaggccgaaacguguaaggugcagucaaacagaguguuuugcgauaccaugaauaguagaacacugccaagcgaggugaaccucugcaauauagacauuuucaaccccaaauaugauuguaagaucaugacuuccaaaaccgacgucucuagcucagugaucacaagucugggagcaauuguauccugcuacgguaagacuaaauguaccgcuagcaauaagugcaggggcaucauuaagacauuuucuaacgggugugauuauguuucaaauaaaggaguggacaccgucagugugggcaacacucuuuacuaugucaauaagcaagaggguaaaagccuguacgugaagggggaaccuauaaucaacuucuaugacccauugguuuuuccguccgaugaguucgacgccucuauuucgcagguuaacgagaaaaucaaucagagccucgcguuuauccggaaguccgaugaacuguuacacaacguaaaugucggaaagucaacgacaaacauuaugauaaccacuaucauuaucgugauuaucguuauacugcuacuccugaucgccgugggccuuuucuuguacugcaaagcacgcugaggacuagugaagggaacacccaaauuuaauucagccuuaagcacaauuaauuaagagugaaacguaauuguacaagcaguuggucacccaccauagggcaugaucaacaccgcaaccuuuccuuuuucccccagugauucugaaaaaccccucuucccuucagcuugcuuagauguuccaaauuuaguaagcuuaaggcggccuacagaagaaaaagaaaaaaaaggccacaaaaguucccucucacuuucaguaaauaaaauaaaagcagcaacagaaauaaagaaauaaaugaaauucaaaaugaaauaaauauuguguugugcagcauuaaaaaaucaauaaaaauuaaaaaugagcaagaucuaaaaaaaaaaaaaaaaaaaaaaaaaaaaaaaaaaaaaaaaaaaaaaaaaaaaaaaaaaaaaaaaugcaucccccccccccccccccccccccccccccccaaaggcucuuuucagagccaccagaauu

SEQ ID NO: 17482 - RNA, 2133 nt, Artificial Sequence
  mRNA product Design f-1 comprising derived and/or modified sequence from HRSV(Memphis-37)__AIY60640.1__F-del_DSCav1_mut5 (opt4)
gggagagcggcucggccauuuugucccagucaguccggaggcugcggcugcagaaguaccgccugcggaguaacugcaaagaagcuuaccauggagcugcccauccugaagaccaacgccaucaccaccauccuggccgccgugacccugugcuucgccagcagccagaacaucaccgaggaguucuaccagagcaccugcagcgccgugagcaagggcuaccugagcgcccugagaaccggcugguacaccagcgugaucaccaucgagcugagcaacaucaaggagaacaagugcaacggcaccgacgccaaggugaagcugaucaagcaggagcuggacaaguacaagaacgccgugaccgagcugcagcugcugaugcagagcacccccgccgccggcagcggcagcgccaucgccagcggcaucgccgugugcaaggugcugcaccuggagggcgaggugaacaagaucaagaacgcccugcugagcaccaacaaggccguggugagccugagcggcugcggcgugagcgugcugaccuucaaggugcuggaccugaagaacuacaucgacaagcagcugcugcccauccugaacaagcagagcugcagcaucagcaacaucgagaccgugaucgaguuccagcagaagaacaacagacugcuggagaucaccagagaguucagcgugaacgccggcgugaccacccccgugagcaccuacaugcugaccaacagcgagcugcugagccugaucaacgacaugcccaucaccaacgaccagaagaagcugaugagcaacaacgugcagaucgugagacagcagagcuacagcaucaugugcaucaucaaggaggaggugcuggccuacguggugcagcugccccuguacggcgugaucgacacccccugcuggaagcugcacaccagcccccugugcaccaccaacaccaaggagggcagcaacaucugccugaccagaaccgacagaggcugguacugcgacaacgccggcagcgugagcuucuucccccaggccgagaccugcaaggugcagagcaacagaguguucugcgacaccaugaacagcagaacccugcccagcgaggugaaccugugcaacaucgacaucuucaaccccaaguacgacugcaagaucaugaccagcaagaccgacgugagcagcagcgugaucaccagccugggcgccaucgugagcugcuacggcaagaccaagugcaccgccagcaacaagugcagaggcaucaucaagaccuucagcaacggcugcgacuacgugagcaacaagggcguggacaccgugagcgugggcaacacccuguacuacgugaacaagcaggagggcaagagccuguacgugaagggcgagcccaucaucaacuucuacgacccccugguguuccccagcgacgaguucgacgccagcaucagccaggugaacgagaagaucaaccagagccuggccuucaucagaaagagcgacgagcugcugcacaacgugaacgugggcaagagcaccaccaacaucaugaucaccaccaucaucaucgugaucaucgugauccugcugcugcugaucgccgugggccuguuccuguacugcaaggccagaugaggacuagugaagggaacacccaaauuuaauucagccuuaagcacaauuaauuaagagugaaacguaauuguacaagcaguuggucacccaccauagggcaugaucaacaccgcaaccuuuccuuuuucccccagugauucugaaaaaccccucuucccuucagcuugcuuagauguuccaaauuuaguaagcuuaaggcggccuacagaagaaaaagaaaaaaaaggccacaaaaguucccucucacuuucaguaaauaaaauaaaagcagcaacagaaauaaagaaauaaaugaaauucaaaaugaaauaaauauuguguugugcagcauuaaaaaaucaauaaaaauuaaaaaugagcaagaucuaaaaaaaaaaaaaaaaaaaaaaaaaaaaaaaaaaaaaaaaaaaaaaaaaaaaaaaaaaaaaaaaugcaucccccccccccccccccccccccccccccccaaaggcucuuuucagagccaccagaauu

SEQ ID NO: 17483 - RNA, 2133 nt, Artificial Sequence
  mRNA product Design f-1 comprising derived and/or modified sequence from HRSV(Memphis-37)__AIY60640.1__F-del_DSCav1_mut5 (opt5)
gggagagcggcucggccauuuugucccagucaguccggaggcugcggcugcagaaguaccgccugcggaguaacugcaaagaagcuuaccauggagcugcccauccucaagaccaacgccauuacaacgauccuggcugccgugacccuuugcuucgcgagcucccagaauauuacagaagaguuuuaccaaucuaccuguagcgcugucuccaaaggcuaucugucugcccucagaacagggugguacaccagcguuaucacaauugaacuguccaacaucaaggagaauaaaugcaacggaaccgacgccaaggugaaacuuaucaagcaggaacuggauaaguauaaaaaugcugugacggagcuccagcugcugaugcagucuaccccugccgcuggcagcggguccgccauugcgagcggaaucgccgucuguaaggugcuccaccuggagggcgaaguuaacaaaauuaagaaugcccuucugucuacaaacaaagcuguggucucccucagcgggugcggagugucuguucugaccuucaaggugcuugaccugaagaauuacaucgauaaacaacuccugccgauucugaacaagcaguccuguagcaucucuaauauugagacagucaucgaauuucagcagaaaaacaaucggcuccuggagaucacccgcgaguucuccgugaacgcuggcgugacgacacccgucagcaccuauaugcuuacaaauuccgaacugcucucucugauuaacgacaugccuaucaccaacgaucaaaagaaacuuaugagcaauaacguucagauugugagacagcaguccuacagcaucaugugcauuaucaaggaggaagugcuggccuaugucgugcaacucccccuguacggcguuaucgacaccccuuguuggaaacugcauacaucuccccucugcacgaccaauacaaaggagggguccaacauuugucugacccggacagaucgcggaugguacugcgacaaugcgggcagcgugagcuuuuucccucaggccgaaaccuguaagguccagucuaacagaguguuuugcgauacgaugaacuccagaacacugccgucugagguuaaucucugcaauaucgacauuuucaaccccaaauaugauuguaagaucaugaccagcaaaaccgacguguccagcucugucauuacaucccugggggcuaucgugagcugcuacggaaagaccaaauguacagccucuaauaagugccggggcaucauuaagacguuuuccaacgggugugauuaugucagcaauaaaggaguggacaccguuuccgugggcaacacacuuuacuaugucaauaagcaagagggcaaaucucuguacgugaagggggaaccuaucauuaacuucuaugacccccucguuuuuccuagcgaugaguucgacgcuuccaucucucaggugaacgagaaaauuaaucagagccuggccuuuauccgcaaguccgaugaacugcuccacaacgucaaugugggaaagagcaccacaaacauuaugaucaccacgaucauuaucgugauuaucguuauucugcuucugcucaucgccgucggccuguuccuguacugcaaagcuagaugaggacuagugaagggaacacccaaauuuaauucagccuuaagcacaauuaauuaagagugaaacguaauuguacaagcaguuggucacccaccauagggcaugaucaacaccgcaaccuuuccuuuuucccccagugauucugaaaaaccccucuucccuucagcuugcuuagauguuccaaauuuaguaagcuuaaggcggccuacagaagaaaaagaaaaaaaaggccacaaaaguucccucucacuuucaguaaauaaaauaaaagcagcaacagaaauaaagaaauaaaugaaauucaaaaugaaauaaauauuguguugugcagcauuaaaaaaucaauaaaaauuaaaaaugagcaagaucuaaaaaaaaaaaaaaaaaaaaaaaaaaaaaaaaaaaaaaaaaaaaaaaaaaaaaaaaaaaaaaaaugcaucccccccccccccccccccccccccccccccaaaggcucuuuucagagccaccagaauu

SEQ ID NO: 17484 - RNA, 2133 nt, Artificial Sequence
  mRNA product Design f-1 comprising derived and/or modified sequence from HRSV(Memphis-37)__AIY60640.1__F-del_DSCav1_mut5 (opt6)
gggagagcggcucggccauuuugucccagucaguccggaggcugcggcugcagaaguaccgccugcggaguaacugcaaagaagcuuaccauggaauuacccaucuuaaaaacaaaugcaauaacaacaauacuagcagccguaacauuaugcuucgccucaagccaaaacauaacagaagaauuuuaccaaagcacauguuccgccguaucaaaaggauaucucucagcacuacguacuggaugguauacauccguaaucacaauugaacuaucaaacauuaaagaaaacaaaugcaauggaacagaugcgaaaguaaaacuaauaaaacaagaauuagauaaauauaaaaaugcaguaaccgaacuacaacuacuaaugcaaucaacucccgcugccgguagcggauccgccauagcaagcggaauugcuguauguaaaguccuacaucuugaaggcgaagucaacaaaaucaaaaaugcauuacucucgaccaacaaagcagucguaucacuaucaggaugcggagucucaguauuaacuuuuaaaguccuugaccuaaaaaacuacauagacaaacaacuacuaccaauucuaaauaaacaaaguugcagcauauccaauaucgaaacaguuauagaauuucaacaaaaaaacaaccgccuacuagaaaucacuagagaauuuucaguaaaugcaggcguaaccacaccagucucuaccuauaugcuuaccaacucugaauuauuaucacuuauaaacgacaugcccauaacaaaugaucaaaaaaaacuaaugagcaacaacguacaaauaguaagacaacaaagcuacagcauuauguguauaauaaaagaagaaguguuagcuuauguaguccaacuaccccucuauggcguuaucgauacaccaugcuggaaauuacacacaagcccucuaugcacaacuaacaccaaagaaggcucuaacauaugcuuaacaagaacagauagaggaugguauugcgauaacgcaggaucaguaucauucuuuccacaagcagaaacauguaaaguacaaucuaaccgaguauucugcgacacaaugaacucuagaacacuacccucagaaguuaaucucuguaauauugacauuuucaauccaaaauacgauugcaaaauaaugaccucuaaaaccgacguaucauccucaguuauaacguccuuaggagcaaucguaagcugcuauggcaaaacaaaauguaccgcaucaaacaaaugcagaggaauaauaaaaacauucucaaacggcugugacuacguaagcaauaaagguguugacacaguuucaguaggaaauacacuauacuauguaaauaaacaagaaggaaaaucucucuauguaaaaggagaacccauaauaaacuucuacgacccacucguauuuccaagcgaugaauuugaugcgagcauuucccagguaaaugaaaaaauaaaucaaucacuagcauucaucagaaaaagugaugaauuacuacacaauguuaacguaggaaaaucaacaacaaauaucaugauaacaacaaucauaauagucauaaucguaauauuacuauuacuaauagcaguagguuuauuucuauacuguaaagcaagguaaggacuagugaagggaacacccaaauuuaauucagccuuaagcacaauuaauuaagagugaaacguaauuguacaagcaguuggucacccaccauagggcaugaucaacaccgcaaccuuuccuuuuucccccagugauucugaaaaaccccucuucccuucagcuugcuuagauguuccaaauuuaguaagcuuaaggcggccuacagaagaaaaagaaaaaaaaggccacaaaaguucccucucacuuucaguaaauaaaauaaaagcagcaacagaaauaaagaaauaaaugaaauucaaaaugaaauaaauauuguguugugcagcauuaaaaaaucaauaaaaauuaaaaaugagcaagaucuaaaaaaaaaaaaaaaaaaaaaaaaaaaaaaaaaaaaaaaaaaaaaaaaaaaaaaaaaaaaaaaaugcaucccccccccccccccccccccccccccccccaaaggcucuuuucagagccaccagaauu

SEQ ID NO: 17485 - RNA, 2133 nt, Artificial Sequence
  mRNA product Design f-1 comprising derived and/or modified sequence from HRSV(Memphis-37)__AIY60640.1__F-del_DSCav1_mut5 (opt11)
gggagagcggcucggccauuuugucccagucaguccggaggcugcggcugcagaaguaccgccugcggaguaacugcaaagaagcuuaccauggaacuucccauccuaaaaaccaacgccauaacaacaauccucgcagcagucacccucugcuucgccucuucacaaaacaucaccgaagaauuuuaccaaucaaccugcuccgccguguccaaaggcuaccucucagcacugcgcacaggaugguauaccagcguaaucaccaucgaacucuccaacaucaaggaaaacaaaugcaacggcaccgaugccaaagucaaacucaucaagcaagaacuugacaaauacaaaaacgccgugaccgagcuacaacuccucaugcaguccacuccagccgccggcuccggcagcgccaucgccuccggcaucgccguaugcaaaguccuccaccucgaaggcgaaguaaacaaaaucaagaacgcacuccuaagcaccaacaaagccgucgucucacucuccgguugcggcgucagcguccuaacauucaaaguucucgaccucaaaaacuacauagacaaacaacuccuccccauccucaacaaacaauccugcuccauaucaaacaucgaaaccguuaucgaauuucaacaaaaaaacaaccgccuccuagaaaucacccgcgaauuuuccgucaacgcaggcgucaccacccccguuuccaccuauaugcucaccaacuccgaacuccucucccucaucaacgacaugcccauuaccaacgaccaaaagaaacuuaugagcaacaacguucaaaucguccgacaacaaucauacuccaucaugugcauuaucaaagaagaaguacucgccuacguaguacaauuaccccucuacggcguaaucgacaccccaugcuggaaacuacacaccuccccccucuguaccaccaacaccaaagaaggcucuaacaucugccucacccgcacagaccguggcugguauugcgauaacgcagggucugucuccuucuucccccaagccgaaacaugcaaaguccaauccaacagagucuucugcgacaccaugaacucgagaacccuccccuccgaagucaaccuaugcaacaucgacaucuucaacccaaaauacgacugcaaaaucaugacuucaaaaacagacgugagcucguccgucaucacaagccuaggagcuaucguauccugcuacggaaaaacaaaaugcacugcuuccaacaaaugccgcggaaucauaaaaaccuucuccaacggcugcgacuacgucagcaacaaaggcgucgacacagucuccguaggcaacacccuauacuacgucaauaaacaagaaggcaagucccuauaugucaaaggcgagcccaucaucaauuucuaugauccccucguuuucccauccgacgaauuugacgcauccaucucccaagucaacgaaaaaauaaaccaaagccucgcauucauccgcaaauccgacgaacuccuccacaacguaaacguaggaaaauccacaacuaacaucaugaucaccaccaucaucaucgucauuaucgucauccuacuccuccucauagcagucggccucuuccucuacugcaaagcacgcuagggacuagugaagggaacacccaaauuuaauucagccuuaagcacaauuaauuaagagugaaacguaauuguacaagcaguuggucacccaccauagggcaugaucaacaccgcaaccuuuccuuuuucccccagugauucugaaaaaccccucuucccuucagcuugcuuagauguuccaaauuuaguaagcuuaaggcggccuacagaagaaaaagaaaaaaaaggccacaaaaguucccucucacuuucaguaaauaaaauaaaagcagcaacagaaauaaagaaauaaaugaaauucaaaaugaaauaaauauuguguugugcagcauuaaaaaaucaauaaaaauuaaaaaugagcaagaucuaaaaaaaaaaaaaaaaaaaaaaaaaaaaaaaaaaaaaaaaaaaaaaaaaaaaaaaaaaaaaaaaugcaucccccccccccccccccccccccccccccccaaaggcucuuuucagagccaccagaauu

SEQ ID NO: 17486 - RNA, 1913 nt, Artificial Sequence
  mRNA product Design f-2 comprising derived and/or modified sequence from HRSV(Memphis-37)__AIY60640.1__F-del_DSCav1_mut5 (opt1)
gggagagcggcucggccauuuugucccagucaguccggaggcugcggcugcagaaguaccgccugcggaguaacugcaaagaagcuuaccauggagcugcccauccucaagaccaacgccaucaccacgauccuggccgcggugacccugugcuucgccagcucccagaacaucaccgaggaguucuaccagagcacgugcuccgccgucagcaagggcuaccucuccgcccugcgcaccgggugguacaccagcgugaucaccaucgagcuguccaacaucaaggagaacaagugcaacggcaccgacgccaaggugaagcucaucaagcaggagcuggacaaguacaagaacgcggucacggagcugcagcuccugaugcagagcaccccggccgccggcuccgggagcgcgaucgccuccggcaucgccgucugcaaggugcugcaccucgagggcgaggugaacaagaucaagaacgcccugcuguccaccaacaaggccgucgugagccucuccggcugcggggugagcguccugaccuucaaggugcuggaccucaagaacuacaucgacaagcagcugcugcccauccugaacaagcagagcugcuccaucagcaacaucgagaccgucaucgaguuccagcagaagaacaaccgccuccuggagaucacgcgggaguucagcgugaacgcgggcgugaccacccccgucuccaccuacaugcugacgaacagcgagcuccugucccugaucaacgacaugccgaucaccaacgaccagaagaagcucaugagcaacaacgugcagaucgugcgccagcaguccuacagcaucaugugcaucaucaaggaggagguccuggccuacguggugcagcugccccucuacggggucaucgacacccccugcuggaagcugcacaccagcccccugugcacgaccaacaccaaggagggcuccaacaucugccucacccggacggaccgcgggugguacugcgacaacgccggcagcguguccuucuucccgcaggccgagaccugcaagguccagagcaaccggguguucugcgacaccaugaacucccggacccugcccagcgaggugaaccucugcaacaucgacaucuucaaccccaaguacgacugcaagaucaugacguccaagaccgacgucagcuccagcgugaucaccucccugggcgccaucgugagcugcuacgggaagaccaagugcacggcgagcaacaagugccgcggcaucaucaagaccuucuccaacgggugcgacuacgucagcaacaagggcguggacaccguguccgucggcaacacccuguacuacgugaacaagcaggagggcaagagccucuacgugaagggggagcccaucaucaacuucuacgacccgcuggucuuccccuccgacgaguucgacgccagcaucucccaggugaacgagaagaucaaccagagccuggccuucauccggaaguccgacgagcuccugcacaacgugaacgucggcaagagcaccacgaacaucaugaucaccaccaucaucaucgugaucaucgugauccugcugcuccugaucgccgucgggcuguuccucuacugcaaggcccgcugaggacuaguggaagcauuuuccuggcugauuaaaagaaauuacucagcuauggucaucuguuccuguuagaaggcuaugcagcauauuauauacuaugcgcauguuaugaaaugcauaauaaaaaauuuuaaaaaaucuaaaagaucuaaaaaaaaaaaaaaaaaaaaaaaaaaaaaaaaaaaaaaaaaaaaaaaaaaaaaaaaaaaaaaaaugcaucccccccccccccccccccccccccccccccaaaggcucuuuucagagccaccagaauu

SEQ ID NO: 17487 - RNA, 1913 nt, Artificial Sequence
  mRNA product Design f-2 comprising derived and/or modified sequence from HRSV(Memphis-37)__AIY60640.1__F-del_DSCav1_mut5 (opt1)
gggagagcggcucggccauuuugucccagucaguccggaggcugcggcugcagaaguaccgccugcggaguaacugcaaagaagcuuaccauggagcugcccauccucaagaccaacgccaucaccacgauccuggccgcggugacccugugcuucgccagcucccagaacaucaccgaggaguucuaccagagcacgugcuccgccgucagcaagggcuaccucuccgcccugcgcaccgggugguacaccagcgugaucaccaucgagcuguccaacaucaaggagaacaagugcaacggcaccgacgccaaggugaagcucaucaagcaggagcuggacaaguacaagaacgcggucacggagcugcagcuccugaugcagagcaccccggccgccggguccggcagcgccaucgcguccgggaucgccgugugcaaggugcugcaccucgagggcgaggucaacaagaucaagaacgcccugcugagcaccaacaaggccguggugucccucagcggcugcggggucuccgugcugaccuucaaggugcuggaccucaagaacuacaucgacaagcagcugcugcccauccucaacaagcagagcugcuccaucagcaacaucgagacggucaucgaguuccagcagaagaacaaccggcugcuggagaucacccgcgaguucuccgugaacgccggcgugaccacccccgucagcacguacaugcucaccaacagcgagcugcugucccucaucaacgacaugcccaucaccaacgaccagaagaagcugaugagcaacaacgugcagaucgugcggcagcaguccuacagcaucaugugcaucaucaaggaggagguccuggcguacguggugcagcucccgcuguacggggucaucgacacccccugcuggaagcugcacacgagcccccucugcaccaccaacaccaaggagggcuccaacaucugccugacgcgcaccgaccgggggugguacugcgacaacgccggcuccgugagcuucuucccccaggccgagaccugcaaggugcaguccaaccgcgucuucugcgacaccaugaacagccggacgcucccguccgaggugaaccugugcaacaucgacaucuucaaccccaaguacgacugcaagaucaugaccagcaagaccgacgucuccagcuccgugaucaccagccugggcgccaucguguccugcuacgggaagacgaagugcaccgccagcaacaagugccggggcaucaucaagaccuucuccaacgggugcgacuacgucagcaacaagggcguggacaccgugagcgucggcaacacgcucuacuacgugaacaagcaggaggggaagucccuguacgugaagggcgagcccaucaucaacuucuacgacccccuggucuucccgagcgacgaguucgacgcguccaucagccaggugaacgagaagaucaaccagucccucgccuucauccgcaagagcgacgagcugcugcacaacgugaacgucgggaaguccaccaccaacaucaugaucaccaccaucaucaucgugaucaucgugauccuccugcugcucaucgccgucggccuguuccuguacugcaaggcccggugaggacuaguggaagcauuuuccuggcugauuaaaagaaauuacucagcuauggucaucuguuccuguuagaaggcuaugcagcauauuauauacuaugcgcauguuaugaaaugcauaauaaaaaauuuuaaaaaaucuaaaagaucuaaaaaaaaaaaaaaaaaaaaaaaaaaaaaaaaaaaaaaaaaaaaaaaaaaaaaaaaaaaaaaaaugcaucccccccccccccccccccccccccccccccaaaggcucuuuucagagccaccagaauu

SEQ ID NO: 17488 - RNA, 1913 nt, Artificial Sequence
  mRNA product Design f-2 comprising derived and/or modified sequence from HRSV(Memphis-37)__AIY60640.1__F-del_DSCav1_mut5 (opt2)
gggagagcggcucggccauuuugucccagucaguccggaggcugcggcugcagaaguaccgccugcggaguaacugcaaagaagcuuaccauggagcuccccauccucaagaccaacgccaucaccaccauccucgccgccgucacccucugcuucgccuccucccagaacaucaccgaggaguucuaccaguccaccugcuccgccgucuccaagggcuaccucuccgcccuccgcaccggcugguacaccuccgucaucaccaucgagcucuccaacaucaaggagaacaagugcaacggcaccgacgccaaggucaagcucaucaagcaggagcucgacaaguacaagaacgccgucaccgagcuccagcuccucaugcaguccacccccgccgccggcuccggcuccgccaucgccuccggcaucgccgucugcaagguccuccaccucgagggcgaggucaacaagaucaagaacgcccuccucuccaccaacaaggccgucgucucccucuccggcugcggcgucuccguccucaccuucaagguccucgaccucaagaacuacaucgacaagcagcuccuccccauccucaacaagcaguccugcuccaucuccaacaucgagaccgucaucgaguuccagcagaagaacaaccgccuccucgagaucacccgcgaguucuccgucaacgccggcgucaccacccccgucuccaccuacaugcucaccaacuccgagcuccucucccucaucaacgacaugcccaucaccaacgaccagaagaagcucauguccaacaacguccagaucguccgccagcaguccuacuccaucaugugcaucaucaaggaggagguccucgccuacgucguccagcucccccucuacggcgucaucgacacccccugcuggaagcuccacaccuccccccucugcaccaccaacaccaaggagggcuccaacaucugccucacccgcaccgaccgcggcugguacugcgacaacgccggcuccgucuccuucuucccccaggccgagaccugcaagguccaguccaaccgcgucuucugcgacaccaugaacucccgcacccuccccuccgaggucaaccucugcaacaucgacaucuucaaccccaaguacgacugcaagaucaugaccuccaagaccgacgucuccuccuccgucaucaccucccucggcgccaucgucuccugcuacggcaagaccaagugcaccgccuccaacaagugccgcggcaucaucaagaccuucuccaacggcugcgacuacgucuccaacaagggcgucgacaccgucuccgucggcaacacccucuacuacgucaacaagcaggagggcaagucccucuacgucaagggcgagcccaucaucaacuucuacgacccccucgucuuccccuccgacgaguucgacgccuccaucucccaggucaacgagaagaucaaccagucccucgccuucauccgcaaguccgacgagcuccuccacaacgucaacgucggcaaguccaccaccaacaucaugaucaccaccaucaucaucgucaucaucgucauccuccuccuccucaucgccgucggccucuuccucuacugcaaggcccgcugaggacuaguggaagcauuuuccuggcugauuaaaagaaauuacucagcuauggucaucuguuccuguuagaaggcuaugcagcauauuauauacuaugcgcauguuaugaaaugcauaauaaaaaauuuuaaaaaaucuaaaagaucuaaaaaaaaaaaaaaaaaaaaaaaaaaaaaaaaaaaaaaaaaaaaaaaaaaaaaaaaaaaaaaaaugcaucccccccccccccccccccccccccccccccaaaggcucuuuucagagccaccagaauu

SEQ ID NO: 17489 - RNA, 1913 nt, Artificial Sequence
  mRNA product Design f-2 comprising derived and/or modified sequence from HRSV(Memphis-37)__AIY60640.1__F-del_DSCav1_mut5 (opt3)
gggagagcggcucggccauuuugucccagucaguccggaggcugcggcugcagaaguaccgccugcggaguaacugcaaagaagcuuaccauggagcugcccauccucaagaccaacgccauuacaacuauacuugcugcagugacgcugugcuucgccagcucccagaauaucaccgaagaguuuuaccaaucuacauguucagcggucaguaaaggcuauuugagcgcuuuaagaacugggugguacaccuccguuauuacaaucgaacugucuaacauuaaggagaauaaaugcaacggaaccgacgccaaggugaaacuaaucaagcaggaacucgauaaguauaaaaaugcaguaacugagcugcagcuucugaugcagucgaccccugccgcugguucaggcagcgcaauagccagugggaucgcuguguguaaggucuugcaccucgagggagaagugaacaaaauuaagaaugcccugcuguccacaaacaaagcgguugugucucucagcggcugcggugucuccguguuaacguucaagguacuggaccuuaagaauuacaucgauaaacaauugcugccaauucuaaacaagcagucauguaguaucagcaauauagagacuguuauugaauuucagcagaaaaacaauaggcuccuggagaucacccgggaguucucugugaacgcaggggucacaacuccgguguccaccuauaugcuuacaaauucagaacuguugagccucauuaacgacaugcccaucaccaacgaucaaaagaaacugaugaguaauaacgugcagaucguccgccagcagucuuacuccauuaugugcauaaucaaggaggaaguuuuagccuaugugguacaacugccucucuacggagugauugacacgccauguuggaaacuucauacuagcccccugugcacaaccaauacuaaggagggcucgaacaucuguuugacacgaaccgaucguggcugguacugcgacaaugcugggucugucuccuuuuucccucaggccgaaacguguaaggugcagucaaacagaguguuuugcgauaccaugaauaguagaacacugccaagcgaggugaaccucugcaauauagacauuuucaaccccaaauaugauuguaagaucaugacuuccaaaaccgacgucucuagcucagugaucacaagucugggagcaauuguauccugcuacgguaagacuaaauguaccgcuagcaauaagugcaggggcaucauuaagacauuuucuaacgggugugauuauguuucaaauaaaggaguggacaccgucagugugggcaacacucuuuacuaugucaauaagcaagaggguaaaagccuguacgugaagggggaaccuauaaucaacuucuaugacccauugguuuuuccguccgaugaguucgacgccucuauuucgcagguuaacgagaaaaucaaucagagccucgcguuuauccggaaguccgaugaacuguuacacaacguaaaugucggaaagucaacgacaaacauuaugauaaccacuaucauuaucgugauuaucguuauacugcuacuccugaucgccgugggccuuuucuuguacugcaaagcacgcugaggacuaguggaagcauuuuccuggcugauuaaaagaaauuacucagcuauggucaucuguuccuguuagaaggcuaugcagcauauuauauacuaugcgcauguuaugaaaugcauaauaaaaaauuuuaaaaaaucuaaaagaucuaaaaaaaaaaaaaaaaaaaaaaaaaaaaaaaaaaaaaaaaaaaaaaaaaaaaaaaaaaaaaaaaugcaucccccccccccccccccccccccccccccccaaaggcucuuuucagagccaccagaauu

SEQ ID NO: 17490 - RNA, 1913 nt, Artificial Sequence
  mRNA product Design f-2 comprising derived and/or modified sequence from HRSV(Memphis-37)__AIY60640.1__F-del_DSCav1_mut5 (opt4)
gggagagcggcucggccauuuugucccagucaguccggaggcugcggcugcagaaguaccgccugcggaguaacugcaaagaagcuuaccauggagcugcccauccugaagaccaacgccaucaccaccauccuggccgccgugacccugugcuucgccagcagccagaacaucaccgaggaguucuaccagagcaccugcagcgccgugagcaagggcuaccugagcgcccugagaaccggcugguacaccagcgugaucaccaucgagcugagcaacaucaaggagaacaagugcaacggcaccgacgccaaggugaagcugaucaagcaggagcuggacaaguacaagaacgccgugaccgagcugcagcugcugaugcagagcacccccgccgccggcagcggcagcgccaucgccagcggcaucgccgugugcaaggugcugcaccuggagggcgaggugaacaagaucaagaacgcccugcugagcaccaacaaggccguggugagccugagcggcugcggcgugagcgugcugaccuucaaggugcuggaccugaagaacuacaucgacaagcagcugcugcccauccugaacaagcagagcugcagcaucagcaacaucgagaccgugaucgaguuccagcagaagaacaacagacugcuggagaucaccagagaguucagcgugaacgccggcgugaccacccccgugagcaccuacaugcugaccaacagcgagcugcugagccugaucaacgacaugcccaucaccaacgaccagaagaagcugaugagcaacaacgugcagaucgugagacagcagagcuacagcaucaugugcaucaucaaggaggaggugcuggccuacguggugcagcugccccuguacggcgugaucgacacccccugcuggaagcugcacaccagcccccugugcaccaccaacaccaaggagggcagcaacaucugccugaccagaaccgacagaggcugguacugcgacaacgccggcagcgugagcuucuucccccaggccgagaccugcaaggugcagagcaacagaguguucugcgacaccaugaacagcagaacccugcccagcgaggugaaccugugcaacaucgacaucuucaaccccaaguacgacugcaagaucaugaccagcaagaccgacgugagcagcagcgugaucaccagccugggcgccaucgugagcugcuacggcaagaccaagugcaccgccagcaacaagugcagaggcaucaucaagaccuucagcaacggcugcgacuacgugagcaacaagggcguggacaccgugagcgugggcaacacccuguacuacgugaacaagcaggagggcaagagccuguacgugaagggcgagcccaucaucaacuucuacgacccccugguguuccccagcgacgaguucgacgccagcaucagccaggugaacgagaagaucaaccagagccuggccuucaucagaaagagcgacgagcugcugcacaacgugaacgugggcaagagcaccaccaacaucaugaucaccaccaucaucaucgugaucaucgugauccugcugcugcugaucgccgugggccuguuccuguacugcaaggccagaugaggacuaguggaagcauuuuccuggcugauuaaaagaaauuacucagcuauggucaucuguuccuguuagaaggcuaugcagcauauuauauacuaugcgcauguuaugaaaugcauaauaaaaaauuuuaaaaaaucuaaaagaucuaaaaaaaaaaaaaaaaaaaaaaaaaaaaaaaaaaaaaaaaaaaaaaaaaaaaaaaaaaaaaaaaugcaucccccccccccccccccccccccccccccccaaaggcucuuuucagagccaccagaauu

SEQ ID NO: 17491 - RNA, 1913 nt, Artificial Sequence
  mRNA product Design f-2 comprising derived and/or modified sequence from HRSV(Memphis-37)__AIY60640.1__F-del_DSCav1_mut5 (opt5)
gggagagcggcucggccauuuugucccagucaguccggaggcugcggcugcagaaguaccgccugcggaguaacugcaaagaagcuuaccauggagcugcccauccucaagaccaacgccauuacaacgauccuggcugccgugacccuuugcuucgcgagcucccagaauauuacagaagaguuuuaccaaucuaccuguagcgcugucuccaaaggcuaucugucugcccucagaacagggugguacaccagcguuaucacaauugaacuguccaacaucaaggagaauaaaugcaacggaaccgacgccaaggugaaacuuaucaagcaggaacuggauaaguauaaaaaugcugugacggagcuccagcugcugaugcagucuaccccugccgcuggcagcggguccgccauugcgagcggaaucgccgucuguaaggugcuccaccuggagggcgaaguuaacaaaauuaagaaugcccuucugucuacaaacaaagcuguggucucccucagcgggugcggagugucuguucugaccuucaaggugcuugaccugaagaauuacaucgauaaacaacuccugccgauucugaacaagcaguccuguagcaucucuaauauugagacagucaucgaauuucagcagaaaaacaaucggcuccuggagaucacccgcgaguucuccgugaacgcuggcgugacgacacccgucagcaccuauaugcuuacaaauuccgaacugcucucucugauuaacgacaugccuaucaccaacgaucaaaagaaacuuaugagcaauaacguucagauugugagacagcaguccuacagcaucaugugcauuaucaaggaggaagugcuggccuaugucgugcaacucccccuguacggcguuaucgacaccccuuguuggaaacugcauacaucuccccucugcacgaccaauacaaaggagggguccaacauuugucugacccggacagaucgcggaugguacugcgacaaugcgggcagcgugagcuuuuucccucaggccgaaaccuguaagguccagucuaacagaguguuuugcgauacgaugaacuccagaacacugccgucugagguuaaucucugcaauaucgacauuuucaaccccaaauaugauuguaagaucaugaccagcaaaaccgacguguccagcucugucauuacaucccugggggcuaucgugagcugcuacggaaagaccaaauguacagccucuaauaagugccggggcaucauuaagacguuuuccaacgggugugauuaugucagcaauaaaggaguggacaccguuuccgugggcaacacacuuuacuaugucaauaagcaagagggcaaaucucuguacgugaagggggaaccuaucauuaacuucuaugacccccucguuuuuccuagcgaugaguucgacgcuuccaucucucaggugaacgagaaaauuaaucagagccuggccuuuauccgcaaguccgaugaacugcuccacaacgucaaugugggaaagagcaccacaaacauuaugaucaccacgaucauuaucgugauuaucguuauucugcuucugcucaucgccgucggccuguuccuguacugcaaagcuagaugaggacuaguggaagcauuuuccuggcugauuaaaagaaauuacucagcuauggucaucuguuccuguuagaaggcuaugcagcauauuauauacuaugcgcauguuaugaaaugcauaauaaaaaauuuuaaaaaaucuaaaagaucuaaaaaaaaaaaaaaaaaaaaaaaaaaaaaaaaaaaaaaaaaaaaaaaaaaaaaaaaaaaaaaaaugcaucccccccccccccccccccccccccccccccaaaggcucuuuucagagccaccagaauu

SEQ ID NO: 17492 - RNA, 1913 nt, Artificial Sequence
  mRNA product Design f-2 comprising derived and/or modified sequence from HRSV(Memphis-37)__AIY60640.1__F-del_DSCav1_mut5 (opt6)
gggagagcggcucggccauuuugucccagucaguccggaggcugcggcugcagaaguaccgccugcggaguaacugcaaagaagcuuaccauggaauuacccaucuuaaaaacaaaugcaauaacaacaauacuagcagccguaacauuaugcuucgccucaagccaaaacauaacagaagaauuuuaccaaagcacauguuccgccguaucaaaaggauaucucucagcacuacguacuggaugguauacauccguaaucacaauugaacuaucaaacauuaaagaaaacaaaugcaauggaacagaugcgaaaguaaaacuaauaaaacaagaauuagauaaauauaaaaaugcaguaaccgaacuacaacuacuaaugcaaucaacucccgcugccgguagcggauccgccauagcaagcggaauugcuguauguaaaguccuacaucuugaaggcgaagucaacaaaaucaaaaaugcauuacucucgaccaacaaagcagucguaucacuaucaggaugcggagucucaguauuaacuuuuaaaguccuugaccuaaaaaacuacauagacaaacaacuacuaccaauucuaaauaaacaaaguugcagcauauccaauaucgaaacaguuauagaauuucaacaaaaaaacaaccgccuacuagaaaucacuagagaauuuucaguaaaugcaggcguaaccacaccagucucuaccuauaugcuuaccaacucugaauuauuaucacuuauaaacgacaugcccauaacaaaugaucaaaaaaaacuaaugagcaacaacguacaaauaguaagacaacaaagcuacagcauuauguguauaauaaaagaagaaguguuagcuuauguaguccaacuaccccucuauggcguuaucgauacaccaugcuggaaauuacacacaagcccucuaugcacaacuaacaccaaagaaggcucuaacauaugcuuaacaagaacagauagaggaugguauugcgauaacgcaggaucaguaucauucuuuccacaagcagaaacauguaaaguacaaucuaaccgaguauucugcgacacaaugaacucuagaacacuacccucagaaguuaaucucuguaauauugacauuuucaauccaaaauacgauugcaaaauaaugaccucuaaaaccgacguaucauccucaguuauaacguccuuaggagcaaucguaagcugcuauggcaaaacaaaauguaccgcaucaaacaaaugcagaggaauaauaaaaacauucucaaacggcugugacuacguaagcaauaaagguguugacacaguuucaguaggaaauacacuauacuauguaaauaaacaagaaggaaaaucucucuauguaaaaggagaacccauaauaaacuucuacgacccacucguauuuccaagcgaugaauuugaugcgagcauuucccagguaaaugaaaaaauaaaucaaucacuagcauucaucagaaaaagugaugaauuacuacacaauguuaacguaggaaaaucaacaacaaauaucaugauaacaacaaucauaauagucauaaucguaauauuacuauuacuaauagcaguagguuuauuucuauacuguaaagcaagguaaggacuaguggaagcauuuuccuggcugauuaaaagaaauuacucagcuauggucaucuguuccuguuagaaggcuaugcagcauauuauauacuaugcgcauguuaugaaaugcauaauaaaaaauuuuaaaaaaucuaaaagaucuaaaaaaaaaaaaaaaaaaaaaaaaaaaaaaaaaaaaaaaaaaaaaaaaaaaaaaaaaaaaaaaaugcaucccccccccccccccccccccccccccccccaaaggcucuuuucagagccaccagaauu

SEQ ID NO: 17493 - RNA, 1913 nt, Artificial Sequence
  mRNA product Design f-2 comprising derived and/or modified sequence from HRSV(Memphis-37)__AIY60640.1__F-del_DSCav1_mut5 (opt11)
gggagagcggcucggccauuuugucccagucaguccggaggcugcggcugcagaaguaccgccugcggaguaacugcaaagaagcuuaccauggaacuucccauccuaaaaaccaacgccauaacaacaauccucgcagcagucacccucugcuucgccucuucacaaaacaucaccgaagaauuuuaccaaucaaccugcuccgccguguccaaaggcuaccucucagcacugcgcacaggaugguauaccagcguaaucaccaucgaacucuccaacaucaaggaaaacaaaugcaacggcaccgaugccaaagucaaacucaucaagcaagaacuugacaaauacaaaaacgccgugaccgagcuacaacuccucaugcaguccacuccagccgccggcuccggcagcgccaucgccuccggcaucgccguaugcaaaguccuccaccucgaaggcgaaguaaacaaaaucaagaacgcacuccuaagcaccaacaaagccgucgucucacucuccgguugcggcgucagcguccuaacauucaaaguucucgaccucaaaaacuacauagacaaacaacuccuccccauccucaacaaacaauccugcuccauaucaaacaucgaaaccguuaucgaauuucaacaaaaaaacaaccgccuccuagaaaucacccgcgaauuuuccgucaacgcaggcgucaccacccccguuuccaccuauaugcucaccaacuccgaacuccucucccucaucaacgacaugcccauuaccaacgaccaaaagaaacuuaugagcaacaacguucaaaucguccgacaacaaucauacuccaucaugugcauuaucaaagaagaaguacucgccuacguaguacaauuaccccucuacggcguaaucgacaccccaugcuggaaacuacacaccuccccccucuguaccaccaacaccaaagaaggcucuaacaucugccucacccgcacagaccguggcugguauugcgauaacgcagggucugucuccuucuucccccaagccgaaacaugcaaaguccaauccaacagagucuucugcgacaccaugaacucgagaacccuccccuccgaagucaaccuaugcaacaucgacaucuucaacccaaaauacgacugcaaaaucaugacuucaaaaacagacgugagcucguccgucaucacaagccuaggagcuaucguauccugcuacggaaaaacaaaaugcacugcuuccaacaaaugccgcggaaucauaaaaaccuucuccaacggcugcgacuacgucagcaacaaaggcgucgacacagucuccguaggcaacacccuauacuacgucaauaaacaagaaggcaagucccuauaugucaaaggcgagcccaucaucaauuucuaugauccccucguuuucccauccgacgaauuugacgcauccaucucccaagucaacgaaaaaauaaaccaaagccucgcauucauccgcaaauccgacgaacuccuccacaacguaaacguaggaaaauccacaacuaacaucaugaucaccaccaucaucaucgucauuaucgucauccuacuccuccucauagcagucggccucuuccucuacugcaaagcacgcuagggacuaguggaagcauuuuccuggcugauuaaaagaaauuacucagcuauggucaucuguuccuguuagaaggcuaugcagcauauuauauacuaugcgcauguuaugaaaugcauaauaaaaaauuuuaaaaaaucuaaaagaucuaaaaaaaaaaaaaaaaaaaaaaaaaaaaaaaaaaaaaaaaaaaaaaaaaaaaaaaaaaaaaaaaugcaucccccccccccccccccccccccccccccccaaaggcucuuuucagagccaccagaauu

SEQ ID NO: 17494 - RNA, 1904 nt, Artificial Sequence
  mRNA product Design f-3 comprising derived and/or modified sequence from HRSV(Memphis-37)__AIY60640.1__F-del_DSCav1_mut5 (opt1)
gggagagucccgcagucggcguccagcggcucugcuuguucgugugugugucguugcaggccuuauucaagcuuaccauggagcugcccauccucaagaccaacgccaucaccacgauccuggccgcggugacccugugcuucgccagcucccagaacaucaccgaggaguucuaccagagcacgugcuccgccgucagcaagggcuaccucuccgcccugcgcaccgggugguacaccagcgugaucaccaucgagcuguccaacaucaaggagaacaagugcaacggcaccgacgccaaggugaagcucaucaagcaggagcuggacaaguacaagaacgcggucacggagcugcagcuccugaugcagagcaccccggccgccggcuccgggagcgcgaucgccuccggcaucgccgucugcaaggugcugcaccucgagggcgaggugaacaagaucaagaacgcccugcuguccaccaacaaggccgucgugagccucuccggcugcggggugagcguccugaccuucaaggugcuggaccucaagaacuacaucgacaagcagcugcugcccauccugaacaagcagagcugcuccaucagcaacaucgagaccgucaucgaguuccagcagaagaacaaccgccuccuggagaucacgcgggaguucagcgugaacgcgggcgugaccacccccgucuccaccuacaugcugacgaacagcgagcuccugucccugaucaacgacaugccgaucaccaacgaccagaagaagcucaugagcaacaacgugcagaucgugcgccagcaguccuacagcaucaugugcaucaucaaggaggagguccuggccuacguggugcagcugccccucuacggggucaucgacacccccugcuggaagcugcacaccagcccccugugcacgaccaacaccaaggagggcuccaacaucugccucacccggacggaccgcgggugguacugcgacaacgccggcagcguguccuucuucccgcaggccgagaccugcaagguccagagcaaccggguguucugcgacaccaugaacucccggacccugcccagcgaggugaaccucugcaacaucgacaucuucaaccccaaguacgacugcaagaucaugacguccaagaccgacgucagcuccagcgugaucaccucccugggcgccaucgugagcugcuacgggaagaccaagugcacggcgagcaacaagugccgcggcaucaucaagaccuucuccaacgggugcgacuacgucagcaacaagggcguggacaccguguccgucggcaacacccuguacuacgugaacaagcaggagggcaagagccucuacgugaagggggagcccaucaucaacuucuacgacccgcuggucuuccccuccgacgaguucgacgccagcaucucccaggugaacgagaagaucaaccagagccuggccuucauccggaaguccgacgagcuccugcacaacgugaacgucggcaagagcaccacgaacaucaugaucaccaccaucaucaucgugaucaucgugauccugcugcuccugaucgccgucgggcuguuccucuacugcaaggcccgcugaggacuaguacuggcugcaucucccuuuccucuguccuccauccuucucccaggauggugaagggggaccugguacccagugauccccaccccaggauccuaaaucaugacuuaccugcuaauaaaaacucauuggaaaagugagaagaucuaaaaaaaaaaaaaaaaaaaaaaaaaaaaaaaaaaaaaaaaaaaaaaaaaaaaaaaaaaaaaaaaugcaucccccccccccccccccccccccccccccccaaaggcucuuuucagagccaccagaauu

SEQ ID NO: 17495 - RNA, 1904 nt, Artificial Sequence
  mRNA product Design f-3 comprising derived and/or modified sequence from HRSV(Memphis-37)__AIY60640.1__F-del_DSCav1_mut5 (opt1)
gggagagucccgcagucggcguccagcggcucugcuuguucgugugugugucguugcaggccuuauucaagcuuaccauggagcugcccauccucaagaccaacgccaucaccacgauccuggccgcggugacccugugcuucgccagcucccagaacaucaccgaggaguucuaccagagcacgugcuccgccgucagcaagggcuaccucuccgcccugcgcaccgggugguacaccagcgugaucaccaucgagcuguccaacaucaaggagaacaagugcaacggcaccgacgccaaggugaagcucaucaagcaggagcuggacaaguacaagaacgcggucacggagcugcagcuccugaugcagagcaccccggccgccggguccggcagcgccaucgcguccgggaucgccgugugcaaggugcugcaccucgagggcgaggucaacaagaucaagaacgcccugcugagcaccaacaaggccguggugucccucagcggcugcggggucuccgugcugaccuucaaggugcuggaccucaagaacuacaucgacaagcagcugcugcccauccucaacaagcagagcugcuccaucagcaacaucgagacggucaucgaguuccagcagaagaacaaccggcugcuggagaucacccgcgaguucuccgugaacgccggcgugaccacccccgucagcacguacaugcucaccaacagcgagcugcugucccucaucaacgacaugcccaucaccaacgaccagaagaagcugaugagcaacaacgugcagaucgugcggcagcaguccuacagcaucaugugcaucaucaaggaggagguccuggcguacguggugcagcucccgcuguacggggucaucgacacccccugcuggaagcugcacacgagcccccucugcaccaccaacaccaaggagggcuccaacaucugccugacgcgcaccgaccgggggugguacugcgacaacgccggcuccgugagcuucuucccccaggccgagaccugcaaggugcaguccaaccgcgucuucugcgacaccaugaacagccggacgcucccguccgaggugaaccugugcaacaucgacaucuucaaccccaaguacgacugcaagaucaugaccagcaagaccgacgucuccagcuccgugaucaccagccugggcgccaucguguccugcuacgggaagacgaagugcaccgccagcaacaagugccggggcaucaucaagaccuucuccaacgggugcgacuacgucagcaacaagggcguggacaccgugagcgucggcaacacgcucuacuacgugaacaagcaggaggggaagucccuguacgugaagggcgagcccaucaucaacuucuacgacccccuggucuucccgagcgacgaguucgacgcguccaucagccaggugaacgagaagaucaaccagucccucgccuucauccgcaagagcgacgagcugcugcacaacgugaacgucgggaaguccaccaccaacaucaugaucaccaccaucaucaucgugaucaucgugauccuccugcugcucaucgccgucggccuguuccuguacugcaaggcccggugaggacuaguacuggcugcaucucccuuuccucuguccuccauccuucucccaggauggugaagggggaccugguacccagugauccccaccccaggauccuaaaucaugacuuaccugcuaauaaaaacucauuggaaaagugagaagaucuaaaaaaaaaaaaaaaaaaaaaaaaaaaaaaaaaaaaaaaaaaaaaaaaaaaaaaaaaaaaaaaaugcaucccccccccccccccccccccccccccccccaaaggcucuuuucagagccaccagaauu

SEQ ID NO: 17496 - RNA, 1904 nt, Artificial Sequence
  mRNA product Design f-3 comprising derived and/or modified sequence from HRSV(Memphis-37)__AIY60640.1__F-del_DSCav1_mut5 (opt2)
gggagagucccgcagucggcguccagcggcucugcuuguucgugugugugucguugcaggccuuauucaagcuuaccauggagcuccccauccucaagaccaacgccaucaccaccauccucgccgccgucacccucugcuucgccuccucccagaacaucaccgaggaguucuaccaguccaccugcuccgccgucuccaagggcuaccucuccgcccuccgcaccggcugguacaccuccgucaucaccaucgagcucuccaacaucaaggagaacaagugcaacggcaccgacgccaaggucaagcucaucaagcaggagcucgacaaguacaagaacgccgucaccgagcuccagcuccucaugcaguccacccccgccgccggcuccggcuccgccaucgccuccggcaucgccgucugcaagguccuccaccucgagggcgaggucaacaagaucaagaacgcccuccucuccaccaacaaggccgucgucucccucuccggcugcggcgucuccguccucaccuucaagguccucgaccucaagaacuacaucgacaagcagcuccuccccauccucaacaagcaguccugcuccaucuccaacaucgagaccgucaucgaguuccagcagaagaacaaccgccuccucgagaucacccgcgaguucuccgucaacgccggcgucaccacccccgucuccaccuacaugcucaccaacuccgagcuccucucccucaucaacgacaugcccaucaccaacgaccagaagaagcucauguccaacaacguccagaucguccgccagcaguccuacuccaucaugugcaucaucaaggaggagguccucgccuacgucguccagcucccccucuacggcgucaucgacacccccugcuggaagcuccacaccuccccccucugcaccaccaacaccaaggagggcuccaacaucugccucacccgcaccgaccgcggcugguacugcgacaacgccggcuccgucuccuucuucccccaggccgagaccugcaagguccaguccaaccgcgucuucugcgacaccaugaacucccgcacccuccccuccgaggucaaccucugcaacaucgacaucuucaaccccaaguacgacugcaagaucaugaccuccaagaccgacgucuccuccuccgucaucaccucccucggcgccaucgucuccugcuacggcaagaccaagugcaccgccuccaacaagugccgcggcaucaucaagaccuucuccaacggcugcgacuacgucuccaacaagggcgucgacaccgucuccgucggcaacacccucuacuacgucaacaagcaggagggcaagucccucuacgucaagggcgagcccaucaucaacuucuacgacccccucgucuuccccuccgacgaguucgacgccuccaucucccaggucaacgagaagaucaaccagucccucgccuucauccgcaaguccgacgagcuccuccacaacgucaacgucggcaaguccaccaccaacaucaugaucaccaccaucaucaucgucaucaucgucauccuccuccuccucaucgccgucggccucuuccucuacugcaaggcccgcugaggacuaguacuggcugcaucucccuuuccucuguccuccauccuucucccaggauggugaagggggaccugguacccagugauccccaccccaggauccuaaaucaugacuuaccugcuaauaaaaacucauuggaaaagugagaagaucuaaaaaaaaaaaaaaaaaaaaaaaaaaaaaaaaaaaaaaaaaaaaaaaaaaaaaaaaaaaaaaaaugcaucccccccccccccccccccccccccccccccaaaggcucuuuucagagccaccagaauu

SEQ ID NO: 17497 - RNA, 1904 nt, Artificial Sequence
  mRNA product Design f-3 comprising derived and/or modified sequence from HRSV(Memphis-37)__AIY60640.1__F-del_DSCav1_mut5 (opt3)
gggagagucccgcagucggcguccagcggcucugcuuguucgugugugugucguugcaggccuuauucaagcuuaccauggagcugcccauccucaagaccaacgccauuacaacuauacuugcugcagugacgcugugcuucgccagcucccagaauaucaccgaagaguuuuaccaaucuacauguucagcggucaguaaaggcuauuugagcgcuuuaagaacugggugguacaccuccguuauuacaaucgaacugucuaacauuaaggagaauaaaugcaacggaaccgacgccaaggugaaacuaaucaagcaggaacucgauaaguauaaaaaugcaguaacugagcugcagcuucugaugcagucgaccccugccgcugguucaggcagcgcaauagccagugggaucgcuguguguaaggucuugcaccucgagggagaagugaacaaaauuaagaaugcccugcuguccacaaacaaagcgguugugucucucagcggcugcggugucuccguguuaacguucaagguacuggaccuuaagaauuacaucgauaaacaauugcugccaauucuaaacaagcagucauguaguaucagcaauauagagacuguuauugaauuucagcagaaaaacaauaggcuccuggagaucacccgggaguucucugugaacgcaggggucacaacuccgguguccaccuauaugcuuacaaauucagaacuguugagccucauuaacgacaugcccaucaccaacgaucaaaagaaacugaugaguaauaacgugcagaucguccgccagcagucuuacuccauuaugugcauaaucaaggaggaaguuuuagccuaugugguacaacugccucucuacggagugauugacacgccauguuggaaacuucauacuagcccccugugcacaaccaauacuaaggagggcucgaacaucuguuugacacgaaccgaucguggcugguacugcgacaaugcugggucugucuccuuuuucccucaggccgaaacguguaaggugcagucaaacagaguguuuugcgauaccaugaauaguagaacacugccaagcgaggugaaccucugcaauauagacauuuucaaccccaaauaugauuguaagaucaugacuuccaaaaccgacgucucuagcucagugaucacaagucugggagcaauuguauccugcuacgguaagacuaaauguaccgcuagcaauaagugcaggggcaucauuaagacauuuucuaacgggugugauuauguuucaaauaaaggaguggacaccgucagugugggcaacacucuuuacuaugucaauaagcaagaggguaaaagccuguacgugaagggggaaccuauaaucaacuucuaugacccauugguuuuuccguccgaugaguucgacgccucuauuucgcagguuaacgagaaaaucaaucagagccucgcguuuauccggaaguccgaugaacuguuacacaacguaaaugucggaaagucaacgacaaacauuaugauaaccacuaucauuaucgugauuaucguuauacugcuacuccugaucgccgugggccuuuucuuguacugcaaagcacgcugaggacuaguacuggcugcaucucccuuuccucuguccuccauccuucucccaggauggugaagggggaccugguacccagugauccccaccccaggauccuaaaucaugacuuaccugcuaauaaaaacucauuggaaaagugagaagaucuaaaaaaaaaaaaaaaaaaaaaaaaaaaaaaaaaaaaaaaaaaaaaaaaaaaaaaaaaaaaaaaaugcaucccccccccccccccccccccccccccccccaaaggcucuuuucagagccaccagaauu

SEQ ID NO: 17498 - RNA, 1904 nt, Artificial Sequence
  mRNA product Design f-3 comprising derived and/or modified sequence from HRSV(Memphis-37)__AIY60640.1__F-del_DSCav1_mut5 (opt4)
gggagagucccgcagucggcguccagcggcucugcuuguucgugugugugucguugcaggccuuauucaagcuuaccauggagcugcccauccugaagaccaacgccaucaccaccauccuggccgccgugacccugugcuucgccagcagccagaacaucaccgaggaguucuaccagagcaccugcagcgccgugagcaagggcuaccugagcgcccugagaaccggcugguacaccagcgugaucaccaucgagcugagcaacaucaaggagaacaagugcaacggcaccgacgccaaggugaagcugaucaagcaggagcuggacaaguacaagaacgccgugaccgagcugcagcugcugaugcagagcacccccgccgccggcagcggcagcgccaucgccagcggcaucgccgugugcaaggugcugcaccuggagggcgaggugaacaagaucaagaacgcccugcugagcaccaacaaggccguggugagccugagcggcugcggcgugagcgugcugaccuucaaggugcuggaccugaagaacuacaucgacaagcagcugcugcccauccugaacaagcagagcugcagcaucagcaacaucgagaccgugaucgaguuccagcagaagaacaacagacugcuggagaucaccagagaguucagcgugaacgccggcgugaccacccccgugagcaccuacaugcugaccaacagcgagcugcugagccugaucaacgacaugcccaucaccaacgaccagaagaagcugaugagcaacaacgugcagaucgugagacagcagagcuacagcaucaugugcaucaucaaggaggaggugcuggccuacguggugcagcugccccuguacggcgugaucgacacccccugcuggaagcugcacaccagcccccugugcaccaccaacaccaaggagggcagcaacaucugccugaccagaaccgacagaggcugguacugcgacaacgccggcagcgugagcuucuucccccaggccgagaccugcaaggugcagagcaacagaguguucugcgacaccaugaacagcagaacccugcccagcgaggugaaccugugcaacaucgacaucuucaaccccaaguacgacugcaagaucaugaccagcaagaccgacgugagcagcagcgugaucaccagccugggcgccaucgugagcugcuacggcaagaccaagugcaccgccagcaacaagugcagaggcaucaucaagaccuucagcaacggcugcgacuacgugagcaacaagggcguggacaccgugagcgugggcaacacccuguacuacgugaacaagcaggagggcaagagccuguacgugaagggcgagcccaucaucaacuucuacgacccccugguguuccccagcgacgaguucgacgccagcaucagccaggugaacgagaagaucaaccagagccuggccuucaucagaaagagcgacgagcugcugcacaacgugaacgugggcaagagcaccaccaacaucaugaucaccaccaucaucaucgugaucaucgugauccugcugcugcugaucgccgugggccuguuccuguacugcaaggccagaugaggacuaguacuggcugcaucucccuuuccucuguccuccauccuucucccaggauggugaagggggaccugguacccagugauccccaccccaggauccuaaaucaugacuuaccugcuaauaaaaacucauuggaaaagugagaagaucuaaaaaaaaaaaaaaaaaaaaaaaaaaaaaaaaaaaaaaaaaaaaaaaaaaaaaaaaaaaaaaaaugcaucccccccccccccccccccccccccccccccaaaggcucuuuucagagccaccagaauu

SEQ ID NO: 17499 - RNA, 1904 nt, Artificial Sequence
  mRNA product Design f-3 comprising derived and/or modified sequence from HRSV(Memphis-37)__AIY60640.1__F-del_DSCav1_mut5 (opt5)
gggagagucccgcagucggcguccagcggcucugcuuguucgugugugugucguugcaggccuuauucaagcuuaccauggagcugcccauccucaagaccaacgccauuacaacgauccuggcugccgugacccuuugcuucgcgagcucccagaauauuacagaagaguuuuaccaaucuaccuguagcgcugucuccaaaggcuaucugucugcccucagaacagggugguacaccagcguuaucacaauugaacuguccaacaucaaggagaauaaaugcaacggaaccgacgccaaggugaaacuuaucaagcaggaacuggauaaguauaaaaaugcugugacggagcuccagcugcugaugcagucuaccccugccgcuggcagcggguccgccauugcgagcggaaucgccgucuguaaggugcuccaccuggagggcgaaguuaacaaaauuaagaaugcccuucugucuacaaacaaagcuguggucucccucagcgggugcggagugucuguucugaccuucaaggugcuugaccugaagaauuacaucgauaaacaacuccugccgauucugaacaagcaguccuguagcaucucuaauauugagacagucaucgaauuucagcagaaaaacaaucggcuccuggagaucacccgcgaguucuccgugaacgcuggcgugacgacacccgucagcaccuauaugcuuacaaauuccgaacugcucucucugauuaacgacaugccuaucaccaacgaucaaaagaaacuuaugagcaauaacguucagauugugagacagcaguccuacagcaucaugugcauuaucaaggaggaagugcuggccuaugucgugcaacucccccuguacggcguuaucgacaccccuuguuggaaacugcauacaucuccccucugcacgaccaauacaaaggagggguccaacauuugucugacccggacagaucgcggaugguacugcgacaaugcgggcagcgugagcuuuuucccucaggccgaaaccuguaagguccagucuaacagaguguuuugcgauacgaugaacuccagaacacugccgucugagguuaaucucugcaauaucgacauuuucaaccccaaauaugauuguaagaucaugaccagcaaaaccgacguguccagcucugucauuacaucccugggggcuaucgugagcugcuacggaaagaccaaauguacagccucuaauaagugccggggcaucauuaagacguuuuccaacgggugugauuaugucagcaauaaaggaguggacaccguuuccgugggcaacacacuuuacuaugucaauaagcaagagggcaaaucucuguacgugaagggggaaccuaucauuaacuucuaugacccccucguuuuuccuagcgaugaguucgacgcuuccaucucucaggugaacgagaaaauuaaucagagccuggccuuuauccgcaaguccgaugaacugcuccacaacgucaaugugggaaagagcaccacaaacauuaugaucaccacgaucauuaucgugauuaucguuauucugcuucugcucaucgccgucggccuguuccuguacugcaaagcuagaugaggacuaguacuggcugcaucucccuuuccucuguccuccauccuucucccaggauggugaagggggaccugguacccagugauccccaccccaggauccuaaaucaugacuuaccugcuaauaaaaacucauuggaaaagugagaagaucuaaaaaaaaaaaaaaaaaaaaaaaaaaaaaaaaaaaaaaaaaaaaaaaaaaaaaaaaaaaaaaaaugcaucccccccccccccccccccccccccccccccaaaggcucuuuucagagccaccagaauu

SEQ ID NO: 17500 - RNA, 1904 nt, Artificial Sequence
  mRNA product Design f-3 comprising derived and/or modified sequence from HRSV(Memphis-37)__AIY60640.1__F-del_DSCav1_mut5 (opt6)
gggagagucccgcagucggcguccagcggcucugcuuguucgugugugugucguugcaggccuuauucaagcuuaccauggaauuacccaucuuaaaaacaaaugcaauaacaacaauacuagcagccguaacauuaugcuucgccucaagccaaaacauaacagaagaauuuuaccaaagcacauguuccgccguaucaaaaggauaucucucagcacuacguacuggaugguauacauccguaaucacaauugaacuaucaaacauuaaagaaaacaaaugcaauggaacagaugcgaaaguaaaacuaauaaaacaagaauuagauaaauauaaaaaugcaguaaccgaacuacaacuacuaaugcaaucaacucccgcugccgguagcggauccgccauagcaagcggaauugcuguauguaaaguccuacaucuugaaggcgaagucaacaaaaucaaaaaugcauuacucucgaccaacaaagcagucguaucacuaucaggaugcggagucucaguauuaacuuuuaaaguccuugaccuaaaaaacuacauagacaaacaacuacuaccaauucuaaauaaacaaaguugcagcauauccaauaucgaaacaguuauagaauuucaacaaaaaaacaaccgccuacuagaaaucacuagagaauuuucaguaaaugcaggcguaaccacaccagucucuaccuauaugcuuaccaacucugaauuauuaucacuuauaaacgacaugcccauaacaaaugaucaaaaaaaacuaaugagcaacaacguacaaauaguaagacaacaaagcuacagcauuauguguauaauaaaagaagaaguguuagcuuauguaguccaacuaccccucuauggcguuaucgauacaccaugcuggaaauuacacacaagcccucuaugcacaacuaacaccaaagaaggcucuaacauaugcuuaacaagaacagauagaggaugguauugcgauaacgcaggaucaguaucauucuuuccacaagcagaaacauguaaaguacaaucuaaccgaguauucugcgacacaaugaacucuagaacacuacccucagaaguuaaucucuguaauauugacauuuucaauccaaaauacgauugcaaaauaaugaccucuaaaaccgacguaucauccucaguuauaacguccuuaggagcaaucguaagcugcuauggcaaaacaaaauguaccgcaucaaacaaaugcagaggaauaauaaaaacauucucaaacggcugugacuacguaagcaauaaagguguugacacaguuucaguaggaaauacacuauacuauguaaauaaacaagaaggaaaaucucucuauguaaaaggagaacccauaauaaacuucuacgacccacucguauuuccaagcgaugaauuugaugcgagcauuucccagguaaaugaaaaaauaaaucaaucacuagcauucaucagaaaaagugaugaauuacuacacaauguuaacguaggaaaaucaacaacaaauaucaugauaacaacaaucauaauagucauaaucguaauauuacuauuacuaauagcaguagguuuauuucuauacuguaaagcaagguaaggacuaguacuggcugcaucucccuuuccucuguccuccauccuucucccaggauggugaagggggaccugguacccagugauccccaccccaggauccuaaaucaugacuuaccugcuaauaaaaacucauuggaaaagugagaagaucuaaaaaaaaaaaaaaaaaaaaaaaaaaaaaaaaaaaaaaaaaaaaaaaaaaaaaaaaaaaaaaaaugcaucccccccccccccccccccccccccccccccaaaggcucuuuucagagccaccagaauu

SEQ ID NO: 17501 - RNA, 1904 nt, Artificial Sequence
  mRNA product Design f-3 comprising derived and/or modified sequence from HRSV(Memphis-37)__AIY60640.1__F-del_DSCav1_mut5 (opt11)
gggagagucccgcagucggcguccagcggcucugcuuguucgugugugugucguugcaggccuuauucaagcuuaccauggaacuucccauccuaaaaaccaacgccauaacaacaauccucgcagcagucacccucugcuucgccucuucacaaaacaucaccgaagaauuuuaccaaucaaccugcuccgccguguccaaaggcuaccucucagcacugcgcacaggaugguauaccagcguaaucaccaucgaacucuccaacaucaaggaaaacaaaugcaacggcaccgaugccaaagucaaacucaucaagcaagaacuugacaaauacaaaaacgccgugaccgagcuacaacuccucaugcaguccacuccagccgccggcuccggcagcgccaucgccuccggcaucgccguaugcaaaguccuccaccucgaaggcgaaguaaacaaaaucaagaacgcacuccuaagcaccaacaaagccgucgucucacucuccgguugcggcgucagcguccuaacauucaaaguucucgaccucaaaaacuacauagacaaacaacuccuccccauccucaacaaacaauccugcuccauaucaaacaucgaaaccguuaucgaauuucaacaaaaaaacaaccgccuccuagaaaucacccgcgaauuuuccgucaacgcaggcgucaccacccccguuuccaccuauaugcucaccaacuccgaacuccucucccucaucaacgacaugcccauuaccaacgaccaaaagaaacuuaugagcaacaacguucaaaucguccgacaacaaucauacuccaucaugugcauuaucaaagaagaaguacucgccuacguaguacaauuaccccucuacggcguaaucgacaccccaugcuggaaacuacacaccuccccccucuguaccaccaacaccaaagaaggcucuaacaucugccucacccgcacagaccguggcugguauugcgauaacgcagggucugucuccuucuucccccaagccgaaacaugcaaaguccaauccaacagagucuucugcgacaccaugaacucgagaacccuccccuccgaagucaaccuaugcaacaucgacaucuucaacccaaaauacgacugcaaaaucaugacuucaaaaacagacgugagcucguccgucaucacaagccuaggagcuaucguauccugcuacggaaaaacaaaaugcacugcuuccaacaaaugccgcggaaucauaaaaaccuucuccaacggcugcgacuacgucagcaacaaaggcgucgacacagucuccguaggcaacacccuauacuacgucaauaaacaagaaggcaagucccuauaugucaaaggcgagcccaucaucaauuucuaugauccccucguuuucccauccgacgaauuugacgcauccaucucccaagucaacgaaaaaauaaaccaaagccucgcauucauccgcaaauccgacgaacuccuccacaacguaaacguaggaaaauccacaacuaacaucaugaucaccaccaucaucaucgucauuaucgucauccuacuccuccucauagcagucggccucuuccucuacugcaaagcacgcuagggacuaguacuggcugcaucucccuuuccucuguccuccauccuucucccaggauggugaagggggaccugguacccagugauccccaccccaggauccuaaaucaugacuuaccugcuaauaaaaacucauuggaaaagugagaagaucuaaaaaaaaaaaaaaaaaaaaaaaaaaaaaaaaaaaaaaaaaaaaaaaaaaaaaaaaaaaaaaaaugcaucccccccccccccccccccccccccccccccaaaggcucuuuucagagccaccagaauu

SEQ ID NO: 17502 - RNA, 2120 nt, Artificial Sequence
  mRNA product Design f-4 comprising derived and/or modified sequence from HRSV(Memphis-37)__AIY60640.1__F-del_DSCav1_mut5 (opt1)
gggagagucccgcagucggcguccagcggcucugcuuguucgugugugugucguugcaggccuuauucaagcuuaccauggagcugcccauccucaagaccaacgccaucaccacgauccuggccgcggugacccugugcuucgccagcucccagaacaucaccgaggaguucuaccagagcacgugcuccgccgucagcaagggcuaccucuccgcccugcgcaccgggugguacaccagcgugaucaccaucgagcuguccaacaucaaggagaacaagugcaacggcaccgacgccaaggugaagcucaucaagcaggagcuggacaaguacaagaacgcggucacggagcugcagcuccugaugcagagcaccccggccgccggcuccgggagcgcgaucgccuccggcaucgccgucugcaaggugcugcaccucgagggcgaggugaacaagaucaagaacgcccugcuguccaccaacaaggccgucgugagccucuccggcugcggggugagcguccugaccuucaaggugcuggaccucaagaacuacaucgacaagcagcugcugcccauccugaacaagcagagcugcuccaucagcaacaucgagaccgucaucgaguuccagcagaagaacaaccgccuccuggagaucacgcgggaguucagcgugaacgcgggcgugaccacccccgucuccaccuacaugcugacgaacagcgagcuccugucccugaucaacgacaugccgaucaccaacgaccagaagaagcucaugagcaacaacgugcagaucgugcgccagcaguccuacagcaucaugugcaucaucaaggaggagguccuggccuacguggugcagcugccccucuacggggucaucgacacccccugcuggaagcugcacaccagcccccugugcacgaccaacaccaaggagggcuccaacaucugccucacccggacggaccgcgggugguacugcgacaacgccggcagcguguccuucuucccgcaggccgagaccugcaagguccagagcaaccggguguucugcgacaccaugaacucccggacccugcccagcgaggugaaccucugcaacaucgacaucuucaaccccaaguacgacugcaagaucaugacguccaagaccgacgucagcuccagcgugaucaccucccugggcgccaucgugagcugcuacgggaagaccaagugcacggcgagcaacaagugccgcggcaucaucaagaccuucuccaacgggugcgacuacgucagcaacaagggcguggacaccguguccgucggcaacacccuguacuacgugaacaagcaggagggcaagagccucuacgugaagggggagcccaucaucaacuucuacgacccgcuggucuuccccuccgacgaguucgacgccagcaucucccaggugaacgagaagaucaaccagagccuggccuucauccggaaguccgacgagcuccugcacaacgugaacgucggcaagagcaccacgaacaucaugaucaccaccaucaucaucgugaucaucgugauccugcugcuccugaucgccgucgggcuguuccucuacugcaaggcccgcugaggacuagugaagggaacacccaaauuuaauucagccuuaagcacaauuaauuaagagugaaacguaauuguacaagcaguuggucacccaccauagggcaugaucaacaccgcaaccuuuccuuuuucccccagugauucugaaaaaccccucuucccuucagcuugcuuagauguuccaaauuuaguaagcuuaaggcggccuacagaagaaaaagaaaaaaaaggccacaaaaguucccucucacuuucaguaaauaaaauaaaagcagcaacagaaauaaagaaauaaaugaaauucaaaaugaaauaaauauuguguugugcagcauuaaaaaaucaauaaaaauuaaaaaugagcaagaucuaaaaaaaaaaaaaaaaaaaaaaaaaaaaaaaaaaaaaaaaaaaaaaaaaaaaaaaaaaaaaaaaugcaucccccccccccccccccccccccccccccccaaaggcucuuuucagagccaccagaauu

SEQ ID NO: 17503 - RNA, 2120 nt, Artificial Sequence
  mRNA product Design f-4 comprising derived and/or modified sequence from HRSV(Memphis-37)__AIY60640.1__F-del_DSCav1_mut5 (opt1)
gggagagucccgcagucggcguccagcggcucugcuuguucgugugugugucguugcaggccuuauucaagcuuaccauggagcugcccauccucaagaccaacgccaucaccacgauccuggccgcggugacccugugcuucgccagcucccagaacaucaccgaggaguucuaccagagcacgugcuccgccgucagcaagggcuaccucuccgcccugcgcaccgggugguacaccagcgugaucaccaucgagcuguccaacaucaaggagaacaagugcaacggcaccgacgccaaggugaagcucaucaagcaggagcuggacaaguacaagaacgcggucacggagcugcagcuccugaugcagagcaccccggccgccggguccggcagcgccaucgcguccgggaucgccgugugcaaggugcugcaccucgagggcgaggucaacaagaucaagaacgcccugcugagcaccaacaaggccguggugucccucagcggcugcggggucuccgugcugaccuucaaggugcuggaccucaagaacuacaucgacaagcagcugcugcccauccucaacaagcagagcugcuccaucagcaacaucgagacggucaucgaguuccagcagaagaacaaccggcugcuggagaucacccgcgaguucuccgugaacgccggcgugaccacccccgucagcacguacaugcucaccaacagcgagcugcugucccucaucaacgacaugcccaucaccaacgaccagaagaagcugaugagcaacaacgugcagaucgugcggcagcaguccuacagcaucaugugcaucaucaaggaggagguccuggcguacguggugcagcucccgcuguacggggucaucgacacccccugcuggaagcugcacacgagcccccucugcaccaccaacaccaaggagggcuccaacaucugccugacgcgcaccgaccgggggugguacugcgacaacgccggcuccgugagcuucuucccccaggccgagaccugcaaggugcaguccaaccgcgucuucugcgacaccaugaacagccggacgcucccguccgaggugaaccugugcaacaucgacaucuucaaccccaaguacgacugcaagaucaugaccagcaagaccgacgucuccagcuccgugaucaccagccugggcgccaucguguccugcuacgggaagacgaagugcaccgccagcaacaagugccggggcaucaucaagaccuucuccaacgggugcgacuacgucagcaacaagggcguggacaccgugagcgucggcaacacgcucuacuacgugaacaagcaggaggggaagucccuguacgugaagggcgagcccaucaucaacuucuacgacccccuggucuucccgagcgacgaguucgacgcguccaucagccaggugaacgagaagaucaaccagucccucgccuucauccgcaagagcgacgagcugcugcacaacgugaacgucgggaaguccaccaccaacaucaugaucaccaccaucaucaucgugaucaucgugauccuccugcugcucaucgccgucggccuguuccuguacugcaaggcccggugaggacuagugaagggaacacccaaauuuaauucagccuuaagcacaauuaauuaagagugaaacguaauuguacaagcaguuggucacccaccauagggcaugaucaacaccgcaaccuuuccuuuuucccccagugauucugaaaaaccccucuucccuucagcuugcuuagauguuccaaauuuaguaagcuuaaggcggccuacagaagaaaaagaaaaaaaaggccacaaaaguucccucucacuuucaguaaauaaaauaaaagcagcaacagaaauaaagaaauaaaugaaauucaaaaugaaauaaauauuguguugugcagcauuaaaaaaucaauaaaaauuaaaaaugagcaagaucuaaaaaaaaaaaaaaaaaaaaaaaaaaaaaaaaaaaaaaaaaaaaaaaaaaaaaaaaaaaaaaaaugcaucccccccccccccccccccccccccccccccaaaggcucuuuucagagccaccagaauu

SEQ ID NO: 17504 - RNA, 2120 nt, Artificial Sequence
  mRNA product Design f-4 comprising derived and/or modified sequence from HRSV(Memphis-37)__AIY60640.1__F-del_DSCav1_mut5 (opt2)
gggagagucccgcagucggcguccagcggcucugcuuguucgugugugugucguugcaggccuuauucaagcuuaccauggagcuccccauccucaagaccaacgccaucaccaccauccucgccgccgucacccucugcuucgccuccucccagaacaucaccgaggaguucuaccaguccaccugcuccgccgucuccaagggcuaccucuccgcccuccgcaccggcugguacaccuccgucaucaccaucgagcucuccaacaucaaggagaacaagugcaacggcaccgacgccaaggucaagcucaucaagcaggagcucgacaaguacaagaacgccgucaccgagcuccagcuccucaugcaguccacccccgccgccggcuccggcuccgccaucgccuccggcaucgccgucugcaagguccuccaccucgagggcgaggucaacaagaucaagaacgcccuccucuccaccaacaaggccgucgucucccucuccggcugcggcgucuccguccucaccuucaagguccucgaccucaagaacuacaucgacaagcagcuccuccccauccucaacaagcaguccugcuccaucuccaacaucgagaccgucaucgaguuccagcagaagaacaaccgccuccucgagaucacccgcgaguucuccgucaacgccggcgucaccacccccgucuccaccuacaugcucaccaacuccgagcuccucucccucaucaacgacaugcccaucaccaacgaccagaagaagcucauguccaacaacguccagaucguccgccagcaguccuacuccaucaugugcaucaucaaggaggagguccucgccuacgucguccagcucccccucuacggcgucaucgacacccccugcuggaagcuccacaccuccccccucugcaccaccaacaccaaggagggcuccaacaucugccucacccgcaccgaccgcggcugguacugcgacaacgccggcuccgucuccuucuucccccaggccgagaccugcaagguccaguccaaccgcgucuucugcgacaccaugaacucccgcacccuccccuccgaggucaaccucugcaacaucgacaucuucaaccccaaguacgacugcaagaucaugaccuccaagaccgacgucuccuccuccgucaucaccucccucggcgccaucgucuccugcuacggcaagaccaagugcaccgccuccaacaagugccgcggcaucaucaagaccuucuccaacggcugcgacuacgucuccaacaagggcgucgacaccgucuccgucggcaacacccucuacuacgucaacaagcaggagggcaagucccucuacgucaagggcgagcccaucaucaacuucuacgacccccucgucuuccccuccgacgaguucgacgccuccaucucccaggucaacgagaagaucaaccagucccucgccuucauccgcaaguccgacgagcuccuccacaacgucaacgucggcaaguccaccaccaacaucaugaucaccaccaucaucaucgucaucaucgucauccuccuccuccucaucgccgucggccucuuccucuacugcaaggcccgcugaggacuagugaagggaacacccaaauuuaauucagccuuaagcacaauuaauuaagagugaaacguaauuguacaagcaguuggucacccaccauagggcaugaucaacaccgcaaccuuuccuuuuucccccagugauucugaaaaaccccucuucccuucagcuugcuuagauguuccaaauuuaguaagcuuaaggcggccuacagaagaaaaagaaaaaaaaggccacaaaaguucccucucacuuucaguaaauaaaauaaaagcagcaacagaaauaaagaaauaaaugaaauucaaaaugaaauaaauauuguguugugcagcauuaaaaaaucaauaaaaauuaaaaaugagcaagaucuaaaaaaaaaaaaaaaaaaaaaaaaaaaaaaaaaaaaaaaaaaaaaaaaaaaaaaaaaaaaaaaaugcaucccccccccccccccccccccccccccccccaaaggcucuuuucagagccaccagaauu

SEQ ID NO: 17505 - RNA, 2120 nt, Artificial Sequence
  mRNA product Design f-4 comprising derived and/or modified sequence from HRSV(Memphis-37)__AIY60640.1__F-del_DSCav1_mut5 (opt3)
gggagagucccgcagucggcguccagcggcucugcuuguucgugugugugucguugcaggccuuauucaagcuuaccauggagcugcccauccucaagaccaacgccauuacaacuauacuugcugcagugacgcugugcuucgccagcucccagaauaucaccgaagaguuuuaccaaucuacauguucagcggucaguaaaggcuauuugagcgcuuuaagaacugggugguacaccuccguuauuacaaucgaacugucuaacauuaaggagaauaaaugcaacggaaccgacgccaaggugaaacuaaucaagcaggaacucgauaaguauaaaaaugcaguaacugagcugcagcuucugaugcagucgaccccugccgcugguucaggcagcgcaauagccagugggaucgcuguguguaaggucuugcaccucgagggagaagugaacaaaauuaagaaugcccugcuguccacaaacaaagcgguugugucucucagcggcugcggugucuccguguuaacguucaagguacuggaccuuaagaauuacaucgauaaacaauugcugccaauucuaaacaagcagucauguaguaucagcaauauagagacuguuauugaauuucagcagaaaaacaauaggcuccuggagaucacccgggaguucucugugaacgcaggggucacaacuccgguguccaccuauaugcuuacaaauucagaacuguugagccucauuaacgacaugcccaucaccaacgaucaaaagaaacugaugaguaauaacgugcagaucguccgccagcagucuuacuccauuaugugcauaaucaaggaggaaguuuuagccuaugugguacaacugccucucuacggagugauugacacgccauguuggaaacuucauacuagcccccugugcacaaccaauacuaaggagggcucgaacaucuguuugacacgaaccgaucguggcugguacugcgacaaugcugggucugucuccuuuuucccucaggccgaaacguguaaggugcagucaaacagaguguuuugcgauaccaugaauaguagaacacugccaagcgaggugaaccucugcaauauagacauuuucaaccccaaauaugauuguaagaucaugacuuccaaaaccgacgucucuagcucagugaucacaagucugggagcaauuguauccugcuacgguaagacuaaauguaccgcuagcaauaagugcaggggcaucauuaagacauuuucuaacgggugugauuauguuucaaauaaaggaguggacaccgucagugugggcaacacucuuuacuaugucaauaagcaagaggguaaaagccuguacgugaagggggaaccuauaaucaacuucuaugacccauugguuuuuccguccgaugaguucgacgccucuauuucgcagguuaacgagaaaaucaaucagagccucgcguuuauccggaaguccgaugaacuguuacacaacguaaaugucggaaagucaacgacaaacauuaugauaaccacuaucauuaucgugauuaucguuauacugcuacuccugaucgccgugggccuuuucuuguacugcaaagcacgcugaggacuagugaagggaacacccaaauuuaauucagccuuaagcacaauuaauuaagagugaaacguaauuguacaagcaguuggucacccaccauagggcaugaucaacaccgcaaccuuuccuuuuucccccagugauucugaaaaaccccucuucccuucagcuugcuuagauguuccaaauuuaguaagcuuaaggcggccuacagaagaaaaagaaaaaaaaggccacaaaaguucccucucacuuucaguaaauaaaauaaaagcagcaacagaaauaaagaaauaaaugaaauucaaaaugaaauaaauauuguguugugcagcauuaaaaaaucaauaaaaauuaaaaaugagcaagaucuaaaaaaaaaaaaaaaaaaaaaaaaaaaaaaaaaaaaaaaaaaaaaaaaaaaaaaaaaaaaaaaaugcaucccccccccccccccccccccccccccccccaaaggcucuuuucagagccaccagaauu

SEQ ID NO: 17506 - RNA, 2120 nt, Artificial Sequence
  mRNA product Design f-4 comprising derived and/or modified sequence from HRSV(Memphis-37)__AIY60640.1__F-del_DSCav1_mut5 (opt4)
gggagagucccgcagucggcguccagcggcucugcuuguucgugugugugucguugcaggccuuauucaagcuuaccauggagcugcccauccugaagaccaacgccaucaccaccauccuggccgccgugacccugugcuucgccagcagccagaacaucaccgaggaguucuaccagagcaccugcagcgccgugagcaagggcuaccugagcgcccugagaaccggcugguacaccagcgugaucaccaucgagcugagcaacaucaaggagaacaagugcaacggcaccgacgccaaggugaagcugaucaagcaggagcuggacaaguacaagaacgccgugaccgagcugcagcugcugaugcagagcacccccgccgccggcagcggcagcgccaucgccagcggcaucgccgugugcaaggugcugcaccuggagggcgaggugaacaagaucaagaacgcccugcugagcaccaacaaggccguggugagccugagcggcugcggcgugagcgugcugaccuucaaggugcuggaccugaagaacuacaucgacaagcagcugcugcccauccugaacaagcagagcugcagcaucagcaacaucgagaccgugaucgaguuccagcagaagaacaacagacugcuggagaucaccagagaguucagcgugaacgccggcgugaccacccccgugagcaccuacaugcugaccaacagcgagcugcugagccugaucaacgacaugcccaucaccaacgaccagaagaagcugaugagcaacaacgugcagaucgugagacagcagagcuacagcaucaugugcaucaucaaggaggaggugcuggccuacguggugcagcugccccuguacggcgugaucgacacccccugcuggaagcugcacaccagcccccugugcaccaccaacaccaaggagggcagcaacaucugccugaccagaaccgacagaggcugguacugcgacaacgccggcagcgugagcuucuucccccaggccgagaccugcaaggugcagagcaacagaguguucugcgacaccaugaacagcagaacccugcccagcgaggugaaccugugcaacaucgacaucuucaaccccaaguacgacugcaagaucaugaccagcaagaccgacgugagcagcagcgugaucaccagccugggcgccaucgugagcugcuacggcaagaccaagugcaccgccagcaacaagugcagaggcaucaucaagaccuucagcaacggcugcgacuacgugagcaacaagggcguggacaccgugagcgugggcaacacccuguacuacgugaacaagcaggagggcaagagccuguacgugaagggcgagcccaucaucaacuucuacgacccccugguguuccccagcgacgaguucgacgccagcaucagccaggugaacgagaagaucaaccagagccuggccuucaucagaaagagcgacgagcugcugcacaacgugaacgugggcaagagcaccaccaacaucaugaucaccaccaucaucaucgugaucaucgugauccugcugcugcugaucgccgugggccuguuccuguacugcaaggccagaugaggacuagugaagggaacacccaaauuuaauucagccuuaagcacaauuaauuaagagugaaacguaauuguacaagcaguuggucacccaccauagggcaugaucaacaccgcaaccuuuccuuuuucccccagugauucugaaaaaccccucuucccuucagcuugcuuagauguuccaaauuuaguaagcuuaaggcggccuacagaagaaaaagaaaaaaaaggccacaaaaguucccucucacuuucaguaaauaaaauaaaagcagcaacagaaauaaagaaauaaaugaaauucaaaaugaaauaaauauuguguugugcagcauuaaaaaaucaauaaaaauuaaaaaugagcaagaucuaaaaaaaaaaaaaaaaaaaaaaaaaaaaaaaaaaaaaaaaaaaaaaaaaaaaaaaaaaaaaaaaugcaucccccccccccccccccccccccccccccccaaaggcucuuuucagagccaccagaauu

SEQ ID NO: 17507 - RNA, 2120 nt, Artificial Sequence
  mRNA product Design f-4 comprising derived and/or modified sequence from HRSV(Memphis-37)__AIY60640.1__F-del_DSCav1_mut5 (opt5)
gggagagucccgcagucggcguccagcggcucugcuuguucgugugugugucguugcaggccuuauucaagcuuaccauggagcugcccauccucaagaccaacgccauuacaacgauccuggcugccgugacccuuugcuucgcgagcucccagaauauuacagaagaguuuuaccaaucuaccuguagcgcugucuccaaaggcuaucugucugcccucagaacagggugguacaccagcguuaucacaauugaacuguccaacaucaaggagaauaaaugcaacggaaccgacgccaaggugaaacuuaucaagcaggaacuggauaaguauaaaaaugcugugacggagcuccagcugcugaugcagucuaccccugccgcuggcagcggguccgccauugcgagcggaaucgccgucuguaaggugcuccaccuggagggcgaaguuaacaaaauuaagaaugcccuucugucuacaaacaaagcuguggucucccucagcgggugcggagugucuguucugaccuucaaggugcuugaccugaagaauuacaucgauaaacaacuccugccgauucugaacaagcaguccuguagcaucucuaauauugagacagucaucgaauuucagcagaaaaacaaucggcuccuggagaucacccgcgaguucuccgugaacgcuggcgugacgacacccgucagcaccuauaugcuuacaaauuccgaacugcucucucugauuaacgacaugccuaucaccaacgaucaaaagaaacuuaugagcaauaacguucagauugugagacagcaguccuacagcaucaugugcauuaucaaggaggaagugcuggccuaugucgugcaacucccccuguacggcguuaucgacaccccuuguuggaaacugcauacaucuccccucugcacgaccaauacaaaggagggguccaacauuugucugacccggacagaucgcggaugguacugcgacaaugcgggcagcgugagcuuuuucccucaggccgaaaccuguaagguccagucuaacagaguguuuugcgauacgaugaacuccagaacacugccgucugagguuaaucucugcaauaucgacauuuucaaccccaaauaugauuguaagaucaugaccagcaaaaccgacguguccagcucugucauuacaucccugggggcuaucgugagcugcuacggaaagaccaaauguacagccucuaauaagugccggggcaucauuaagacguuuuccaacgggugugauuaugucagcaauaaaggaguggacaccguuuccgugggcaacacacuuuacuaugucaauaagcaagagggcaaaucucuguacgugaagggggaaccuaucauuaacuucuaugacccccucguuuuuccuagcgaugaguucgacgcuuccaucucucaggugaacgagaaaauuaaucagagccuggccuuuauccgcaaguccgaugaacugcuccacaacgucaaugugggaaagagcaccacaaacauuaugaucaccacgaucauuaucgugauuaucguuauucugcuucugcucaucgccgucggccuguuccuguacugcaaagcuagaugaggacuagugaagggaacacccaaauuuaauucagccuuaagcacaauuaauuaagagugaaacguaauuguacaagcaguuggucacccaccauagggcaugaucaacaccgcaaccuuuccuuuuucccccagugauucugaaaaaccccucuucccuucagcuugcuuagauguuccaaauuuaguaagcuuaaggcggccuacagaagaaaaagaaaaaaaaggccacaaaaguucccucucacuuucaguaaauaaaauaaaagcagcaacagaaauaaagaaauaaaugaaauucaaaaugaaauaaauauuguguugugcagcauuaaaaaaucaauaaaaauuaaaaaugagcaagaucuaaaaaaaaaaaaaaaaaaaaaaaaaaaaaaaaaaaaaaaaaaaaaaaaaaaaaaaaaaaaaaaaugcaucccccccccccccccccccccccccccccccaaaggcucuuuucagagccaccagaauu

SEQ ID NO: 17508 - RNA, 2120 nt, Artificial Sequence
  mRNA product Design f-4 comprising derived and/or modified sequence from HRSV(Memphis-37)__AIY60640.1__F-del_DSCav1_mut5 (opt6)
gggagagucccgcagucggcguccagcggcucugcuuguucgugugugugucguugcaggccuuauucaagcuuaccauggaauuacccaucuuaaaaacaaaugcaauaacaacaauacuagcagccguaacauuaugcuucgccucaagccaaaacauaacagaagaauuuuaccaaagcacauguuccgccguaucaaaaggauaucucucagcacuacguacuggaugguauacauccguaaucacaauugaacuaucaaacauuaaagaaaacaaaugcaauggaacagaugcgaaaguaaaacuaauaaaacaagaauuagauaaauauaaaaaugcaguaaccgaacuacaacuacuaaugcaaucaacucccgcugccgguagcggauccgccauagcaagcggaauugcuguauguaaaguccuacaucuugaaggcgaagucaacaaaaucaaaaaugcauuacucucgaccaacaaagcagucguaucacuaucaggaugcggagucucaguauuaacuuuuaaaguccuugaccuaaaaaacuacauagacaaacaacuacuaccaauucuaaauaaacaaaguugcagcauauccaauaucgaaacaguuauagaauuucaacaaaaaaacaaccgccuacuagaaaucacuagagaauuuucaguaaaugcaggcguaaccacaccagucucuaccuauaugcuuaccaacucugaauuauuaucacuuauaaacgacaugcccauaacaaaugaucaaaaaaaacuaaugagcaacaacguacaaauaguaagacaacaaagcuacagcauuauguguauaauaaaagaagaaguguuagcuuauguaguccaacuaccccucuauggcguuaucgauacaccaugcuggaaauuacacacaagcccucuaugcacaacuaacaccaaagaaggcucuaacauaugcuuaacaagaacagauagaggaugguauugcgauaacgcaggaucaguaucauucuuuccacaagcagaaacauguaaaguacaaucuaaccgaguauucugcgacacaaugaacucuagaacacuacccucagaaguuaaucucuguaauauugacauuuucaauccaaaauacgauugcaaaauaaugaccucuaaaaccgacguaucauccucaguuauaacguccuuaggagcaaucguaagcugcuauggcaaaacaaaauguaccgcaucaaacaaaugcagaggaauaauaaaaacauucucaaacggcugugacuacguaagcaauaaagguguugacacaguuucaguaggaaauacacuauacuauguaaauaaacaagaaggaaaaucucucuauguaaaaggagaacccauaauaaacuucuacgacccacucguauuuccaagcgaugaauuugaugcgagcauuucccagguaaaugaaaaaauaaaucaaucacuagcauucaucagaaaaagugaugaauuacuacacaauguuaacguaggaaaaucaacaacaaauaucaugauaacaacaaucauaauagucauaaucguaauauuacuauuacuaauagcaguagguuuauuucuauacuguaaagcaagguaaggacuagugaagggaacacccaaauuuaauucagccuuaagcacaauuaauuaagagugaaacguaauuguacaagcaguuggucacccaccauagggcaugaucaacaccgcaaccuuuccuuuuucccccagugauucugaaaaaccccucuucccuucagcuugcuuagauguuccaaauuuaguaagcuuaaggcggccuacagaagaaaaagaaaaaaaaggccacaaaaguucccucucacuuucaguaaauaaaauaaaagcagcaacagaaauaaagaaauaaaugaaauucaaaaugaaauaaauauuguguugugcagcauuaaaaaaucaauaaaaauuaaaaaugagcaagaucuaaaaaaaaaaaaaaaaaaaaaaaaaaaaaaaaaaaaaaaaaaaaaaaaaaaaaaaaaaaaaaaaugcaucccccccccccccccccccccccccccccccaaaggcucuuuucagagccaccagaauu

SEQ ID NO: 17509 - RNA, 2120 nt, Artificial Sequence
  mRNA product Design f-4 comprising derived and/or modified sequence from HRSV(Memphis-37)__AIY60640.1__F-del_DSCav1_mut5 (opt11)
gggagagucccgcagucggcguccagcggcucugcuuguucgugugugugucguugcaggccuuauucaagcuuaccauggaacuucccauccuaaaaaccaacgccauaacaacaauccucgcagcagucacccucugcuucgccucuucacaaaacaucaccgaagaauuuuaccaaucaaccugcuccgccguguccaaaggcuaccucucagcacugcgcacaggaugguauaccagcguaaucaccaucgaacucuccaacaucaaggaaaacaaaugcaacggcaccgaugccaaagucaaacucaucaagcaagaacuugacaaauacaaaaacgccgugaccgagcuacaacuccucaugcaguccacuccagccgccggcuccggcagcgccaucgccuccggcaucgccguaugcaaaguccuccaccucgaaggcgaaguaaacaaaaucaagaacgcacuccuaagcaccaacaaagccgucgucucacucuccgguugcggcgucagcguccuaacauucaaaguucucgaccucaaaaacuacauagacaaacaacuccuccccauccucaacaaacaauccugcuccauaucaaacaucgaaaccguuaucgaauuucaacaaaaaaacaaccgccuccuagaaaucacccgcgaauuuuccgucaacgcaggcgucaccacccccguuuccaccuauaugcucaccaacuccgaacuccucucccucaucaacgacaugcccauuaccaacgaccaaaagaaacuuaugagcaacaacguucaaaucguccgacaacaaucauacuccaucaugugcauuaucaaagaagaaguacucgccuacguaguacaauuaccccucuacggcguaaucgacaccccaugcuggaaacuacacaccuccccccucuguaccaccaacaccaaagaaggcucuaacaucugccucacccgcacagaccguggcugguauugcgauaacgcagggucugucuccuucuucccccaagccgaaacaugcaaaguccaauccaacagagucuucugcgacaccaugaacucgagaacccuccccuccgaagucaaccuaugcaacaucgacaucuucaacccaaaauacgacugcaaaaucaugacuucaaaaacagacgugagcucguccgucaucacaagccuaggagcuaucguauccugcuacggaaaaacaaaaugcacugcuuccaacaaaugccgcggaaucauaaaaaccuucuccaacggcugcgacuacgucagcaacaaaggcgucgacacagucuccguaggcaacacccuauacuacgucaauaaacaagaaggcaagucccuauaugucaaaggcgagcccaucaucaauuucuaugauccccucguuuucccauccgacgaauuugacgcauccaucucccaagucaacgaaaaaauaaaccaaagccucgcauucauccgcaaauccgacgaacuccuccacaacguaaacguaggaaaauccacaacuaacaucaugaucaccaccaucaucaucgucauuaucgucauccuacuccuccucauagcagucggccucuuccucuacugcaaagcacgcuagggacuagugaagggaacacccaaauuuaauucagccuuaagcacaauuaauuaagagugaaacguaauuguacaagcaguuggucacccaccauagggcaugaucaacaccgcaaccuuuccuuuuucccccagugauucugaaaaaccccucuucccuucagcuugcuuagauguuccaaauuuaguaagcuuaaggcggccuacagaagaaaaagaaaaaaaaggccacaaaaguucccucucacuuucaguaaauaaaauaaaagcagcaacagaaauaaagaaauaaaugaaauucaaaaugaaauaaauauuguguugugcagcauuaaaaaaucaauaaaaauuaaaaaugagcaagaucuaaaaaaaaaaaaaaaaaaaaaaaaaaaaaaaaaaaaaaaaaaaaaaaaaaaaaaaaaaaaaaaaugcaucccccccccccccccccccccccccccccccaaaggcucuuuucagagccaccagaauu

SEQ ID NO: 17510 - RNA, 1896 nt, Artificial Sequence
  mRNA product Design f-5 comprising derived and/or modified sequence from HRSV(Memphis-37)__AIY60640.1__F-del_DSCav1_mut5 (opt1)
gggagacuuucccauucuguagcagaauuugguguugccuguggucuuggucccgcggagaagcuuaccauggagcugcccauccucaagaccaacgccaucaccacgauccuggccgcggugacccugugcuucgccagcucccagaacaucaccgaggaguucuaccagagcacgugcuccgccgucagcaagggcuaccucuccgcccugcgcaccgggugguacaccagcgugaucaccaucgagcuguccaacaucaaggagaacaagugcaacggcaccgacgccaaggugaagcucaucaagcaggagcuggacaaguacaagaacgcggucacggagcugcagcuccugaugcagagcaccccggccgccggcuccgggagcgcgaucgccuccggcaucgccgucugcaaggugcugcaccucgagggcgaggugaacaagaucaagaacgcccugcuguccaccaacaaggccgucgugagccucuccggcugcggggugagcguccugaccuucaaggugcuggaccucaagaacuacaucgacaagcagcugcugcccauccugaacaagcagagcugcuccaucagcaacaucgagaccgucaucgaguuccagcagaagaacaaccgccuccuggagaucacgcgggaguucagcgugaacgcgggcgugaccacccccgucuccaccuacaugcugacgaacagcgagcuccugucccugaucaacgacaugccgaucaccaacgaccagaagaagcucaugagcaacaacgugcagaucgugcgccagcaguccuacagcaucaugugcaucaucaaggaggagguccuggccuacguggugcagcugccccucuacggggucaucgacacccccugcuggaagcugcacaccagcccccugugcacgaccaacaccaaggagggcuccaacaucugccucacccggacggaccgcgggugguacugcgacaacgccggcagcguguccuucuucccgcaggccgagaccugcaagguccagagcaaccggguguucugcgacaccaugaacucccggacccugcccagcgaggugaaccucugcaacaucgacaucuucaaccccaaguacgacugcaagaucaugacguccaagaccgacgucagcuccagcgugaucaccucccugggcgccaucgugagcugcuacgggaagaccaagugcacggcgagcaacaagugccgcggcaucaucaagaccuucuccaacgggugcgacuacgucagcaacaagggcguggacaccguguccgucggcaacacccuguacuacgugaacaagcaggagggcaagagccucuacgugaagggggagcccaucaucaacuucuacgacccgcuggucuuccccuccgacgaguucgacgccagcaucucccaggugaacgagaagaucaaccagagccuggccuucauccggaaguccgacgagcuccugcacaacgugaacgucggcaagagcaccacgaacaucaugaucaccaccaucaucaucgugaucaucgugauccugcugcuccugaucgccgucgggcuguuccucuacugcaaggcccgcugaggacuaguacuggcugcaucucccuuuccucuguccuccauccuucucccaggauggugaagggggaccugguacccagugauccccaccccaggauccuaaaucaugacuuaccugcuaauaaaaacucauuggaaaagugagaagaucuaaaaaaaaaaaaaaaaaaaaaaaaaaaaaaaaaaaaaaaaaaaaaaaaaaaaaaaaaaaaaaaaugcaucccccccccccccccccccccccccccccccaaaggcucuuuucagagccaccagaauu

SEQ ID NO: 17511 - RNA, 1896 nt, Artificial Sequence
  mRNA product Design f-5 comprising derived and/or modified sequence from HRSV(Memphis-37)__AIY60640.1__F-del_DSCav1_mut5 (opt1)
gggagacuuucccauucuguagcagaauuugguguugccuguggucuuggucccgcggagaagcuuaccauggagcugcccauccucaagaccaacgccaucaccacgauccuggccgcggugacccugugcuucgccagcucccagaacaucaccgaggaguucuaccagagcacgugcuccgccgucagcaagggcuaccucuccgcccugcgcaccgggugguacaccagcgugaucaccaucgagcuguccaacaucaaggagaacaagugcaacggcaccgacgccaaggugaagcucaucaagcaggagcuggacaaguacaagaacgcggucacggagcugcagcuccugaugcagagcaccccggccgccggguccggcagcgccaucgcguccgggaucgccgugugcaaggugcugcaccucgagggcgaggucaacaagaucaagaacgcccugcugagcaccaacaaggccguggugucccucagcggcugcggggucuccgugcugaccuucaaggugcuggaccucaagaacuacaucgacaagcagcugcugcccauccucaacaagcagagcugcuccaucagcaacaucgagacggucaucgaguuccagcagaagaacaaccggcugcuggagaucacccgcgaguucuccgugaacgccggcgugaccacccccgucagcacguacaugcucaccaacagcgagcugcugucccucaucaacgacaugcccaucaccaacgaccagaagaagcugaugagcaacaacgugcagaucgugcggcagcaguccuacagcaucaugugcaucaucaaggaggagguccuggcguacguggugcagcucccgcuguacggggucaucgacacccccugcuggaagcugcacacgagcccccucugcaccaccaacaccaaggagggcuccaacaucugccugacgcgcaccgaccgggggugguacugcgacaacgccggcuccgugagcuucuucccccaggccgagaccugcaaggugcaguccaaccgcgucuucugcgacaccaugaacagccggacgcucccguccgaggugaaccugugcaacaucgacaucuucaaccccaaguacgacugcaagaucaugaccagcaagaccgacgucuccagcuccgugaucaccagccugggcgccaucguguccugcuacgggaagacgaagugcaccgccagcaacaagugccggggcaucaucaagaccuucuccaacgggugcgacuacgucagcaacaagggcguggacaccgugagcgucggcaacacgcucuacuacgugaacaagcaggaggggaagucccuguacgugaagggcgagcccaucaucaacuucuacgacccccuggucuucccgagcgacgaguucgacgcguccaucagccaggugaacgagaagaucaaccagucccucgccuucauccgcaagagcgacgagcugcugcacaacgugaacgucgggaaguccaccaccaacaucaugaucaccaccaucaucaucgugaucaucgugauccuccugcugcucaucgccgucggccuguuccuguacugcaaggcccggugaggacuaguacuggcugcaucucccuuuccucuguccuccauccuucucccaggauggugaagggggaccugguacccagugauccccaccccaggauccuaaaucaugacuuaccugcuaauaaaaacucauuggaaaagugagaagaucuaaaaaaaaaaaaaaaaaaaaaaaaaaaaaaaaaaaaaaaaaaaaaaaaaaaaaaaaaaaaaaaaugcaucccccccccccccccccccccccccccccccaaaggcucuuuucagagccaccagaauu

SEQ ID NO: 17512 - RNA, 1896 nt, Artificial Sequence
  mRNA product Design f-5 comprising derived and/or modified sequence from HRSV(Memphis-37)__AIY60640.1__F-del_DSCav1_mut5 (opt2)
gggagacuuucccauucuguagcagaauuugguguugccuguggucuuggucccgcggagaagcuuaccauggagcuccccauccucaagaccaacgccaucaccaccauccucgccgccgucacccucugcuucgccuccucccagaacaucaccgaggaguucuaccaguccaccugcuccgccgucuccaagggcuaccucuccgcccuccgcaccggcugguacaccuccgucaucaccaucgagcucuccaacaucaaggagaacaagugcaacggcaccgacgccaaggucaagcucaucaagcaggagcucgacaaguacaagaacgccgucaccgagcuccagcuccucaugcaguccacccccgccgccggcuccggcuccgccaucgccuccggcaucgccgucugcaagguccuccaccucgagggcgaggucaacaagaucaagaacgcccuccucuccaccaacaaggccgucgucucccucuccggcugcggcgucuccguccucaccuucaagguccucgaccucaagaacuacaucgacaagcagcuccuccccauccucaacaagcaguccugcuccaucuccaacaucgagaccgucaucgaguuccagcagaagaacaaccgccuccucgagaucacccgcgaguucuccgucaacgccggcgucaccacccccgucuccaccuacaugcucaccaacuccgagcuccucucccucaucaacgacaugcccaucaccaacgaccagaagaagcucauguccaacaacguccagaucguccgccagcaguccuacuccaucaugugcaucaucaaggaggagguccucgccuacgucguccagcucccccucuacggcgucaucgacacccccugcuggaagcuccacaccuccccccucugcaccaccaacaccaaggagggcuccaacaucugccucacccgcaccgaccgcggcugguacugcgacaacgccggcuccgucuccuucuucccccaggccgagaccugcaagguccaguccaaccgcgucuucugcgacaccaugaacucccgcacccuccccuccgaggucaaccucugcaacaucgacaucuucaaccccaaguacgacugcaagaucaugaccuccaagaccgacgucuccuccuccgucaucaccucccucggcgccaucgucuccugcuacggcaagaccaagugcaccgccuccaacaagugccgcggcaucaucaagaccuucuccaacggcugcgacuacgucuccaacaagggcgucgacaccgucuccgucggcaacacccucuacuacgucaacaagcaggagggcaagucccucuacgucaagggcgagcccaucaucaacuucuacgacccccucgucuuccccuccgacgaguucgacgccuccaucucccaggucaacgagaagaucaaccagucccucgccuucauccgcaaguccgacgagcuccuccacaacgucaacgucggcaaguccaccaccaacaucaugaucaccaccaucaucaucgucaucaucgucauccuccuccuccucaucgccgucggccucuuccucuacugcaaggcccgcugaggacuaguacuggcugcaucucccuuuccucuguccuccauccuucucccaggauggugaagggggaccugguacccagugauccccaccccaggauccuaaaucaugacuuaccugcuaauaaaaacucauuggaaaagugagaagaucuaaaaaaaaaaaaaaaaaaaaaaaaaaaaaaaaaaaaaaaaaaaaaaaaaaaaaaaaaaaaaaaaugcaucccccccccccccccccccccccccccccccaaaggcucuuuucagagccaccagaauu

SEQ ID NO: 17513 - RNA, 1896 nt, Artificial Sequence
  mRNA product Design f-5 comprising derived and/or modified sequence from HRSV(Memphis-37)__AIY60640.1__F-del_DSCav1_mut5 (opt3)
gggagacuuucccauucuguagcagaauuugguguugccuguggucuuggucccgcggagaagcuuaccauggagcugcccauccucaagaccaacgccauuacaacuauacuugcugcagugacgcugugcuucgccagcucccagaauaucaccgaagaguuuuaccaaucuacauguucagcggucaguaaaggcuauuugagcgcuuuaagaacugggugguacaccuccguuauuacaaucgaacugucuaacauuaaggagaauaaaugcaacggaaccgacgccaaggugaaacuaaucaagcaggaacucgauaaguauaaaaaugcaguaacugagcugcagcuucugaugcagucgaccccugccgcugguucaggcagcgcaauagccagugggaucgcuguguguaaggucuugcaccucgagggagaagugaacaaaauuaagaaugcccugcuguccacaaacaaagcgguugugucucucagcggcugcggugucuccguguuaacguucaagguacuggaccuuaagaauuacaucgauaaacaauugcugccaauucuaaacaagcagucauguaguaucagcaauauagagacuguuauugaauuucagcagaaaaacaauaggcuccuggagaucacccgggaguucucugugaacgcaggggucacaacuccgguguccaccuauaugcuuacaaauucagaacuguugagccucauuaacgacaugcccaucaccaacgaucaaaagaaacugaugaguaauaacgugcagaucguccgccagcagucuuacuccauuaugugcauaaucaaggaggaaguuuuagccuaugugguacaacugccucucuacggagugauugacacgccauguuggaaacuucauacuagcccccugugcacaaccaauacuaaggagggcucgaacaucuguuugacacgaaccgaucguggcugguacugcgacaaugcugggucugucuccuuuuucccucaggccgaaacguguaaggugcagucaaacagaguguuuugcgauaccaugaauaguagaacacugccaagcgaggugaaccucugcaauauagacauuuucaaccccaaauaugauuguaagaucaugacuuccaaaaccgacgucucuagcucagugaucacaagucugggagcaauuguauccugcuacgguaagacuaaauguaccgcuagcaauaagugcaggggcaucauuaagacauuuucuaacgggugugauuauguuucaaauaaaggaguggacaccgucagugugggcaacacucuuuacuaugucaauaagcaagaggguaaaagccuguacgugaagggggaaccuauaaucaacuucuaugacccauugguuuuuccguccgaugaguucgacgccucuauuucgcagguuaacgagaaaaucaaucagagccucgcguuuauccggaaguccgaugaacuguuacacaacguaaaugucggaaagucaacgacaaacauuaugauaaccacuaucauuaucgugauuaucguuauacugcuacuccugaucgccgugggccuuuucuuguacugcaaagcacgcugaggacuaguacuggcugcaucucccuuuccucuguccuccauccuucucccaggauggugaagggggaccugguacccagugauccccaccccaggauccuaaaucaugacuuaccugcuaauaaaaacucauuggaaaagugagaagaucuaaaaaaaaaaaaaaaaaaaaaaaaaaaaaaaaaaaaaaaaaaaaaaaaaaaaaaaaaaaaaaaaugcaucccccccccccccccccccccccccccccccaaaggcucuuuucagagccaccagaauu

SEQ ID NO: 17514 - RNA, 1896 nt, Artificial Sequence
  mRNA product Design f-5 comprising derived and/or modified sequence from HRSV(Memphis-37)__AIY60640.1__F-del_DSCav1_mut5 (opt4)
gggagacuuucccauucuguagcagaauuugguguugccuguggucuuggucccgcggagaagcuuaccauggagcugcccauccugaagaccaacgccaucaccaccauccuggccgccgugacccugugcuucgccagcagccagaacaucaccgaggaguucuaccagagcaccugcagcgccgugagcaagggcuaccugagcgcccugagaaccggcugguacaccagcgugaucaccaucgagcugagcaacaucaaggagaacaagugcaacggcaccgacgccaaggugaagcugaucaagcaggagcuggacaaguacaagaacgccgugaccgagcugcagcugcugaugcagagcacccccgccgccggcagcggcagcgccaucgccagcggcaucgccgugugcaaggugcugcaccuggagggcgaggugaacaagaucaagaacgcccugcugagcaccaacaaggccguggugagccugagcggcugcggcgugagcgugcugaccuucaaggugcuggaccugaagaacuacaucgacaagcagcugcugcccauccugaacaagcagagcugcagcaucagcaacaucgagaccgugaucgaguuccagcagaagaacaacagacugcuggagaucaccagagaguucagcgugaacgccggcgugaccacccccgugagcaccuacaugcugaccaacagcgagcugcugagccugaucaacgacaugcccaucaccaacgaccagaagaagcugaugagcaacaacgugcagaucgugagacagcagagcuacagcaucaugugcaucaucaaggaggaggugcuggccuacguggugcagcugccccuguacggcgugaucgacacccccugcuggaagcugcacaccagcccccugugcaccaccaacaccaaggagggcagcaacaucugccugaccagaaccgacagaggcugguacugcgacaacgccggcagcgugagcuucuucccccaggccgagaccugcaaggugcagagcaacagaguguucugcgacaccaugaacagcagaacccugcccagcgaggugaaccugugcaacaucgacaucuucaaccccaaguacgacugcaagaucaugaccagcaagaccgacgugagcagcagcgugaucaccagccugggcgccaucgugagcugcuacggcaagaccaagugcaccgccagcaacaagugcagaggcaucaucaagaccuucagcaacggcugcgacuacgugagcaacaagggcguggacaccgugagcgugggcaacacccuguacuacgugaacaagcaggagggcaagagccuguacgugaagggcgagcccaucaucaacuucuacgacccccugguguuccccagcgacgaguucgacgccagcaucagccaggugaacgagaagaucaaccagagccuggccuucaucagaaagagcgacgagcugcugcacaacgugaacgugggcaagagcaccaccaacaucaugaucaccaccaucaucaucgugaucaucgugauccugcugcugcugaucgccgugggccuguuccuguacugcaaggccagaugaggacuaguacuggcugcaucucccuuuccucuguccuccauccuucucccaggauggugaagggggaccugguacccagugauccccaccccaggauccuaaaucaugacuuaccugcuaauaaaaacucauuggaaaagugagaagaucuaaaaaaaaaaaaaaaaaaaaaaaaaaaaaaaaaaaaaaaaaaaaaaaaaaaaaaaaaaaaaaaaugcaucccccccccccccccccccccccccccccccaaaggcucuuuucagagccaccagaauu

SEQ ID NO: 17515 - RNA, 1896 nt, Artificial Sequence
  mRNA product Design f-5 comprising derived and/or modified sequence from HRSV(Memphis-37)__AIY60640.1__F-del_DSCav1_mut5 (opt5)
gggagacuuucccauucuguagcagaauuugguguugccuguggucuuggucccgcggagaagcuuaccauggagcugcccauccucaagaccaacgccauuacaacgauccuggcugccgugacccuuugcuucgcgagcucccagaauauuacagaagaguuuuaccaaucuaccuguagcgcugucuccaaaggcuaucugucugcccucagaacagggugguacaccagcguuaucacaauugaacuguccaacaucaaggagaauaaaugcaacggaaccgacgccaaggugaaacuuaucaagcaggaacuggauaaguauaaaaaugcugugacggagcuccagcugcugaugcagucuaccccugccgcuggcagcggguccgccauugcgagcggaaucgccgucuguaaggugcuccaccuggagggcgaaguuaacaaaauuaagaaugcccuucugucuacaaacaaagcuguggucucccucagcgggugcggagugucuguucugaccuucaaggugcuugaccugaagaauuacaucgauaaacaacuccugccgauucugaacaagcaguccuguagcaucucuaauauugagacagucaucgaauuucagcagaaaaacaaucggcuccuggagaucacccgcgaguucuccgugaacgcuggcgugacgacacccgucagcaccuauaugcuuacaaauuccgaacugcucucucugauuaacgacaugccuaucaccaacgaucaaaagaaacuuaugagcaauaacguucagauugugagacagcaguccuacagcaucaugugcauuaucaaggaggaagugcuggccuaugucgugcaacucccccuguacggcguuaucgacaccccuuguuggaaacugcauacaucuccccucugcacgaccaauacaaaggagggguccaacauuugucugacccggacagaucgcggaugguacugcgacaaugcgggcagcgugagcuuuuucccucaggccgaaaccuguaagguccagucuaacagaguguuuugcgauacgaugaacuccagaacacugccgucugagguuaaucucugcaauaucgacauuuucaaccccaaauaugauuguaagaucaugaccagcaaaaccgacguguccagcucugucauuacaucccugggggcuaucgugagcugcuacggaaagaccaaauguacagccucuaauaagugccggggcaucauuaagacguuuuccaacgggugugauuaugucagcaauaaaggaguggacaccguuuccgugggcaacacacuuuacuaugucaauaagcaagagggcaaaucucuguacgugaagggggaaccuaucauuaacuucuaugacccccucguuuuuccuagcgaugaguucgacgcuuccaucucucaggugaacgagaaaauuaaucagagccuggccuuuauccgcaaguccgaugaacugcuccacaacgucaaugugggaaagagcaccacaaacauuaugaucaccacgaucauuaucgugauuaucguuauucugcuucugcucaucgccgucggccuguuccuguacugcaaagcuagaugaggacuaguacuggcugcaucucccuuuccucuguccuccauccuucucccaggauggugaagggggaccugguacccagugauccccaccccaggauccuaaaucaugacuuaccugcuaauaaaaacucauuggaaaagugagaagaucuaaaaaaaaaaaaaaaaaaaaaaaaaaaaaaaaaaaaaaaaaaaaaaaaaaaaaaaaaaaaaaaaugcaucccccccccccccccccccccccccccccccaaaggcucuuuucagagccaccagaauu

SEQ ID NO: 17516 - RNA, 1896 nt, Artificial Sequence
  mRNA product Design f-5 comprising derived and/or modified sequence from HRSV(Memphis-37)__AIY60640.1__F-del_DSCav1_mut5 (opt6)
gggagacuuucccauucuguagcagaauuugguguugccuguggucuuggucccgcggagaagcuuaccauggaauuacccaucuuaaaaacaaaugcaauaacaacaauacuagcagccguaacauuaugcuucgccucaagccaaaacauaacagaagaauuuuaccaaagcacauguuccgccguaucaaaaggauaucucucagcacuacguacuggaugguauacauccguaaucacaauugaacuaucaaacauuaaagaaaacaaaugcaauggaacagaugcgaaaguaaaacuaauaaaacaagaauuagauaaauauaaaaaugcaguaaccgaacuacaacuacuaaugcaaucaacucccgcugccgguagcggauccgccauagcaagcggaauugcuguauguaaaguccuacaucuugaaggcgaagucaacaaaaucaaaaaugcauuacucucgaccaacaaagcagucguaucacuaucaggaugcggagucucaguauuaacuuuuaaaguccuugaccuaaaaaacuacauagacaaacaacuacuaccaauucuaaauaaacaaaguugcagcauauccaauaucgaaacaguuauagaauuucaacaaaaaaacaaccgccuacuagaaaucacuagagaauuuucaguaaaugcaggcguaaccacaccagucucuaccuauaugcuuaccaacucugaauuauuaucacuuauaaacgacaugcccauaacaaaugaucaaaaaaaacuaaugagcaacaacguacaaauaguaagacaacaaagcuacagcauuauguguauaauaaaagaagaaguguuagcuuauguaguccaacuaccccucuauggcguuaucgauacaccaugcuggaaauuacacacaagcccucuaugcacaacuaacaccaaagaaggcucuaacauaugcuuaacaagaacagauagaggaugguauugcgauaacgcaggaucaguaucauucuuuccacaagcagaaacauguaaaguacaaucuaaccgaguauucugcgacacaaugaacucuagaacacuacccucagaaguuaaucucuguaauauugacauuuucaauccaaaauacgauugcaaaauaaugaccucuaaaaccgacguaucauccucaguuauaacguccuuaggagcaaucguaagcugcuauggcaaaacaaaauguaccgcaucaaacaaaugcagaggaauaauaaaaacauucucaaacggcugugacuacguaagcaauaaagguguugacacaguuucaguaggaaauacacuauacuauguaaauaaacaagaaggaaaaucucucuauguaaaaggagaacccauaauaaacuucuacgacccacucguauuuccaagcgaugaauuugaugcgagcauuucccagguaaaugaaaaaauaaaucaaucacuagcauucaucagaaaaagugaugaauuacuacacaauguuaacguaggaaaaucaacaacaaauaucaugauaacaacaaucauaauagucauaaucguaauauuacuauuacuaauagcaguagguuuauuucuauacuguaaagcaagguaaggacuaguacuggcugcaucucccuuuccucuguccuccauccuucucccaggauggugaagggggaccugguacccagugauccccaccccaggauccuaaaucaugacuuaccugcuaauaaaaacucauuggaaaagugagaagaucuaaaaaaaaaaaaaaaaaaaaaaaaaaaaaaaaaaaaaaaaaaaaaaaaaaaaaaaaaaaaaaaaugcaucccccccccccccccccccccccccccccccaaaggcucuuuucagagccaccagaauu

SEQ ID NO: 17517 - RNA, 1896 nt, Artificial Sequence
  mRNA product Design f-5 comprising derived and/or modified sequence from HRSV(Memphis-37)__AIY60640.1__F-del_DSCav1_mut5 (opt11)
gggagacuuucccauucuguagcagaauuugguguugccuguggucuuggucccgcggagaagcuuaccauggaacuucccauccuaaaaaccaacgccauaacaacaauccucgcagcagucacccucugcuucgccucuucacaaaacaucaccgaagaauuuuaccaaucaaccugcuccgccguguccaaaggcuaccucucagcacugcgcacaggaugguauaccagcguaaucaccaucgaacucuccaacaucaaggaaaacaaaugcaacggcaccgaugccaaagucaaacucaucaagcaagaacuugacaaauacaaaaacgccgugaccgagcuacaacuccucaugcaguccacuccagccgccggcuccggcagcgccaucgccuccggcaucgccguaugcaaaguccuccaccucgaaggcgaaguaaacaaaaucaagaacgcacuccuaagcaccaacaaagccgucgucucacucuccgguugcggcgucagcguccuaacauucaaaguucucgaccucaaaaacuacauagacaaacaacuccuccccauccucaacaaacaauccugcuccauaucaaacaucgaaaccguuaucgaauuucaacaaaaaaacaaccgccuccuagaaaucacccgcgaauuuuccgucaacgcaggcgucaccacccccguuuccaccuauaugcucaccaacuccgaacuccucucccucaucaacgacaugcccauuaccaacgaccaaaagaaacuuaugagcaacaacguucaaaucguccgacaacaaucauacuccaucaugugcauuaucaaagaagaaguacucgccuacguaguacaauuaccccucuacggcguaaucgacaccccaugcuggaaacuacacaccuccccccucuguaccaccaacaccaaagaaggcucuaacaucugccucacccgcacagaccguggcugguauugcgauaacgcagggucugucuccuucuucccccaagccgaaacaugcaaaguccaauccaacagagucuucugcgacaccaugaacucgagaacccuccccuccgaagucaaccuaugcaacaucgacaucuucaacccaaaauacgacugcaaaaucaugacuucaaaaacagacgugagcucguccgucaucacaagccuaggagcuaucguauccugcuacggaaaaacaaaaugcacugcuuccaacaaaugccgcggaaucauaaaaaccuucuccaacggcugcgacuacgucagcaacaaaggcgucgacacagucuccguaggcaacacccuauacuacgucaauaaacaagaaggcaagucccuauaugucaaaggcgagcccaucaucaauuucuaugauccccucguuuucccauccgacgaauuugacgcauccaucucccaagucaacgaaaaaauaaaccaaagccucgcauucauccgcaaauccgacgaacuccuccacaacguaaacguaggaaaauccacaacuaacaucaugaucaccaccaucaucaucgucauuaucgucauccuacuccuccucauagcagucggccucuuccucuacugcaaagcacgcuagggacuaguacuggcugcaucucccuuuccucuguccuccauccuucucccaggauggugaagggggaccugguacccagugauccccaccccaggauccuaaaucaugacuuaccugcuaauaaaaacucauuggaaaagugagaagaucuaaaaaaaaaaaaaaaaaaaaaaaaaaaaaaaaaaaaaaaaaaaaaaaaaaaaaaaaaaaaaaaaugcaucccccccccccccccccccccccccccccccaaaggcucuuuucagagccaccagaauu

SEQ ID NO: 17518 - RNA, 1892 nt, Artificial Sequence
  mRNA product Design g-1 comprising derived and/or modified sequence from HRSV(Memphis-37)__AIY60640.1__F-del_DSCav1_mut5 (opt1)
gggagacuuucccauucuguagcagaauuugguguugccuguggucuuggucccgcggagaagcuuaccauggagcugcccauccucaagaccaacgccaucaccacgauccuggccgcggugacccugugcuucgccagcucccagaacaucaccgaggaguucuaccagagcacgugcuccgccgucagcaagggcuaccucuccgcccugcgcaccgggugguacaccagcgugaucaccaucgagcuguccaacaucaaggagaacaagugcaacggcaccgacgccaaggugaagcucaucaagcaggagcuggacaaguacaagaacgcggucacggagcugcagcuccugaugcagagcaccccggccgccggcuccgggagcgcgaucgccuccggcaucgccgucugcaaggugcugcaccucgagggcgaggugaacaagaucaagaacgcccugcuguccaccaacaaggccgucgugagccucuccggcugcggggugagcguccugaccuucaaggugcuggaccucaagaacuacaucgacaagcagcugcugcccauccugaacaagcagagcugcuccaucagcaacaucgagaccgucaucgaguuccagcagaagaacaaccgccuccuggagaucacgcgggaguucagcgugaacgcgggcgugaccacccccgucuccaccuacaugcugacgaacagcgagcuccugucccugaucaacgacaugccgaucaccaacgaccagaagaagcucaugagcaacaacgugcagaucgugcgccagcaguccuacagcaucaugugcaucaucaaggaggagguccuggccuacguggugcagcugccccucuacggggucaucgacacccccugcuggaagcugcacaccagcccccugugcacgaccaacaccaaggagggcuccaacaucugccucacccggacggaccgcgggugguacugcgacaacgccggcagcguguccuucuucccgcaggccgagaccugcaagguccagagcaaccggguguucugcgacaccaugaacucccggacccugcccagcgaggugaaccucugcaacaucgacaucuucaaccccaaguacgacugcaagaucaugacguccaagaccgacgucagcuccagcgugaucaccucccugggcgccaucgugagcugcuacgggaagaccaagugcacggcgagcaacaagugccgcggcaucaucaagaccuucuccaacgggugcgacuacgucagcaacaagggcguggacaccguguccgucggcaacacccuguacuacgugaacaagcaggagggcaagagccucuacgugaagggggagcccaucaucaacuucuacgacccgcuggucuuccccuccgacgaguucgacgccagcaucucccaggugaacgagaagaucaaccagagccuggccuucauccggaaguccgacgagcuccugcacaacgugaacgucggcaagagcaccacgaacaucaugaucaccaccaucaucaucgugaucaucgugauccugcugcuccugaucgccgucgggcuguuccucuacugcaaggcccgcugaggacuaguggaagcauuuuccuggcugauuaaaagaaauuacucagcuauggucaucuguuccuguuagaaggcuaugcagcauauuauauacuaugcgcauguuaugaaaugcauaauaaaaaauuuuaaaaaaucuaaaagaucuaaaaaaaaaaaaaaaaaaaaaaaaaaaaaaaaaaaaaaaaaaaaaaaaaaaaaaaaaaaaaaaaugcaucccccccccccccccccccccccccccccccaaaggcucuuuucagagccaccagaauu

SEQ ID NO: 17519 - RNA, 1892 nt, Artificial Sequence
  mRNA product Design g-1 comprising derived and/or modified sequence from HRSV(Memphis-37)__AIY60640.1__F-del_DSCav1_mut5 (opt1)
gggagacuuucccauucuguagcagaauuugguguugccuguggucuuggucccgcggagaagcuuaccauggagcugcccauccucaagaccaacgccaucaccacgauccuggccgcggugacccugugcuucgccagcucccagaacaucaccgaggaguucuaccagagcacgugcuccgccgucagcaagggcuaccucuccgcccugcgcaccgggugguacaccagcgugaucaccaucgagcuguccaacaucaaggagaacaagugcaacggcaccgacgccaaggugaagcucaucaagcaggagcuggacaaguacaagaacgcggucacggagcugcagcuccugaugcagagcaccccggccgccggguccggcagcgccaucgcguccgggaucgccgugugcaaggugcugcaccucgagggcgaggucaacaagaucaagaacgcccugcugagcaccaacaaggccguggugucccucagcggcugcggggucuccgugcugaccuucaaggugcuggaccucaagaacuacaucgacaagcagcugcugcccauccucaacaagcagagcugcuccaucagcaacaucgagacggucaucgaguuccagcagaagaacaaccggcugcuggagaucacccgcgaguucuccgugaacgccggcgugaccacccccgucagcacguacaugcucaccaacagcgagcugcugucccucaucaacgacaugcccaucaccaacgaccagaagaagcugaugagcaacaacgugcagaucgugcggcagcaguccuacagcaucaugugcaucaucaaggaggagguccuggcguacguggugcagcucccgcuguacggggucaucgacacccccugcuggaagcugcacacgagcccccucugcaccaccaacaccaaggagggcuccaacaucugccugacgcgcaccgaccgggggugguacugcgacaacgccggcuccgugagcuucuucccccaggccgagaccugcaaggugcaguccaaccgcgucuucugcgacaccaugaacagccggacgcucccguccgaggugaaccugugcaacaucgacaucuucaaccccaaguacgacugcaagaucaugaccagcaagaccgacgucuccagcuccgugaucaccagccugggcgccaucguguccugcuacgggaagacgaagugcaccgccagcaacaagugccggggcaucaucaagaccuucuccaacgggugcgacuacgucagcaacaagggcguggacaccgugagcgucggcaacacgcucuacuacgugaacaagcaggaggggaagucccuguacgugaagggcgagcccaucaucaacuucuacgacccccuggucuucccgagcgacgaguucgacgcguccaucagccaggugaacgagaagaucaaccagucccucgccuucauccgcaagagcgacgagcugcugcacaacgugaacgucgggaaguccaccaccaacaucaugaucaccaccaucaucaucgugaucaucgugauccuccugcugcucaucgccgucggccuguuccuguacugcaaggcccggugaggacuaguggaagcauuuuccuggcugauuaaaagaaauuacucagcuauggucaucuguuccuguuagaaggcuaugcagcauauuauauacuaugcgcauguuaugaaaugcauaauaaaaaauuuuaaaaaaucuaaaagaucuaaaaaaaaaaaaaaaaaaaaaaaaaaaaaaaaaaaaaaaaaaaaaaaaaaaaaaaaaaaaaaaaugcaucccccccccccccccccccccccccccccccaaaggcucuuuucagagccaccagaauu

SEQ ID NO: 17520 - RNA, 1892 nt, Artificial Sequence
  mRNA product Design g-1 comprising derived and/or modified sequence from HRSV(Memphis-37)__AIY60640.1__F-del_DSCav1_mut5 (opt2)
gggagacuuucccauucuguagcagaauuugguguugccuguggucuuggucccgcggagaagcuuaccauggagcuccccauccucaagaccaacgccaucaccaccauccucgccgccgucacccucugcuucgccuccucccagaacaucaccgaggaguucuaccaguccaccugcuccgccgucuccaagggcuaccucuccgcccuccgcaccggcugguacaccuccgucaucaccaucgagcucuccaacaucaaggagaacaagugcaacggcaccgacgccaaggucaagcucaucaagcaggagcucgacaaguacaagaacgccgucaccgagcuccagcuccucaugcaguccacccccgccgccggcuccggcuccgccaucgccuccggcaucgccgucugcaagguccuccaccucgagggcgaggucaacaagaucaagaacgcccuccucuccaccaacaaggccgucgucucccucuccggcugcggcgucuccguccucaccuucaagguccucgaccucaagaacuacaucgacaagcagcuccuccccauccucaacaagcaguccugcuccaucuccaacaucgagaccgucaucgaguuccagcagaagaacaaccgccuccucgagaucacccgcgaguucuccgucaacgccggcgucaccacccccgucuccaccuacaugcucaccaacuccgagcuccucucccucaucaacgacaugcccaucaccaacgaccagaagaagcucauguccaacaacguccagaucguccgccagcaguccuacuccaucaugugcaucaucaaggaggagguccucgccuacgucguccagcucccccucuacggcgucaucgacacccccugcuggaagcuccacaccuccccccucugcaccaccaacaccaaggagggcuccaacaucugccucacccgcaccgaccgcggcugguacugcgacaacgccggcuccgucuccuucuucccccaggccgagaccugcaagguccaguccaaccgcgucuucugcgacaccaugaacucccgcacccuccccuccgaggucaaccucugcaacaucgacaucuucaaccccaaguacgacugcaagaucaugaccuccaagaccgacgucuccuccuccgucaucaccucccucggcgccaucgucuccugcuacggcaagaccaagugcaccgccuccaacaagugccgcggcaucaucaagaccuucuccaacggcugcgacuacgucuccaacaagggcgucgacaccgucuccgucggcaacacccucuacuacgucaacaagcaggagggcaagucccucuacgucaagggcgagcccaucaucaacuucuacgacccccucgucuuccccuccgacgaguucgacgccuccaucucccaggucaacgagaagaucaaccagucccucgccuucauccgcaaguccgacgagcuccuccacaacgucaacgucggcaaguccaccaccaacaucaugaucaccaccaucaucaucgucaucaucgucauccuccuccuccucaucgccgucggccucuuccucuacugcaaggcccgcugaggacuaguggaagcauuuuccuggcugauuaaaagaaauuacucagcuauggucaucuguuccuguuagaaggcuaugcagcauauuauauacuaugcgcauguuaugaaaugcauaauaaaaaauuuuaaaaaaucuaaaagaucuaaaaaaaaaaaaaaaaaaaaaaaaaaaaaaaaaaaaaaaaaaaaaaaaaaaaaaaaaaaaaaaaugcaucccccccccccccccccccccccccccccccaaaggcucuuuucagagccaccagaauu

SEQ ID NO: 17521 - RNA, 1892 nt, Artificial Sequence
  mRNA product Design g-1 comprising derived and/or modified sequence from HRSV(Memphis-37)__AIY60640.1__F-del_DSCav1_mut5 (opt3)
gggagacuuucccauucuguagcagaauuugguguugccuguggucuuggucccgcggagaagcuuaccauggagcugcccauccucaagaccaacgccauuacaacuauacuugcugcagugacgcugugcuucgccagcucccagaauaucaccgaagaguuuuaccaaucuacauguucagcggucaguaaaggcuauuugagcgcuuuaagaacugggugguacaccuccguuauuacaaucgaacugucuaacauuaaggagaauaaaugcaacggaaccgacgccaaggugaaacuaaucaagcaggaacucgauaaguauaaaaaugcaguaacugagcugcagcuucugaugcagucgaccccugccgcugguucaggcagcgcaauagccagugggaucgcuguguguaaggucuugcaccucgagggagaagugaacaaaauuaagaaugcccugcuguccacaaacaaagcgguugugucucucagcggcugcggugucuccguguuaacguucaagguacuggaccuuaagaauuacaucgauaaacaauugcugccaauucuaaacaagcagucauguaguaucagcaauauagagacuguuauugaauuucagcagaaaaacaauaggcuccuggagaucacccgggaguucucugugaacgcaggggucacaacuccgguguccaccuauaugcuuacaaauucagaacuguugagccucauuaacgacaugcccaucaccaacgaucaaaagaaacugaugaguaauaacgugcagaucguccgccagcagucuuacuccauuaugugcauaaucaaggaggaaguuuuagccuaugugguacaacugccucucuacggagugauugacacgccauguuggaaacuucauacuagcccccugugcacaaccaauacuaaggagggcucgaacaucuguuugacacgaaccgaucguggcugguacugcgacaaugcugggucugucuccuuuuucccucaggccgaaacguguaaggugcagucaaacagaguguuuugcgauaccaugaauaguagaacacugccaagcgaggugaaccucugcaauauagacauuuucaaccccaaauaugauuguaagaucaugacuuccaaaaccgacgucucuagcucagugaucacaagucugggagcaauuguauccugcuacgguaagacuaaauguaccgcuagcaauaagugcaggggcaucauuaagacauuuucuaacgggugugauuauguuucaaauaaaggaguggacaccgucagugugggcaacacucuuuacuaugucaauaagcaagaggguaaaagccuguacgugaagggggaaccuauaaucaacuucuaugacccauugguuuuuccguccgaugaguucgacgccucuauuucgcagguuaacgagaaaaucaaucagagccucgcguuuauccggaaguccgaugaacuguuacacaacguaaaugucggaaagucaacgacaaacauuaugauaaccacuaucauuaucgugauuaucguuauacugcuacuccugaucgccgugggccuuuucuuguacugcaaagcacgcugaggacuaguggaagcauuuuccuggcugauuaaaagaaauuacucagcuauggucaucuguuccuguuagaaggcuaugcagcauauuauauacuaugcgcauguuaugaaaugcauaauaaaaaauuuuaaaaaaucuaaaagaucuaaaaaaaaaaaaaaaaaaaaaaaaaaaaaaaaaaaaaaaaaaaaaaaaaaaaaaaaaaaaaaaaugcaucccccccccccccccccccccccccccccccaaaggcucuuuucagagccaccagaauu

SEQ ID NO: 17522 - RNA, 1892 nt, Artificial Sequence
  mRNA product Design g-1 comprising derived and/or modified sequence from HRSV(Memphis-37)__AIY60640.1__F-del_DSCav1_mut5 (opt4)
gggagacuuucccauucuguagcagaauuugguguugccuguggucuuggucccgcggagaagcuuaccauggagcugcccauccugaagaccaacgccaucaccaccauccuggccgccgugacccugugcuucgccagcagccagaacaucaccgaggaguucuaccagagcaccugcagcgccgugagcaagggcuaccugagcgcccugagaaccggcugguacaccagcgugaucaccaucgagcugagcaacaucaaggagaacaagugcaacggcaccgacgccaaggugaagcugaucaagcaggagcuggacaaguacaagaacgccgugaccgagcugcagcugcugaugcagagcacccccgccgccggcagcggcagcgccaucgccagcggcaucgccgugugcaaggugcugcaccuggagggcgaggugaacaagaucaagaacgcccugcugagcaccaacaaggccguggugagccugagcggcugcggcgugagcgugcugaccuucaaggugcuggaccugaagaacuacaucgacaagcagcugcugcccauccugaacaagcagagcugcagcaucagcaacaucgagaccgugaucgaguuccagcagaagaacaacagacugcuggagaucaccagagaguucagcgugaacgccggcgugaccacccccgugagcaccuacaugcugaccaacagcgagcugcugagccugaucaacgacaugcccaucaccaacgaccagaagaagcugaugagcaacaacgugcagaucgugagacagcagagcuacagcaucaugugcaucaucaaggaggaggugcuggccuacguggugcagcugccccuguacggcgugaucgacacccccugcuggaagcugcacaccagcccccugugcaccaccaacaccaaggagggcagcaacaucugccugaccagaaccgacagaggcugguacugcgacaacgccggcagcgugagcuucuucccccaggccgagaccugcaaggugcagagcaacagaguguucugcgacaccaugaacagcagaacccugcccagcgaggugaaccugugcaacaucgacaucuucaaccccaaguacgacugcaagaucaugaccagcaagaccgacgugagcagcagcgugaucaccagccugggcgccaucgugagcugcuacggcaagaccaagugcaccgccagcaacaagugcagaggcaucaucaagaccuucagcaacggcugcgacuacgugagcaacaagggcguggacaccgugagcgugggcaacacccuguacuacgugaacaagcaggagggcaagagccuguacgugaagggcgagcccaucaucaacuucuacgacccccugguguuccccagcgacgaguucgacgccagcaucagccaggugaacgagaagaucaaccagagccuggccuucaucagaaagagcgacgagcugcugcacaacgugaacgugggcaagagcaccaccaacaucaugaucaccaccaucaucaucgugaucaucgugauccugcugcugcugaucgccgugggccuguuccuguacugcaaggccagaugaggacuaguggaagcauuuuccuggcugauuaaaagaaauuacucagcuauggucaucuguuccuguuagaaggcuaugcagcauauuauauacuaugcgcauguuaugaaaugcauaauaaaaaauuuuaaaaaaucuaaaagaucuaaaaaaaaaaaaaaaaaaaaaaaaaaaaaaaaaaaaaaaaaaaaaaaaaaaaaaaaaaaaaaaaugcaucccccccccccccccccccccccccccccccaaaggcucuuuucagagccaccagaauu

SEQ ID NO: 17523 - RNA, 1892 nt, Artificial Sequence
  mRNA product Design g-1 comprising derived and/or modified sequence from HRSV(Memphis-37)__AIY60640.1__F-del_DSCav1_mut5 (opt5)
gggagacuuucccauucuguagcagaauuugguguugccuguggucuuggucccgcggagaagcuuaccauggagcugcccauccucaagaccaacgccauuacaacgauccuggcugccgugacccuuugcuucgcgagcucccagaauauuacagaagaguuuuaccaaucuaccuguagcgcugucuccaaaggcuaucugucugcccucagaacagggugguacaccagcguuaucacaauugaacuguccaacaucaaggagaauaaaugcaacggaaccgacgccaaggugaaacuuaucaagcaggaacuggauaaguauaaaaaugcugugacggagcuccagcugcugaugcagucuaccccugccgcuggcagcggguccgccauugcgagcggaaucgccgucuguaaggugcuccaccuggagggcgaaguuaacaaaauuaagaaugcccuucugucuacaaacaaagcuguggucucccucagcgggugcggagugucuguucugaccuucaaggugcuugaccugaagaauuacaucgauaaacaacuccugccgauucugaacaagcaguccuguagcaucucuaauauugagacagucaucgaauuucagcagaaaaacaaucggcuccuggagaucacccgcgaguucuccgugaacgcuggcgugacgacacccgucagcaccuauaugcuuacaaauuccgaacugcucucucugauuaacgacaugccuaucaccaacgaucaaaagaaacuuaugagcaauaacguucagauugugagacagcaguccuacagcaucaugugcauuaucaaggaggaagugcuggccuaugucgugcaacucccccuguacggcguuaucgacaccccuuguuggaaacugcauacaucuccccucugcacgaccaauacaaaggagggguccaacauuugucugacccggacagaucgcggaugguacugcgacaaugcgggcagcgugagcuuuuucccucaggccgaaaccuguaagguccagucuaacagaguguuuugcgauacgaugaacuccagaacacugccgucugagguuaaucucugcaauaucgacauuuucaaccccaaauaugauuguaagaucaugaccagcaaaaccgacguguccagcucugucauuacaucccugggggcuaucgugagcugcuacggaaagaccaaauguacagccucuaauaagugccggggcaucauuaagacguuuuccaacgggugugauuaugucagcaauaaaggaguggacaccguuuccgugggcaacacacuuuacuaugucaauaagcaagagggcaaaucucuguacgugaagggggaaccuaucauuaacuucuaugacccccucguuuuuccuagcgaugaguucgacgcuuccaucucucaggugaacgagaaaauuaaucagagccuggccuuuauccgcaaguccgaugaacugcuccacaacgucaaugugggaaagagcaccacaaacauuaugaucaccacgaucauuaucgugauuaucguuauucugcuucugcucaucgccgucggccuguuccuguacugcaaagcuagaugaggacuaguggaagcauuuuccuggcugauuaaaagaaauuacucagcuauggucaucuguuccuguuagaaggcuaugcagcauauuauauacuaugcgcauguuaugaaaugcauaauaaaaaauuuuaaaaaaucuaaaagaucuaaaaaaaaaaaaaaaaaaaaaaaaaaaaaaaaaaaaaaaaaaaaaaaaaaaaaaaaaaaaaaaaugcaucccccccccccccccccccccccccccccccaaaggcucuuuucagagccaccagaauu

SEQ ID NO: 17524 - RNA, 1892 nt, Artificial Sequence
  mRNA product Design g-1 comprising derived and/or modified sequence from HRSV(Memphis-37)__AIY60640.1__F-del_DSCav1_mut5 (opt6)
gggagacuuucccauucuguagcagaauuugguguugccuguggucuuggucccgcggagaagcuuaccauggaauuacccaucuuaaaaacaaaugcaauaacaacaauacuagcagccguaacauuaugcuucgccucaagccaaaacauaacagaagaauuuuaccaaagcacauguuccgccguaucaaaaggauaucucucagcacuacguacuggaugguauacauccguaaucacaauugaacuaucaaacauuaaagaaaacaaaugcaauggaacagaugcgaaaguaaaacuaauaaaacaagaauuagauaaauauaaaaaugcaguaaccgaacuacaacuacuaaugcaaucaacucccgcugccgguagcggauccgccauagcaagcggaauugcuguauguaaaguccuacaucuugaaggcgaagucaacaaaaucaaaaaugcauuacucucgaccaacaaagcagucguaucacuaucaggaugcggagucucaguauuaacuuuuaaaguccuugaccuaaaaaacuacauagacaaacaacuacuaccaauucuaaauaaacaaaguugcagcauauccaauaucgaaacaguuauagaauuucaacaaaaaaacaaccgccuacuagaaaucacuagagaauuuucaguaaaugcaggcguaaccacaccagucucuaccuauaugcuuaccaacucugaauuauuaucacuuauaaacgacaugcccauaacaaaugaucaaaaaaaacuaaugagcaacaacguacaaauaguaagacaacaaagcuacagcauuauguguauaauaaaagaagaaguguuagcuuauguaguccaacuaccccucuauggcguuaucgauacaccaugcuggaaauuacacacaagcccucuaugcacaacuaacaccaaagaaggcucuaacauaugcuuaacaagaacagauagaggaugguauugcgauaacgcaggaucaguaucauucuuuccacaagcagaaacauguaaaguacaaucuaaccgaguauucugcgacacaaugaacucuagaacacuacccucagaaguuaaucucuguaauauugacauuuucaauccaaaauacgauugcaaaauaaugaccucuaaaaccgacguaucauccucaguuauaacguccuuaggagcaaucguaagcugcuauggcaaaacaaaauguaccgcaucaaacaaaugcagaggaauaauaaaaacauucucaaacggcugugacuacguaagcaauaaagguguugacacaguuucaguaggaaauacacuauacuauguaaauaaacaagaaggaaaaucucucuauguaaaaggagaacccauaauaaacuucuacgacccacucguauuuccaagcgaugaauuugaugcgagcauuucccagguaaaugaaaaaauaaaucaaucacuagcauucaucagaaaaagugaugaauuacuacacaauguuaacguaggaaaaucaacaacaaauaucaugauaacaacaaucauaauagucauaaucguaauauuacuauuacuaauagcaguagguuuauuucuauacuguaaagcaagguaaggacuaguggaagcauuuuccuggcugauuaaaagaaauuacucagcuauggucaucuguuccuguuagaaggcuaugcagcauauuauauacuaugcgcauguuaugaaaugcauaauaaaaaauuuuaaaaaaucuaaaagaucuaaaaaaaaaaaaaaaaaaaaaaaaaaaaaaaaaaaaaaaaaaaaaaaaaaaaaaaaaaaaaaaaugcaucccccccccccccccccccccccccccccccaaaggcucuuuucagagccaccagaauu

SEQ ID NO: 17525 - RNA, 1892 nt, Artificial Sequence
  mRNA product Design g-1 comprising derived and/or modified sequence from HRSV(Memphis-37)__AIY60640.1__F-del_DSCav1_mut5 (opt11)
gggagacuuucccauucuguagcagaauuugguguugccuguggucuuggucccgcggagaagcuuaccauggaacuucccauccuaaaaaccaacgccauaacaacaauccucgcagcagucacccucugcuucgccucuucacaaaacaucaccgaagaauuuuaccaaucaaccugcuccgccguguccaaaggcuaccucucagcacugcgcacaggaugguauaccagcguaaucaccaucgaacucuccaacaucaaggaaaacaaaugcaacggcaccgaugccaaagucaaacucaucaagcaagaacuugacaaauacaaaaacgccgugaccgagcuacaacuccucaugcaguccacuccagccgccggcuccggcagcgccaucgccuccggcaucgccguaugcaaaguccuccaccucgaaggcgaaguaaacaaaaucaagaacgcacuccuaagcaccaacaaagccgucgucucacucuccgguugcggcgucagcguccuaacauucaaaguucucgaccucaaaaacuacauagacaaacaacuccuccccauccucaacaaacaauccugcuccauaucaaacaucgaaaccguuaucgaauuucaacaaaaaaacaaccgccuccuagaaaucacccgcgaauuuuccgucaacgcaggcgucaccacccccguuuccaccuauaugcucaccaacuccgaacuccucucccucaucaacgacaugcccauuaccaacgaccaaaagaaacuuaugagcaacaacguucaaaucguccgacaacaaucauacuccaucaugugcauuaucaaagaagaaguacucgccuacguaguacaauuaccccucuacggcguaaucgacaccccaugcuggaaacuacacaccuccccccucuguaccaccaacaccaaagaaggcucuaacaucugccucacccgcacagaccguggcugguauugcgauaacgcagggucugucuccuucuucccccaagccgaaacaugcaaaguccaauccaacagagucuucugcgacaccaugaacucgagaacccuccccuccgaagucaaccuaugcaacaucgacaucuucaacccaaaauacgacugcaaaaucaugacuucaaaaacagacgugagcucguccgucaucacaagccuaggagcuaucguauccugcuacggaaaaacaaaaugcacugcuuccaacaaaugccgcggaaucauaaaaaccuucuccaacggcugcgacuacgucagcaacaaaggcgucgacacagucuccguaggcaacacccuauacuacgucaauaaacaagaaggcaagucccuauaugucaaaggcgagcccaucaucaauuucuaugauccccucguuuucccauccgacgaauuugacgcauccaucucccaagucaacgaaaaaauaaaccaaagccucgcauucauccgcaaauccgacgaacuccuccacaacguaaacguaggaaaauccacaacuaacaucaugaucaccaccaucaucaucgucauuaucgucauccuacuccuccucauagcagucggccucuuccucuacugcaaagcacgcuagggacuaguggaagcauuuuccuggcugauuaaaagaaauuacucagcuauggucaucuguuccuguuagaaggcuaugcagcauauuauauacuaugcgcauguuaugaaaugcauaauaaaaaauuuuaaaaaaucuaaaagaucuaaaaaaaaaaaaaaaaaaaaaaaaaaaaaaaaaaaaaaaaaaaaaaaaaaaaaaaaaaaaaaaaugcaucccccccccccccccccccccccccccccccaaaggcucuuuucagagccaccagaauu

SEQ ID NO: 17526 - RNA, 1907 nt, Artificial Sequence
  mRNA product Design g-2 comprising derived and/or modified sequence from HRSV(Memphis-37)__AIY60640.1__F-del_DSCav1_mut5 (opt1)
gggagaguccgcucagccagguugcagaagcggcuuagcguguguccuaaucuucucucugcguguagguaggccugugccgcaaacaagcuuaccauggagcugcccauccucaagaccaacgccaucaccacgauccuggccgcggugacccugugcuucgccagcucccagaacaucaccgaggaguucuaccagagcacgugcuccgccgucagcaagggcuaccucuccgcccugcgcaccgggugguacaccagcgugaucaccaucgagcuguccaacaucaaggagaacaagugcaacggcaccgacgccaaggugaagcucaucaagcaggagcuggacaaguacaagaacgcggucacggagcugcagcuccugaugcagagcaccccggccgccggcuccgggagcgcgaucgccuccggcaucgccgucugcaaggugcugcaccucgagggcgaggugaacaagaucaagaacgcccugcuguccaccaacaaggccgucgugagccucuccggcugcggggugagcguccugaccuucaaggugcuggaccucaagaacuacaucgacaagcagcugcugcccauccugaacaagcagagcugcuccaucagcaacaucgagaccgucaucgaguuccagcagaagaacaaccgccuccuggagaucacgcgggaguucagcgugaacgcgggcgugaccacccccgucuccaccuacaugcugacgaacagcgagcuccugucccugaucaacgacaugccgaucaccaacgaccagaagaagcucaugagcaacaacgugcagaucgugcgccagcaguccuacagcaucaugugcaucaucaaggaggagguccuggccuacguggugcagcugccccucuacggggucaucgacacccccugcuggaagcugcacaccagcccccugugcacgaccaacaccaaggagggcuccaacaucugccucacccggacggaccgcgggugguacugcgacaacgccggcagcguguccuucuucccgcaggccgagaccugcaagguccagagcaaccggguguucugcgacaccaugaacucccggacccugcccagcgaggugaaccucugcaacaucgacaucuucaaccccaaguacgacugcaagaucaugacguccaagaccgacgucagcuccagcgugaucaccucccugggcgccaucgugagcugcuacgggaagaccaagugcacggcgagcaacaagugccgcggcaucaucaagaccuucuccaacgggugcgacuacgucagcaacaagggcguggacaccguguccgucggcaacacccuguacuacgugaacaagcaggagggcaagagccucuacgugaagggggagcccaucaucaacuucuacgacccgcuggucuuccccuccgacgaguucgacgccagcaucucccaggugaacgagaagaucaaccagagccuggccuucauccggaaguccgacgagcuccugcacaacgugaacgucggcaagagcaccacgaacaucaugaucaccaccaucaucaucgugaucaucgugauccugcugcuccugaucgccgucgggcuguuccucuacugcaaggcccgcugaggacuaguaauaaggaaacuguaugaaugucugugggcaggaagugaagagauccuucuguaaagguuuuuggaauuaugucugcugaauaauaaacuuuuuugaaauaauaaaucugguagaaaaaugagaucuaaaaaaaaaaaaaaaaaaaaaaaaaaaaaaaaaaaaaaaaaaaaaaaaaaaaaaaaaaaaaaaaugcaucccccccccccccccccccccccccccccccaaaggcucuuuucagagccaccagaauu

SEQ ID NO: 17527 - RNA, 1907 nt, Artificial Sequence
  mRNA product Design g-2 comprising derived and/or modified sequence from HRSV(Memphis-37)__AIY60640.1__F-del_DSCav1_mut5 (opt1)
gggagaguccgcucagccagguugcagaagcggcuuagcguguguccuaaucuucucucugcguguagguaggccugugccgcaaacaagcuuaccauggagcugcccauccucaagaccaacgccaucaccacgauccuggccgcggugacccugugcuucgccagcucccagaacaucaccgaggaguucuaccagagcacgugcuccgccgucagcaagggcuaccucuccgcccugcgcaccgggugguacaccagcgugaucaccaucgagcuguccaacaucaaggagaacaagugcaacggcaccgacgccaaggugaagcucaucaagcaggagcuggacaaguacaagaacgcggucacggagcugcagcuccugaugcagagcaccccggccgccggguccggcagcgccaucgcguccgggaucgccgugugcaaggugcugcaccucgagggcgaggucaacaagaucaagaacgcccugcugagcaccaacaaggccguggugucccucagcggcugcggggucuccgugcugaccuucaaggugcuggaccucaagaacuacaucgacaagcagcugcugcccauccucaacaagcagagcugcuccaucagcaacaucgagacggucaucgaguuccagcagaagaacaaccggcugcuggagaucacccgcgaguucuccgugaacgccggcgugaccacccccgucagcacguacaugcucaccaacagcgagcugcugucccucaucaacgacaugcccaucaccaacgaccagaagaagcugaugagcaacaacgugcagaucgugcggcagcaguccuacagcaucaugugcaucaucaaggaggagguccuggcguacguggugcagcucccgcuguacggggucaucgacacccccugcuggaagcugcacacgagcccccucugcaccaccaacaccaaggagggcuccaacaucugccugacgcgcaccgaccgggggugguacugcgacaacgccggcuccgugagcuucuucccccaggccgagaccugcaaggugcaguccaaccgcgucuucugcgacaccaugaacagccggacgcucccguccgaggugaaccugugcaacaucgacaucuucaaccccaaguacgacugcaagaucaugaccagcaagaccgacgucuccagcuccgugaucaccagccugggcgccaucguguccugcuacgggaagacgaagugcaccgccagcaacaagugccggggcaucaucaagaccuucuccaacgggugcgacuacgucagcaacaagggcguggacaccgugagcgucggcaacacgcucuacuacgugaacaagcaggaggggaagucccuguacgugaagggcgagcccaucaucaacuucuacgacccccuggucuucccgagcgacgaguucgacgcguccaucagccaggugaacgagaagaucaaccagucccucgccuucauccgcaagagcgacgagcugcugcacaacgugaacgucgggaaguccaccaccaacaucaugaucaccaccaucaucaucgugaucaucgugauccuccugcugcucaucgccgucggccuguuccuguacugcaaggcccggugaggacuaguaauaaggaaacuguaugaaugucugugggcaggaagugaagagauccuucuguaaagguuuuuggaauuaugucugcugaauaauaaacuuuuuugaaauaauaaaucugguagaaaaaugagaucuaaaaaaaaaaaaaaaaaaaaaaaaaaaaaaaaaaaaaaaaaaaaaaaaaaaaaaaaaaaaaaaaugcaucccccccccccccccccccccccccccccccaaaggcucuuuucagagccaccagaauu

SEQ ID NO: 17528 - RNA, 1907 nt, Artificial Sequence
  mRNA product Design g-2 comprising derived and/or modified sequence from HRSV(Memphis-37)__AIY60640.1__F-del_DSCav1_mut5 (opt2)
gggagaguccgcucagccagguugcagaagcggcuuagcguguguccuaaucuucucucugcguguagguaggccugugccgcaaacaagcuuaccauggagcuccccauccucaagaccaacgccaucaccaccauccucgccgccgucacccucugcuucgccuccucccagaacaucaccgaggaguucuaccaguccaccugcuccgccgucuccaagggcuaccucuccgcccuccgcaccggcugguacaccuccgucaucaccaucgagcucuccaacaucaaggagaacaagugcaacggcaccgacgccaaggucaagcucaucaagcaggagcucgacaaguacaagaacgccgucaccgagcuccagcuccucaugcaguccacccccgccgccggcuccggcuccgccaucgccuccggcaucgccgucugcaagguccuccaccucgagggcgaggucaacaagaucaagaacgcccuccucuccaccaacaaggccgucgucucccucuccggcugcggcgucuccguccucaccuucaagguccucgaccucaagaacuacaucgacaagcagcuccuccccauccucaacaagcaguccugcuccaucuccaacaucgagaccgucaucgaguuccagcagaagaacaaccgccuccucgagaucacccgcgaguucuccgucaacgccggcgucaccacccccgucuccaccuacaugcucaccaacuccgagcuccucucccucaucaacgacaugcccaucaccaacgaccagaagaagcucauguccaacaacguccagaucguccgccagcaguccuacuccaucaugugcaucaucaaggaggagguccucgccuacgucguccagcucccccucuacggcgucaucgacacccccugcuggaagcuccacaccuccccccucugcaccaccaacaccaaggagggcuccaacaucugccucacccgcaccgaccgcggcugguacugcgacaacgccggcuccgucuccuucuucccccaggccgagaccugcaagguccaguccaaccgcgucuucugcgacaccaugaacucccgcacccuccccuccgaggucaaccucugcaacaucgacaucuucaaccccaaguacgacugcaagaucaugaccuccaagaccgacgucuccuccuccgucaucaccucccucggcgccaucgucuccugcuacggcaagaccaagugcaccgccuccaacaagugccgcggcaucaucaagaccuucuccaacggcugcgacuacgucuccaacaagggcgucgacaccgucuccgucggcaacacccucuacuacgucaacaagcaggagggcaagucccucuacgucaagggcgagcccaucaucaacuucuacgacccccucgucuuccccuccgacgaguucgacgccuccaucucccaggucaacgagaagaucaaccagucccucgccuucauccgcaaguccgacgagcuccuccacaacgucaacgucggcaaguccaccaccaacaucaugaucaccaccaucaucaucgucaucaucgucauccuccuccuccucaucgccgucggccucuuccucuacugcaaggcccgcugaggacuaguaauaaggaaacuguaugaaugucugugggcaggaagugaagagauccuucuguaaagguuuuuggaauuaugucugcugaauaauaaacuuuuuugaaauaauaaaucugguagaaaaaugagaucuaaaaaaaaaaaaaaaaaaaaaaaaaaaaaaaaaaaaaaaaaaaaaaaaaaaaaaaaaaaaaaaaugcaucccccccccccccccccccccccccccccccaaaggcucuuuucagagccaccagaauu

SEQ ID NO: 17529 - RNA, 1907 nt, Artificial Sequence
  mRNA product Design g-2 comprising derived and/or modified sequence from HRSV(Memphis-37)__AIY60640.1__F-del_DSCav1_mut5 (opt3)
gggagaguccgcucagccagguugcagaagcggcuuagcguguguccuaaucuucucucugcguguagguaggccugugccgcaaacaagcuuaccauggagcugcccauccucaagaccaacgccauuacaacuauacuugcugcagugacgcugugcuucgccagcucccagaauaucaccgaagaguuuuaccaaucuacauguucagcggucaguaaaggcuauuugagcgcuuuaagaacugggugguacaccuccguuauuacaaucgaacugucuaacauuaaggagaauaaaugcaacggaaccgacgccaaggugaaacuaaucaagcaggaacucgauaaguauaaaaaugcaguaacugagcugcagcuucugaugcagucgaccccugccgcugguucaggcagcgcaauagccagugggaucgcuguguguaaggucuugcaccucgagggagaagugaacaaaauuaagaaugcccugcuguccacaaacaaagcgguugugucucucagcggcugcggugucuccguguuaacguucaagguacuggaccuuaagaauuacaucgauaaacaauugcugccaauucuaaacaagcagucauguaguaucagcaauauagagacuguuauugaauuucagcagaaaaacaauaggcuccuggagaucacccgggaguucucugugaacgcaggggucacaacuccgguguccaccuauaugcuuacaaauucagaacuguugagccucauuaacgacaugcccaucaccaacgaucaaaagaaacugaugaguaauaacgugcagaucguccgccagcagucuuacuccauuaugugcauaaucaaggaggaaguuuuagccuaugugguacaacugccucucuacggagugauugacacgccauguuggaaacuucauacuagcccccugugcacaaccaauacuaaggagggcucgaacaucuguuugacacgaaccgaucguggcugguacugcgacaaugcugggucugucuccuuuuucccucaggccgaaacguguaaggugcagucaaacagaguguuuugcgauaccaugaauaguagaacacugccaagcgaggugaaccucugcaauauagacauuuucaaccccaaauaugauuguaagaucaugacuuccaaaaccgacgucucuagcucagugaucacaagucugggagcaauuguauccugcuacgguaagacuaaauguaccgcuagcaauaagugcaggggcaucauuaagacauuuucuaacgggugugauuauguuucaaauaaaggaguggacaccgucagugugggcaacacucuuuacuaugucaauaagcaagaggguaaaagccuguacgugaagggggaaccuauaaucaacuucuaugacccauugguuuuuccguccgaugaguucgacgccucuauuucgcagguuaacgagaaaaucaaucagagccucgcguuuauccggaaguccgaugaacuguuacacaacguaaaugucggaaagucaacgacaaacauuaugauaaccacuaucauuaucgugauuaucguuauacugcuacuccugaucgccgugggccuuuucuuguacugcaaagcacgcugaggacuaguaauaaggaaacuguaugaaugucugugggcaggaagugaagagauccuucuguaaagguuuuuggaauuaugucugcugaauaauaaacuuuuuugaaauaauaaaucugguagaaaaaugagaucuaaaaaaaaaaaaaaaaaaaaaaaaaaaaaaaaaaaaaaaaaaaaaaaaaaaaaaaaaaaaaaaaugcaucccccccccccccccccccccccccccccccaaaggcucuuuucagagccaccagaauu

SEQ ID NO: 17530 - RNA, 1907 nt, Artificial Sequence
  mRNA product Design g-2 comprising derived and/or modified sequence from HRSV(Memphis-37)__AIY60640.1__F-del_DSCav1_mut5 (opt4)
gggagaguccgcucagccagguugcagaagcggcuuagcguguguccuaaucuucucucugcguguagguaggccugugccgcaaacaagcuuaccauggagcugcccauccugaagaccaacgccaucaccaccauccuggccgccgugacccugugcuucgccagcagccagaacaucaccgaggaguucuaccagagcaccugcagcgccgugagcaagggcuaccugagcgcccugagaaccggcugguacaccagcgugaucaccaucgagcugagcaacaucaaggagaacaagugcaacggcaccgacgccaaggugaagcugaucaagcaggagcuggacaaguacaagaacgccgugaccgagcugcagcugcugaugcagagcacccccgccgccggcagcggcagcgccaucgccagcggcaucgccgugugcaaggugcugcaccuggagggcgaggugaacaagaucaagaacgcccugcugagcaccaacaaggccguggugagccugagcggcugcggcgugagcgugcugaccuucaaggugcuggaccugaagaacuacaucgacaagcagcugcugcccauccugaacaagcagagcugcagcaucagcaacaucgagaccgugaucgaguuccagcagaagaacaacagacugcuggagaucaccagagaguucagcgugaacgccggcgugaccacccccgugagcaccuacaugcugaccaacagcgagcugcugagccugaucaacgacaugcccaucaccaacgaccagaagaagcugaugagcaacaacgugcagaucgugagacagcagagcuacagcaucaugugcaucaucaaggaggaggugcuggccuacguggugcagcugccccuguacggcgugaucgacacccccugcuggaagcugcacaccagcccccugugcaccaccaacaccaaggagggcagcaacaucugccugaccagaaccgacagaggcugguacugcgacaacgccggcagcgugagcuucuucccccaggccgagaccugcaaggugcagagcaacagaguguucugcgacaccaugaacagcagaacccugcccagcgaggugaaccugugcaacaucgacaucuucaaccccaaguacgacugcaagaucaugaccagcaagaccgacgugagcagcagcgugaucaccagccugggcgccaucgugagcugcuacggcaagaccaagugcaccgccagcaacaagugcagaggcaucaucaagaccuucagcaacggcugcgacuacgugagcaacaagggcguggacaccgugagcgugggcaacacccuguacuacgugaacaagcaggagggcaagagccuguacgugaagggcgagcccaucaucaacuucuacgacccccugguguuccccagcgacgaguucgacgccagcaucagccaggugaacgagaagaucaaccagagccuggccuucaucagaaagagcgacgagcugcugcacaacgugaacgugggcaagagcaccaccaacaucaugaucaccaccaucaucaucgugaucaucgugauccugcugcugcugaucgccgugggccuguuccuguacugcaaggccagaugaggacuaguaauaaggaaacuguaugaaugucugugggcaggaagugaagagauccuucuguaaagguuuuuggaauuaugucugcugaauaauaaacuuuuuugaaauaauaaaucugguagaaaaaugagaucuaaaaaaaaaaaaaaaaaaaaaaaaaaaaaaaaaaaaaaaaaaaaaaaaaaaaaaaaaaaaaaaaugcaucccccccccccccccccccccccccccccccaaaggcucuuuucagagccaccagaauu

SEQ ID NO: 17531 - RNA, 1907 nt, Artificial Sequence
  mRNA product Design g-2 comprising derived and/or modified sequence from HRSV(Memphis-37)__AIY60640.1__F-del_DSCav1_mut5 (opt5)
gggagaguccgcucagccagguugcagaagcggcuuagcguguguccuaaucuucucucugcguguagguaggccugugccgcaaacaagcuuaccauggagcugcccauccucaagaccaacgccauuacaacgauccuggcugccgugacccuuugcuucgcgagcucccagaauauuacagaagaguuuuaccaaucuaccuguagcgcugucuccaaaggcuaucugucugcccucagaacagggugguacaccagcguuaucacaauugaacuguccaacaucaaggagaauaaaugcaacggaaccgacgccaaggugaaacuuaucaagcaggaacuggauaaguauaaaaaugcugugacggagcuccagcugcugaugcagucuaccccugccgcuggcagcggguccgccauugcgagcggaaucgccgucuguaaggugcuccaccuggagggcgaaguuaacaaaauuaagaaugcccuucugucuacaaacaaagcuguggucucccucagcgggugcggagugucuguucugaccuucaaggugcuugaccugaagaauuacaucgauaaacaacuccugccgauucugaacaagcaguccuguagcaucucuaauauugagacagucaucgaauuucagcagaaaaacaaucggcuccuggagaucacccgcgaguucuccgugaacgcuggcgugacgacacccgucagcaccuauaugcuuacaaauuccgaacugcucucucugauuaacgacaugccuaucaccaacgaucaaaagaaacuuaugagcaauaacguucagauugugagacagcaguccuacagcaucaugugcauuaucaaggaggaagugcuggccuaugucgugcaacucccccuguacggcguuaucgacaccccuuguuggaaacugcauacaucuccccucugcacgaccaauacaaaggagggguccaacauuugucugacccggacagaucgcggaugguacugcgacaaugcgggcagcgugagcuuuuucccucaggccgaaaccuguaagguccagucuaacagaguguuuugcgauacgaugaacuccagaacacugccgucugagguuaaucucugcaauaucgacauuuucaaccccaaauaugauuguaagaucaugaccagcaaaaccgacguguccagcucugucauuacaucccugggggcuaucgugagcugcuacggaaagaccaaauguacagccucuaauaagugccggggcaucauuaagacguuuuccaacgggugugauuaugucagcaauaaaggaguggacaccguuuccgugggcaacacacuuuacuaugucaauaagcaagagggcaaaucucuguacgugaagggggaaccuaucauuaacuucuaugacccccucguuuuuccuagcgaugaguucgacgcuuccaucucucaggugaacgagaaaauuaaucagagccuggccuuuauccgcaaguccgaugaacugcuccacaacgucaaugugggaaagagcaccacaaacauuaugaucaccacgaucauuaucgugauuaucguuauucugcuucugcucaucgccgucggccuguuccuguacugcaaagcuagaugaggacuaguaauaaggaaacuguaugaaugucugugggcaggaagugaagagauccuucuguaaagguuuuuggaauuaugucugcugaauaauaaacuuuuuugaaauaauaaaucugguagaaaaaugagaucuaaaaaaaaaaaaaaaaaaaaaaaaaaaaaaaaaaaaaaaaaaaaaaaaaaaaaaaaaaaaaaaaugcaucccccccccccccccccccccccccccccccaaaggcucuuuucagagccaccagaauu

SEQ ID NO: 17532 - RNA, 1907 nt, Artificial Sequence
  mRNA product Design g-2 comprising derived and/or modified sequence from HRSV(Memphis-37)__AIY60640.1__F-del_DSCav1_mut5 (opt6)
gggagaguccgcucagccagguugcagaagcggcuuagcguguguccuaaucuucucucugcguguagguaggccugugccgcaaacaagcuuaccauggaauuacccaucuuaaaaacaaaugcaauaacaacaauacuagcagccguaacauuaugcuucgccucaagccaaaacauaacagaagaauuuuaccaaagcacauguuccgccguaucaaaaggauaucucucagcacuacguacuggaugguauacauccguaaucacaauugaacuaucaaacauuaaagaaaacaaaugcaauggaacagaugcgaaaguaaaacuaauaaaacaagaauuagauaaauauaaaaaugcaguaaccgaacuacaacuacuaaugcaaucaacucccgcugccgguagcggauccgccauagcaagcggaauugcuguauguaaaguccuacaucuugaaggcgaagucaacaaaaucaaaaaugcauuacucucgaccaacaaagcagucguaucacuaucaggaugcggagucucaguauuaacuuuuaaaguccuugaccuaaaaaacuacauagacaaacaacuacuaccaauucuaaauaaacaaaguugcagcauauccaauaucgaaacaguuauagaauuucaacaaaaaaacaaccgccuacuagaaaucacuagagaauuuucaguaaaugcaggcguaaccacaccagucucuaccuauaugcuuaccaacucugaauuauuaucacuuauaaacgacaugcccauaacaaaugaucaaaaaaaacuaaugagcaacaacguacaaauaguaagacaacaaagcuacagcauuauguguauaauaaaagaagaaguguuagcuuauguaguccaacuaccccucuauggcguuaucgauacaccaugcuggaaauuacacacaagcccucuaugcacaacuaacaccaaagaaggcucuaacauaugcuuaacaagaacagauagaggaugguauugcgauaacgcaggaucaguaucauucuuuccacaagcagaaacauguaaaguacaaucuaaccgaguauucugcgacacaaugaacucuagaacacuacccucagaaguuaaucucuguaauauugacauuuucaauccaaaauacgauugcaaaauaaugaccucuaaaaccgacguaucauccucaguuauaacguccuuaggagcaaucguaagcugcuauggcaaaacaaaauguaccgcaucaaacaaaugcagaggaauaauaaaaacauucucaaacggcugugacuacguaagcaauaaagguguugacacaguuucaguaggaaauacacuauacuauguaaauaaacaagaaggaaaaucucucuauguaaaaggagaacccauaauaaacuucuacgacccacucguauuuccaagcgaugaauuugaugcgagcauuucccagguaaaugaaaaaauaaaucaaucacuagcauucaucagaaaaagugaugaauuacuacacaauguuaacguaggaaaaucaacaacaaauaucaugauaacaacaaucauaauagucauaaucguaauauuacuauuacuaauagcaguagguuuauuucuauacuguaaagcaagguaaggacuaguaauaaggaaacuguaugaaugucugugggcaggaagugaagagauccuucuguaaagguuuuuggaauuaugucugcugaauaauaaacuuuuuugaaauaauaaaucugguagaaaaaugagaucuaaaaaaaaaaaaaaaaaaaaaaaaaaaaaaaaaaaaaaaaaaaaaaaaaaaaaaaaaaaaaaaaugcaucccccccccccccccccccccccccccccccaaaggcucuuuucagagccaccagaauu

SEQ ID NO: 17533 - RNA, 1907 nt, Artificial Sequence
  mRNA product Design g-2 comprising derived and/or modified sequence from HRSV(Memphis-37)__AIY60640.1__F-del_DSCav1_mut5 (opt11)
gggagaguccgcucagccagguugcagaagcggcuuagcguguguccuaaucuucucucugcguguagguaggccugugccgcaaacaagcuuaccauggaacuucccauccuaaaaaccaacgccauaacaacaauccucgcagcagucacccucugcuucgccucuucacaaaacaucaccgaagaauuuuaccaaucaaccugcuccgccguguccaaaggcuaccucucagcacugcgcacaggaugguauaccagcguaaucaccaucgaacucuccaacaucaaggaaaacaaaugcaacggcaccgaugccaaagucaaacucaucaagcaagaacuugacaaauacaaaaacgccgugaccgagcuacaacuccucaugcaguccacuccagccgccggcuccggcagcgccaucgccuccggcaucgccguaugcaaaguccuccaccucgaaggcgaaguaaacaaaaucaagaacgcacuccuaagcaccaacaaagccgucgucucacucuccgguugcggcgucagcguccuaacauucaaaguucucgaccucaaaaacuacauagacaaacaacuccuccccauccucaacaaacaauccugcuccauaucaaacaucgaaaccguuaucgaauuucaacaaaaaaacaaccgccuccuagaaaucacccgcgaauuuuccgucaacgcaggcgucaccacccccguuuccaccuauaugcucaccaacuccgaacuccucucccucaucaacgacaugcccauuaccaacgaccaaaagaaacuuaugagcaacaacguucaaaucguccgacaacaaucauacuccaucaugugcauuaucaaagaagaaguacucgccuacguaguacaauuaccccucuacggcguaaucgacaccccaugcuggaaacuacacaccuccccccucuguaccaccaacaccaaagaaggcucuaacaucugccucacccgcacagaccguggcugguauugcgauaacgcagggucugucuccuucuucccccaagccgaaacaugcaaaguccaauccaacagagucuucugcgacaccaugaacucgagaacccuccccuccgaagucaaccuaugcaacaucgacaucuucaacccaaaauacgacugcaaaaucaugacuucaaaaacagacgugagcucguccgucaucacaagccuaggagcuaucguauccugcuacggaaaaacaaaaugcacugcuuccaacaaaugccgcggaaucauaaaaaccuucuccaacggcugcgacuacgucagcaacaaaggcgucgacacagucuccguaggcaacacccuauacuacgucaauaaacaagaaggcaagucccuauaugucaaaggcgagcccaucaucaauuucuaugauccccucguuuucccauccgacgaauuugacgcauccaucucccaagucaacgaaaaaauaaaccaaagccucgcauucauccgcaaauccgacgaacuccuccacaacguaaacguaggaaaauccacaacuaacaucaugaucaccaccaucaucaucgucauuaucgucauccuacuccuccucauagcagucggccucuuccucuacugcaaagcacgcuagggacuaguaauaaggaaacuguaugaaugucugugggcaggaagugaagagauccuucuguaaagguuuuuggaauuaugucugcugaauaauaaacuuuuuugaaauaauaaaucugguagaaaaaugagaucuaaaaaaaaaaaaaaaaaaaaaaaaaaaaaaaaaaaaaaaaaaaaaaaaaaaaaaaaaaaaaaaaugcaucccccccccccccccccccccccccccccccaaaggcucuuuucagagccaccagaauu

SEQ ID NO: 17534 - RNA, 2139 nt, Artificial Sequence
  mRNA product Design g-3 comprising derived and/or modified sequence from HRSV(Memphis-37)__AIY60640.1__F-del_DSCav1_mut5 (opt1)
gggagaguccgcucagccagguugcagaagcggcuuagcguguguccuaaucuucucucugcguguagguaggccugugccgcaaacaagcuuaccauggagcugcccauccucaagaccaacgccaucaccacgauccuggccgcggugacccugugcuucgccagcucccagaacaucaccgaggaguucuaccagagcacgugcuccgccgucagcaagggcuaccucuccgcccugcgcaccgggugguacaccagcgugaucaccaucgagcuguccaacaucaaggagaacaagugcaacggcaccgacgccaaggugaagcucaucaagcaggagcuggacaaguacaagaacgcggucacggagcugcagcuccugaugcagagcaccccggccgccggcuccgggagcgcgaucgccuccggcaucgccgucugcaaggugcugcaccucgagggcgaggugaacaagaucaagaacgcccugcuguccaccaacaaggccgucgugagccucuccggcugcggggugagcguccugaccuucaaggugcuggaccucaagaacuacaucgacaagcagcugcugcccauccugaacaagcagagcugcuccaucagcaacaucgagaccgucaucgaguuccagcagaagaacaaccgccuccuggagaucacgcgggaguucagcgugaacgcgggcgugaccacccccgucuccaccuacaugcugacgaacagcgagcuccugucccugaucaacgacaugccgaucaccaacgaccagaagaagcucaugagcaacaacgugcagaucgugcgccagcaguccuacagcaucaugugcaucaucaaggaggagguccuggccuacguggugcagcugccccucuacggggucaucgacacccccugcuggaagcugcacaccagcccccugugcacgaccaacaccaaggagggcuccaacaucugccucacccggacggaccgcgggugguacugcgacaacgccggcagcguguccuucuucccgcaggccgagaccugcaagguccagagcaaccggguguucugcgacaccaugaacucccggacccugcccagcgaggugaaccucugcaacaucgacaucuucaaccccaaguacgacugcaagaucaugacguccaagaccgacgucagcuccagcgugaucaccucccugggcgccaucgugagcugcuacgggaagaccaagugcacggcgagcaacaagugccgcggcaucaucaagaccuucuccaacgggugcgacuacgucagcaacaagggcguggacaccguguccgucggcaacacccuguacuacgugaacaagcaggagggcaagagccucuacgugaagggggagcccaucaucaacuucuacgacccgcuggucuuccccuccgacgaguucgacgccagcaucucccaggugaacgagaagaucaaccagagccuggccuucauccggaaguccgacgagcuccugcacaacgugaacgucggcaagagcaccacgaacaucaugaucaccaccaucaucaucgugaucaucgugauccugcugcuccugaucgccgucgggcuguuccucuacugcaaggcccgcugaggacuagugaagggaacacccaaauuuaauucagccuuaagcacaauuaauuaagagugaaacguaauuguacaagcaguuggucacccaccauagggcaugaucaacaccgcaaccuuuccuuuuucccccagugauucugaaaaaccccucuucccuucagcuugcuuagauguuccaaauuuaguaagcuuaaggcggccuacagaagaaaaagaaaaaaaaggccacaaaaguucccucucacuuucaguaaauaaaauaaaagcagcaacagaaauaaagaaauaaaugaaauucaaaaugaaauaaauauuguguugugcagcauuaaaaaaucaauaaaaauuaaaaaugagcaagaucuaaaaaaaaaaaaaaaaaaaaaaaaaaaaaaaaaaaaaaaaaaaaaaaaaaaaaaaaaaaaaaaaugcaucccccccccccccccccccccccccccccccaaaggcucuuuucagagccaccagaauu

SEQ ID NO: 17535 - RNA, 2139 nt, Artificial Sequence
  mRNA product Design g-3 comprising derived and/or modified sequence from HRSV(Memphis-37)__AIY60640.1__F-del_DSCav1_mut5 (opt1)
gggagaguccgcucagccagguugcagaagcggcuuagcguguguccuaaucuucucucugcguguagguaggccugugccgcaaacaagcuuaccauggagcugcccauccucaagaccaacgccaucaccacgauccuggccgcggugacccugugcuucgccagcucccagaacaucaccgaggaguucuaccagagcacgugcuccgccgucagcaagggcuaccucuccgcccugcgcaccgggugguacaccagcgugaucaccaucgagcuguccaacaucaaggagaacaagugcaacggcaccgacgccaaggugaagcucaucaagcaggagcuggacaaguacaagaacgcggucacggagcugcagcuccugaugcagagcaccccggccgccggguccggcagcgccaucgcguccgggaucgccgugugcaaggugcugcaccucgagggcgaggucaacaagaucaagaacgcccugcugagcaccaacaaggccguggugucccucagcggcugcggggucuccgugcugaccuucaaggugcuggaccucaagaacuacaucgacaagcagcugcugcccauccucaacaagcagagcugcuccaucagcaacaucgagacggucaucgaguuccagcagaagaacaaccggcugcuggagaucacccgcgaguucuccgugaacgccggcgugaccacccccgucagcacguacaugcucaccaacagcgagcugcugucccucaucaacgacaugcccaucaccaacgaccagaagaagcugaugagcaacaacgugcagaucgugcggcagcaguccuacagcaucaugugcaucaucaaggaggagguccuggcguacguggugcagcucccgcuguacggggucaucgacacccccugcuggaagcugcacacgagcccccucugcaccaccaacaccaaggagggcuccaacaucugccugacgcgcaccgaccgggggugguacugcgacaacgccggcuccgugagcuucuucccccaggccgagaccugcaaggugcaguccaaccgcgucuucugcgacaccaugaacagccggacgcucccguccgaggugaaccugugcaacaucgacaucuucaaccccaaguacgacugcaagaucaugaccagcaagaccgacgucuccagcuccgugaucaccagccugggcgccaucguguccugcuacgggaagacgaagugcaccgccagcaacaagugccggggcaucaucaagaccuucuccaacgggugcgacuacgucagcaacaagggcguggacaccgugagcgucggcaacacgcucuacuacgugaacaagcaggaggggaagucccuguacgugaagggcgagcccaucaucaacuucuacgacccccuggucuucccgagcgacgaguucgacgcguccaucagccaggugaacgagaagaucaaccagucccucgccuucauccgcaagagcgacgagcugcugcacaacgugaacgucgggaaguccaccaccaacaucaugaucaccaccaucaucaucgugaucaucgugauccuccugcugcucaucgccgucggccuguuccuguacugcaaggcccggugaggacuagugaagggaacacccaaauuuaauucagccuuaagcacaauuaauuaagagugaaacguaauuguacaagcaguuggucacccaccauagggcaugaucaacaccgcaaccuuuccuuuuucccccagugauucugaaaaaccccucuucccuucagcuugcuuagauguuccaaauuuaguaagcuuaaggcggccuacagaagaaaaagaaaaaaaaggccacaaaaguucccucucacuuucaguaaauaaaauaaaagcagcaacagaaauaaagaaauaaaugaaauucaaaaugaaauaaauauuguguugugcagcauuaaaaaaucaauaaaaauuaaaaaugagcaagaucuaaaaaaaaaaaaaaaaaaaaaaaaaaaaaaaaaaaaaaaaaaaaaaaaaaaaaaaaaaaaaaaaugcaucccccccccccccccccccccccccccccccaaaggcucuuuucagagccaccagaauu

SEQ ID NO: 17536 - RNA, 2139 nt, Artificial Sequence
  mRNA product Design g-3 comprising derived and/or modified sequence from HRSV(Memphis-37)__AIY60640.1__F-del_DSCav1_mut5 (opt2)
gggagaguccgcucagccagguugcagaagcggcuuagcguguguccuaaucuucucucugcguguagguaggccugugccgcaaacaagcuuaccauggagcuccccauccucaagaccaacgccaucaccaccauccucgccgccgucacccucugcuucgccuccucccagaacaucaccgaggaguucuaccaguccaccugcuccgccgucuccaagggcuaccucuccgcccuccgcaccggcugguacaccuccgucaucaccaucgagcucuccaacaucaaggagaacaagugcaacggcaccgacgccaaggucaagcucaucaagcaggagcucgacaaguacaagaacgccgucaccgagcuccagcuccucaugcaguccacccccgccgccggcuccggcuccgccaucgccuccggcaucgccgucugcaagguccuccaccucgagggcgaggucaacaagaucaagaacgcccuccucuccaccaacaaggccgucgucucccucuccggcugcggcgucuccguccucaccuucaagguccucgaccucaagaacuacaucgacaagcagcuccuccccauccucaacaagcaguccugcuccaucuccaacaucgagaccgucaucgaguuccagcagaagaacaaccgccuccucgagaucacccgcgaguucuccgucaacgccggcgucaccacccccgucuccaccuacaugcucaccaacuccgagcuccucucccucaucaacgacaugcccaucaccaacgaccagaagaagcucauguccaacaacguccagaucguccgccagcaguccuacuccaucaugugcaucaucaaggaggagguccucgccuacgucguccagcucccccucuacggcgucaucgacacccccugcuggaagcuccacaccuccccccucugcaccaccaacaccaaggagggcuccaacaucugccucacccgcaccgaccgcggcugguacugcgacaacgccggcuccgucuccuucuucccccaggccgagaccugcaagguccaguccaaccgcgucuucugcgacaccaugaacucccgcacccuccccuccgaggucaaccucugcaacaucgacaucuucaaccccaaguacgacugcaagaucaugaccuccaagaccgacgucuccuccuccgucaucaccucccucggcgccaucgucuccugcuacggcaagaccaagugcaccgccuccaacaagugccgcggcaucaucaagaccuucuccaacggcugcgacuacgucuccaacaagggcgucgacaccgucuccgucggcaacacccucuacuacgucaacaagcaggagggcaagucccucuacgucaagggcgagcccaucaucaacuucuacgacccccucgucuuccccuccgacgaguucgacgccuccaucucccaggucaacgagaagaucaaccagucccucgccuucauccgcaaguccgacgagcuccuccacaacgucaacgucggcaaguccaccaccaacaucaugaucaccaccaucaucaucgucaucaucgucauccuccuccuccucaucgccgucggccucuuccucuacugcaaggcccgcugaggacuagugaagggaacacccaaauuuaauucagccuuaagcacaauuaauuaagagugaaacguaauuguacaagcaguuggucacccaccauagggcaugaucaacaccgcaaccuuuccuuuuucccccagugauucugaaaaaccccucuucccuucagcuugcuuagauguuccaaauuuaguaagcuuaaggcggccuacagaagaaaaagaaaaaaaaggccacaaaaguucccucucacuuucaguaaauaaaauaaaagcagcaacagaaauaaagaaauaaaugaaauucaaaaugaaauaaauauuguguugugcagcauuaaaaaaucaauaaaaauuaaaaaugagcaagaucuaaaaaaaaaaaaaaaaaaaaaaaaaaaaaaaaaaaaaaaaaaaaaaaaaaaaaaaaaaaaaaaaugcaucccccccccccccccccccccccccccccccaaaggcucuuuucagagccaccagaauu

SEQ ID NO: 17537 - RNA, 2139 nt, Artificial Sequence
  mRNA product Design g-3 comprising derived and/or modified sequence from HRSV(Memphis-37)__AIY60640.1__F-del_DSCav1_mut5 (opt3)
gggagaguccgcucagccagguugcagaagcggcuuagcguguguccuaaucuucucucugcguguagguaggccugugccgcaaacaagcuuaccauggagcugcccauccucaagaccaacgccauuacaacuauacuugcugcagugacgcugugcuucgccagcucccagaauaucaccgaagaguuuuaccaaucuacauguucagcggucaguaaaggcuauuugagcgcuuuaagaacugggugguacaccuccguuauuacaaucgaacugucuaacauuaaggagaauaaaugcaacggaaccgacgccaaggugaaacuaaucaagcaggaacucgauaaguauaaaaaugcaguaacugagcugcagcuucugaugcagucgaccccugccgcugguucaggcagcgcaauagccagugggaucgcuguguguaaggucuugcaccucgagggagaagugaacaaaauuaagaaugcccugcuguccacaaacaaagcgguugugucucucagcggcugcggugucuccguguuaacguucaagguacuggaccuuaagaauuacaucgauaaacaauugcugccaauucuaaacaagcagucauguaguaucagcaauauagagacuguuauugaauuucagcagaaaaacaauaggcuccuggagaucacccgggaguucucugugaacgcaggggucacaacuccgguguccaccuauaugcuuacaaauucagaacuguugagccucauuaacgacaugcccaucaccaacgaucaaaagaaacugaugaguaauaacgugcagaucguccgccagcagucuuacuccauuaugugcauaaucaaggaggaaguuuuagccuaugugguacaacugccucucuacggagugauugacacgccauguuggaaacuucauacuagcccccugugcacaaccaauacuaaggagggcucgaacaucuguuugacacgaaccgaucguggcugguacugcgacaaugcugggucugucuccuuuuucccucaggccgaaacguguaaggugcagucaaacagaguguuuugcgauaccaugaauaguagaacacugccaagcgaggugaaccucugcaauauagacauuuucaaccccaaauaugauuguaagaucaugacuuccaaaaccgacgucucuagcucagugaucacaagucugggagcaauuguauccugcuacgguaagacuaaauguaccgcuagcaauaagugcaggggcaucauuaagacauuuucuaacgggugugauuauguuucaaauaaaggaguggacaccgucagugugggcaacacucuuuacuaugucaauaagcaagaggguaaaagccuguacgugaagggggaaccuauaaucaacuucuaugacccauugguuuuuccguccgaugaguucgacgccucuauuucgcagguuaacgagaaaaucaaucagagccucgcguuuauccggaaguccgaugaacuguuacacaacguaaaugucggaaagucaacgacaaacauuaugauaaccacuaucauuaucgugauuaucguuauacugcuacuccugaucgccgugggccuuuucuuguacugcaaagcacgcugaggacuagugaagggaacacccaaauuuaauucagccuuaagcacaauuaauuaagagugaaacguaauuguacaagcaguuggucacccaccauagggcaugaucaacaccgcaaccuuuccuuuuucccccagugauucugaaaaaccccucuucccuucagcuugcuuagauguuccaaauuuaguaagcuuaaggcggccuacagaagaaaaagaaaaaaaaggccacaaaaguucccucucacuuucaguaaauaaaauaaaagcagcaacagaaauaaagaaauaaaugaaauucaaaaugaaauaaauauuguguugugcagcauuaaaaaaucaauaaaaauuaaaaaugagcaagaucuaaaaaaaaaaaaaaaaaaaaaaaaaaaaaaaaaaaaaaaaaaaaaaaaaaaaaaaaaaaaaaaaugcaucccccccccccccccccccccccccccccccaaaggcucuuuucagagccaccagaauu

SEQ ID NO: 17538 - RNA, 2139 nt, Artificial Sequence
  mRNA product Design g-3 comprising derived and/or modified sequence from HRSV(Memphis-37)__AIY60640.1__F-del_DSCav1_mut5 (opt4)
gggagaguccgcucagccagguugcagaagcggcuuagcguguguccuaaucuucucucugcguguagguaggccugugccgcaaacaagcuuaccauggagcugcccauccugaagaccaacgccaucaccaccauccuggccgccgugacccugugcuucgccagcagccagaacaucaccgaggaguucuaccagagcaccugcagcgccgugagcaagggcuaccugagcgcccugagaaccggcugguacaccagcgugaucaccaucgagcugagcaacaucaaggagaacaagugcaacggcaccgacgccaaggugaagcugaucaagcaggagcuggacaaguacaagaacgccgugaccgagcugcagcugcugaugcagagcacccccgccgccggcagcggcagcgccaucgccagcggcaucgccgugugcaaggugcugcaccuggagggcgaggugaacaagaucaagaacgcccugcugagcaccaacaaggccguggugagccugagcggcugcggcgugagcgugcugaccuucaaggugcuggaccugaagaacuacaucgacaagcagcugcugcccauccugaacaagcagagcugcagcaucagcaacaucgagaccgugaucgaguuccagcagaagaacaacagacugcuggagaucaccagagaguucagcgugaacgccggcgugaccacccccgugagcaccuacaugcugaccaacagcgagcugcugagccugaucaacgacaugcccaucaccaacgaccagaagaagcugaugagcaacaacgugcagaucgugagacagcagagcuacagcaucaugugcaucaucaaggaggaggugcuggccuacguggugcagcugccccuguacggcgugaucgacacccccugcuggaagcugcacaccagcccccugugcaccaccaacaccaaggagggcagcaacaucugccugaccagaaccgacagaggcugguacugcgacaacgccggcagcgugagcuucuucccccaggccgagaccugcaaggugcagagcaacagaguguucugcgacaccaugaacagcagaacccugcccagcgaggugaaccugugcaacaucgacaucuucaaccccaaguacgacugcaagaucaugaccagcaagaccgacgugagcagcagcgugaucaccagccugggcgccaucgugagcugcuacggcaagaccaagugcaccgccagcaacaagugcagaggcaucaucaagaccuucagcaacggcugcgacuacgugagcaacaagggcguggacaccgugagcgugggcaacacccuguacuacgugaacaagcaggagggcaagagccuguacgugaagggcgagcccaucaucaacuucuacgacccccugguguuccccagcgacgaguucgacgccagcaucagccaggugaacgagaagaucaaccagagccuggccuucaucagaaagagcgacgagcugcugcacaacgugaacgugggcaagagcaccaccaacaucaugaucaccaccaucaucaucgugaucaucgugauccugcugcugcugaucgccgugggccuguuccuguacugcaaggccagaugaggacuagugaagggaacacccaaauuuaauucagccuuaagcacaauuaauuaagagugaaacguaauuguacaagcaguuggucacccaccauagggcaugaucaacaccgcaaccuuuccuuuuucccccagugauucugaaaaaccccucuucccuucagcuugcuuagauguuccaaauuuaguaagcuuaaggcggccuacagaagaaaaagaaaaaaaaggccacaaaaguucccucucacuuucaguaaauaaaauaaaagcagcaacagaaauaaagaaauaaaugaaauucaaaaugaaauaaauauuguguugugcagcauuaaaaaaucaauaaaaauuaaaaaugagcaagaucuaaaaaaaaaaaaaaaaaaaaaaaaaaaaaaaaaaaaaaaaaaaaaaaaaaaaaaaaaaaaaaaaugcaucccccccccccccccccccccccccccccccaaaggcucuuuucagagccaccagaauu

SEQ ID NO: 17539 - RNA, 2139 nt, Artificial Sequence
  mRNA product Design g-3 comprising derived and/or modified sequence from HRSV(Memphis-37)__AIY60640.1__F-del_DSCav1_mut5 (opt5)
gggagaguccgcucagccagguugcagaagcggcuuagcguguguccuaaucuucucucugcguguagguaggccugugccgcaaacaagcuuaccauggagcugcccauccucaagaccaacgccauuacaacgauccuggcugccgugacccuuugcuucgcgagcucccagaauauuacagaagaguuuuaccaaucuaccuguagcgcugucuccaaaggcuaucugucugcccucagaacagggugguacaccagcguuaucacaauugaacuguccaacaucaaggagaauaaaugcaacggaaccgacgccaaggugaaacuuaucaagcaggaacuggauaaguauaaaaaugcugugacggagcuccagcugcugaugcagucuaccccugccgcuggcagcggguccgccauugcgagcggaaucgccgucuguaaggugcuccaccuggagggcgaaguuaacaaaauuaagaaugcccuucugucuacaaacaaagcuguggucucccucagcgggugcggagugucuguucugaccuucaaggugcuugaccugaagaauuacaucgauaaacaacuccugccgauucugaacaagcaguccuguagcaucucuaauauugagacagucaucgaauuucagcagaaaaacaaucggcuccuggagaucacccgcgaguucuccgugaacgcuggcgugacgacacccgucagcaccuauaugcuuacaaauuccgaacugcucucucugauuaacgacaugccuaucaccaacgaucaaaagaaacuuaugagcaauaacguucagauugugagacagcaguccuacagcaucaugugcauuaucaaggaggaagugcuggccuaugucgugcaacucccccuguacggcguuaucgacaccccuuguuggaaacugcauacaucuccccucugcacgaccaauacaaaggagggguccaacauuugucugacccggacagaucgcggaugguacugcgacaaugcgggcagcgugagcuuuuucccucaggccgaaaccuguaagguccagucuaacagaguguuuugcgauacgaugaacuccagaacacugccgucugagguuaaucucugcaauaucgacauuuucaaccccaaauaugauuguaagaucaugaccagcaaaaccgacguguccagcucugucauuacaucccugggggcuaucgugagcugcuacggaaagaccaaauguacagccucuaauaagugccggggcaucauuaagacguuuuccaacgggugugauuaugucagcaauaaaggaguggacaccguuuccgugggcaacacacuuuacuaugucaauaagcaagagggcaaaucucuguacgugaagggggaaccuaucauuaacuucuaugacccccucguuuuuccuagcgaugaguucgacgcuuccaucucucaggugaacgagaaaauuaaucagagccuggccuuuauccgcaaguccgaugaacugcuccacaacgucaaugugggaaagagcaccacaaacauuaugaucaccacgaucauuaucgugauuaucguuauucugcuucugcucaucgccgucggccuguuccuguacugcaaagcuagaugaggacuagugaagggaacacccaaauuuaauucagccuuaagcacaauuaauuaagagugaaacguaauuguacaagcaguuggucacccaccauagggcaugaucaacaccgcaaccuuuccuuuuucccccagugauucugaaaaaccccucuucccuucagcuugcuuagauguuccaaauuuaguaagcuuaaggcggccuacagaagaaaaagaaaaaaaaggccacaaaaguucccucucacuuucaguaaauaaaauaaaagcagcaacagaaauaaagaaauaaaugaaauucaaaaugaaauaaauauuguguugugcagcauuaaaaaaucaauaaaaauuaaaaaugagcaagaucuaaaaaaaaaaaaaaaaaaaaaaaaaaaaaaaaaaaaaaaaaaaaaaaaaaaaaaaaaaaaaaaaugcaucccccccccccccccccccccccccccccccaaaggcucuuuucagagccaccagaauu

SEQ ID NO: 17540 - RNA, 2139 nt, Artificial Sequence
  mRNA product Design g-3 comprising derived and/or modified sequence from HRSV(Memphis-37)__AIY60640.1__F-del_DSCav1_mut5 (opt6)
gggagaguccgcucagccagguugcagaagcggcuuagcguguguccuaaucuucucucugcguguagguaggccugugccgcaaacaagcuuaccauggaauuacccaucuuaaaaacaaaugcaauaacaacaauacuagcagccguaacauuaugcuucgccucaagccaaaacauaacagaagaauuuuaccaaagcacauguuccgccguaucaaaaggauaucucucagcacuacguacuggaugguauacauccguaaucacaauugaacuaucaaacauuaaagaaaacaaaugcaauggaacagaugcgaaaguaaaacuaauaaaacaagaauuagauaaauauaaaaaugcaguaaccgaacuacaacuacuaaugcaaucaacucccgcugccgguagcggauccgccauagcaagcggaauugcuguauguaaaguccuacaucuugaaggcgaagucaacaaaaucaaaaaugcauuacucucgaccaacaaagcagucguaucacuaucaggaugcggagucucaguauuaacuuuuaaaguccuugaccuaaaaaacuacauagacaaacaacuacuaccaauucuaaauaaacaaaguugcagcauauccaauaucgaaacaguuauagaauuucaacaaaaaaacaaccgccuacuagaaaucacuagagaauuuucaguaaaugcaggcguaaccacaccagucucuaccuauaugcuuaccaacucugaauuauuaucacuuauaaacgacaugcccauaacaaaugaucaaaaaaaacuaaugagcaacaacguacaaauaguaagacaacaaagcuacagcauuauguguauaauaaaagaagaaguguuagcuuauguaguccaacuaccccucuauggcguuaucgauacaccaugcuggaaauuacacacaagcccucuaugcacaacuaacaccaaagaaggcucuaacauaugcuuaacaagaacagauagaggaugguauugcgauaacgcaggaucaguaucauucuuuccacaagcagaaacauguaaaguacaaucuaaccgaguauucugcgacacaaugaacucuagaacacuacccucagaaguuaaucucuguaauauugacauuuucaauccaaaauacgauugcaaaauaaugaccucuaaaaccgacguaucauccucaguuauaacguccuuaggagcaaucguaagcugcuauggcaaaacaaaauguaccgcaucaaacaaaugcagaggaauaauaaaaacauucucaaacggcugugacuacguaagcaauaaagguguugacacaguuucaguaggaaauacacuauacuauguaaauaaacaagaaggaaaaucucucuauguaaaaggagaacccauaauaaacuucuacgacccacucguauuuccaagcgaugaauuugaugcgagcauuucccagguaaaugaaaaaauaaaucaaucacuagcauucaucagaaaaagugaugaauuacuacacaauguuaacguaggaaaaucaacaacaaauaucaugauaacaacaaucauaauagucauaaucguaauauuacuauuacuaauagcaguagguuuauuucuauacuguaaagcaagguaaggacuagugaagggaacacccaaauuuaauucagccuuaagcacaauuaauuaagagugaaacguaauuguacaagcaguuggucacccaccauagggcaugaucaacaccgcaaccuuuccuuuuucccccagugauucugaaaaaccccucuucccuucagcuugcuuagauguuccaaauuuaguaagcuuaaggcggccuacagaagaaaaagaaaaaaaaggccacaaaaguucccucucacuuucaguaaauaaaauaaaagcagcaacagaaauaaagaaauaaaugaaauucaaaaugaaauaaauauuguguugugcagcauuaaaaaaucaauaaaaauuaaaaaugagcaagaucuaaaaaaaaaaaaaaaaaaaaaaaaaaaaaaaaaaaaaaaaaaaaaaaaaaaaaaaaaaaaaaaaugcaucccccccccccccccccccccccccccccccaaaggcucuuuucagagccaccagaauu

SEQ ID NO: 17541 - RNA, 2139 nt, Artificial Sequence
  mRNA product Design g-3 comprising derived and/or modified sequence from HRSV(Memphis-37)__AIY60640.1__F-del_DSCav1_mut5 (opt11)
gggagaguccgcucagccagguugcagaagcggcuuagcguguguccuaaucuucucucugcguguagguaggccugugccgcaaacaagcuuaccauggaacuucccauccuaaaaaccaacgccauaacaacaauccucgcagcagucacccucugcuucgccucuucacaaaacaucaccgaagaauuuuaccaaucaaccugcuccgccguguccaaaggcuaccucucagcacugcgcacaggaugguauaccagcguaaucaccaucgaacucuccaacaucaaggaaaacaaaugcaacggcaccgaugccaaagucaaacucaucaagcaagaacuugacaaauacaaaaacgccgugaccgagcuacaacuccucaugcaguccacuccagccgccggcuccggcagcgccaucgccuccggcaucgccguaugcaaaguccuccaccucgaaggcgaaguaaacaaaaucaagaacgcacuccuaagcaccaacaaagccgucgucucacucuccgguugcggcgucagcguccuaacauucaaaguucucgaccucaaaaacuacauagacaaacaacuccuccccauccucaacaaacaauccugcuccauaucaaacaucgaaaccguuaucgaauuucaacaaaaaaacaaccgccuccuagaaaucacccgcgaauuuuccgucaacgcaggcgucaccacccccguuuccaccuauaugcucaccaacuccgaacuccucucccucaucaacgacaugcccauuaccaacgaccaaaagaaacuuaugagcaacaacguucaaaucguccgacaacaaucauacuccaucaugugcauuaucaaagaagaaguacucgccuacguaguacaauuaccccucuacggcguaaucgacaccccaugcuggaaacuacacaccuccccccucuguaccaccaacaccaaagaaggcucuaacaucugccucacccgcacagaccguggcugguauugcgauaacgcagggucugucuccuucuucccccaagccgaaacaugcaaaguccaauccaacagagucuucugcgacaccaugaacucgagaacccuccccuccgaagucaaccuaugcaacaucgacaucuucaacccaaaauacgacugcaaaaucaugacuucaaaaacagacgugagcucguccgucaucacaagccuaggagcuaucguauccugcuacggaaaaacaaaaugcacugcuuccaacaaaugccgcggaaucauaaaaaccuucuccaacggcugcgacuacgucagcaacaaaggcgucgacacagucuccguaggcaacacccuauacuacgucaauaaacaagaaggcaagucccuauaugucaaaggcgagcccaucaucaauuucuaugauccccucguuuucccauccgacgaauuugacgcauccaucucccaagucaacgaaaaaauaaaccaaagccucgcauucauccgcaaauccgacgaacuccuccacaacguaaacguaggaaaauccacaacuaacaucaugaucaccaccaucaucaucgucauuaucgucauccuacuccuccucauagcagucggccucuuccucuacugcaaagcacgcuagggacuagugaagggaacacccaaauuuaauucagccuuaagcacaauuaauuaagagugaaacguaauuguacaagcaguuggucacccaccauagggcaugaucaacaccgcaaccuuuccuuuuucccccagugauucugaaaaaccccucuucccuucagcuugcuuagauguuccaaauuuaguaagcuuaaggcggccuacagaagaaaaagaaaaaaaaggccacaaaaguucccucucacuuucaguaaauaaaauaaaagcagcaacagaaauaaagaaauaaaugaaauucaaaaugaaauaaauauuguguugugcagcauuaaaaaaucaauaaaaauuaaaaaugagcaagaucuaaaaaaaaaaaaaaaaaaaaaaaaaaaaaaaaaaaaaaaaaaaaaaaaaaaaaaaaaaaaaaaaugcaucccccccccccccccccccccccccccccccaaaggcucuuuucagagccaccagaauu

SEQ ID NO: 17542 - RNA, 1934 nt, Artificial Sequence
  mRNA product Design g-4 comprising derived and/or modified sequence from HRSV(Memphis-37)__AIY60640.1__F-del_DSCav1_mut5 (opt1)
gggagacuccugucgggcggaaguaggaggaguagaguuuaaaaacaguacucuuuuuccgguucgggacguaguugaagcaacgacaagccggauaaccgcucuugagacaggaagcuuaccauggagcugcccauccucaagaccaacgccaucaccacgauccuggccgcggugacccugugcuucgccagcucccagaacaucaccgaggaguucuaccagagcacgugcuccgccgucagcaagggcuaccucuccgcccugcgcaccgggugguacaccagcgugaucaccaucgagcuguccaacaucaaggagaacaagugcaacggcaccgacgccaaggugaagcucaucaagcaggagcuggacaaguacaagaacgcggucacggagcugcagcuccugaugcagagcaccccggccgccggcuccgggagcgcgaucgccuccggcaucgccgucugcaaggugcugcaccucgagggcgaggugaacaagaucaagaacgcccugcuguccaccaacaaggccgucgugagccucuccggcugcggggugagcguccugaccuucaaggugcuggaccucaagaacuacaucgacaagcagcugcugcccauccugaacaagcagagcugcuccaucagcaacaucgagaccgucaucgaguuccagcagaagaacaaccgccuccuggagaucacgcgggaguucagcgugaacgcgggcgugaccacccccgucuccaccuacaugcugacgaacagcgagcuccugucccugaucaacgacaugccgaucaccaacgaccagaagaagcucaugagcaacaacgugcagaucgugcgccagcaguccuacagcaucaugugcaucaucaaggaggagguccuggccuacguggugcagcugccccucuacggggucaucgacacccccugcuggaagcugcacaccagcccccugugcacgaccaacaccaaggagggcuccaacaucugccucacccggacggaccgcgggugguacugcgacaacgccggcagcguguccuucuucccgcaggccgagaccugcaagguccagagcaaccggguguucugcgacaccaugaacucccggacccugcccagcgaggugaaccucugcaacaucgacaucuucaaccccaaguacgacugcaagaucaugacguccaagaccgacgucagcuccagcgugaucaccucccugggcgccaucgugagcugcuacgggaagaccaagugcacggcgagcaacaagugccgcggcaucaucaagaccuucuccaacgggugcgacuacgucagcaacaagggcguggacaccguguccgucggcaacacccuguacuacgugaacaagcaggagggcaagagccucuacgugaagggggagcccaucaucaacuucuacgacccgcuggucuuccccuccgacgaguucgacgccagcaucucccaggugaacgagaagaucaaccagagccuggccuucauccggaaguccgacgagcuccugcacaacgugaacgucggcaagagcaccacgaacaucaugaucaccaccaucaucaucgugaucaucgugauccugcugcuccugaucgccgucgggcuguuccucuacugcaaggcccgcugaggacuaguaauaaggaaacuguaugaaugucugugggcaggaagugaagagauccuucuguaaagguuuuuggaauuaugucugcugaauaauaaacuuuuuugaaauaauaaaucugguagaaaaaugagaucuaaaaaaaaaaaaaaaaaaaaaaaaaaaaaaaaaaaaaaaaaaaaaaaaaaaaaaaaaaaaaaaaugcaucccccccccccccccccccccccccccccccaaaggcucuuuucagagccaccagaauu

SEQ ID NO: 17543 - RNA, 1934 nt, Artificial Sequence
  mRNA product Design g-4 comprising derived and/or modified sequence from HRSV(Memphis-37)__AIY60640.1__F-del_DSCav1_mut5 (opt1)
gggagacuccugucgggcggaaguaggaggaguagaguuuaaaaacaguacucuuuuuccgguucgggacguaguugaagcaacgacaagccggauaaccgcucuugagacaggaagcuuaccauggagcugcccauccucaagaccaacgccaucaccacgauccuggccgcggugacccugugcuucgccagcucccagaacaucaccgaggaguucuaccagagcacgugcuccgccgucagcaagggcuaccucuccgcccugcgcaccgggugguacaccagcgugaucaccaucgagcuguccaacaucaaggagaacaagugcaacggcaccgacgccaaggugaagcucaucaagcaggagcuggacaaguacaagaacgcggucacggagcugcagcuccugaugcagagcaccccggccgccggguccggcagcgccaucgcguccgggaucgccgugugcaaggugcugcaccucgagggcgaggucaacaagaucaagaacgcccugcugagcaccaacaaggccguggugucccucagcggcugcggggucuccgugcugaccuucaaggugcuggaccucaagaacuacaucgacaagcagcugcugcccauccucaacaagcagagcugcuccaucagcaacaucgagacggucaucgaguuccagcagaagaacaaccggcugcuggagaucacccgcgaguucuccgugaacgccggcgugaccacccccgucagcacguacaugcucaccaacagcgagcugcugucccucaucaacgacaugcccaucaccaacgaccagaagaagcugaugagcaacaacgugcagaucgugcggcagcaguccuacagcaucaugugcaucaucaaggaggagguccuggcguacguggugcagcucccgcuguacggggucaucgacacccccugcuggaagcugcacacgagcccccucugcaccaccaacaccaaggagggcuccaacaucugccugacgcgcaccgaccgggggugguacugcgacaacgccggcuccgugagcuucuucccccaggccgagaccugcaaggugcaguccaaccgcgucuucugcgacaccaugaacagccggacgcucccguccgaggugaaccugugcaacaucgacaucuucaaccccaaguacgacugcaagaucaugaccagcaagaccgacgucuccagcuccgugaucaccagccugggcgccaucguguccugcuacgggaagacgaagugcaccgccagcaacaagugccggggcaucaucaagaccuucuccaacgggugcgacuacgucagcaacaagggcguggacaccgugagcgucggcaacacgcucuacuacgugaacaagcaggaggggaagucccuguacgugaagggcgagcccaucaucaacuucuacgacccccuggucuucccgagcgacgaguucgacgcguccaucagccaggugaacgagaagaucaaccagucccucgccuucauccgcaagagcgacgagcugcugcacaacgugaacgucgggaaguccaccaccaacaucaugaucaccaccaucaucaucgugaucaucgugauccuccugcugcucaucgccgucggccuguuccuguacugcaaggcccggugaggacuaguaauaaggaaacuguaugaaugucugugggcaggaagugaagagauccuucuguaaagguuuuuggaauuaugucugcugaauaauaaacuuuuuugaaauaauaaaucugguagaaaaaugagaucuaaaaaaaaaaaaaaaaaaaaaaaaaaaaaaaaaaaaaaaaaaaaaaaaaaaaaaaaaaaaaaaaugcaucccccccccccccccccccccccccccccccaaaggcucuuuucagagccaccagaauu

SEQ ID NO: 17544 - RNA, 1934 nt, Artificial Sequence
  mRNA product Design g-4 comprising derived and/or modified sequence from HRSV(Memphis-37)__AIY60640.1__F-del_DSCav1_mut5 (opt2)
gggagacuccugucgggcggaaguaggaggaguagaguuuaaaaacaguacucuuuuuccgguucgggacguaguugaagcaacgacaagccggauaaccgcucuugagacaggaagcuuaccauggagcuccccauccucaagaccaacgccaucaccaccauccucgccgccgucacccucugcuucgccuccucccagaacaucaccgaggaguucuaccaguccaccugcuccgccgucuccaagggcuaccucuccgcccuccgcaccggcugguacaccuccgucaucaccaucgagcucuccaacaucaaggagaacaagugcaacggcaccgacgccaaggucaagcucaucaagcaggagcucgacaaguacaagaacgccgucaccgagcuccagcuccucaugcaguccacccccgccgccggcuccggcuccgccaucgccuccggcaucgccgucugcaagguccuccaccucgagggcgaggucaacaagaucaagaacgcccuccucuccaccaacaaggccgucgucucccucuccggcugcggcgucuccguccucaccuucaagguccucgaccucaagaacuacaucgacaagcagcuccuccccauccucaacaagcaguccugcuccaucuccaacaucgagaccgucaucgaguuccagcagaagaacaaccgccuccucgagaucacccgcgaguucuccgucaacgccggcgucaccacccccgucuccaccuacaugcucaccaacuccgagcuccucucccucaucaacgacaugcccaucaccaacgaccagaagaagcucauguccaacaacguccagaucguccgccagcaguccuacuccaucaugugcaucaucaaggaggagguccucgccuacgucguccagcucccccucuacggcgucaucgacacccccugcuggaagcuccacaccuccccccucugcaccaccaacaccaaggagggcuccaacaucugccucacccgcaccgaccgcggcugguacugcgacaacgccggcuccgucuccuucuucccccaggccgagaccugcaagguccaguccaaccgcgucuucugcgacaccaugaacucccgcacccuccccuccgaggucaaccucugcaacaucgacaucuucaaccccaaguacgacugcaagaucaugaccuccaagaccgacgucuccuccuccgucaucaccucccucggcgccaucgucuccugcuacggcaagaccaagugcaccgccuccaacaagugccgcggcaucaucaagaccuucuccaacggcugcgacuacgucuccaacaagggcgucgacaccgucuccgucggcaacacccucuacuacgucaacaagcaggagggcaagucccucuacgucaagggcgagcccaucaucaacuucuacgacccccucgucuuccccuccgacgaguucgacgccuccaucucccaggucaacgagaagaucaaccagucccucgccuucauccgcaaguccgacgagcuccuccacaacgucaacgucggcaaguccaccaccaacaucaugaucaccaccaucaucaucgucaucaucgucauccuccuccuccucaucgccgucggccucuuccucuacugcaaggcccgcugaggacuaguaauaaggaaacuguaugaaugucugugggcaggaagugaagagauccuucuguaaagguuuuuggaauuaugucugcugaauaauaaacuuuuuugaaauaauaaaucugguagaaaaaugagaucuaaaaaaaaaaaaaaaaaaaaaaaaaaaaaaaaaaaaaaaaaaaaaaaaaaaaaaaaaaaaaaaaugcaucccccccccccccccccccccccccccccccaaaggcucuuuucagagccaccagaauu

SEQ ID NO: 17545 - RNA, 1934 nt, Artificial Sequence
  mRNA product Design g-4 comprising derived and/or modified sequence from HRSV(Memphis-37)__AIY60640.1__F-del_DSCav1_mut5 (opt3)
gggagacuccugucgggcggaaguaggaggaguagaguuuaaaaacaguacucuuuuuccgguucgggacguaguugaagcaacgacaagccggauaaccgcucuugagacaggaagcuuaccauggagcugcccauccucaagaccaacgccauuacaacuauacuugcugcagugacgcugugcuucgccagcucccagaauaucaccgaagaguuuuaccaaucuacauguucagcggucaguaaaggcuauuugagcgcuuuaagaacugggugguacaccuccguuauuacaaucgaacugucuaacauuaaggagaauaaaugcaacggaaccgacgccaaggugaaacuaaucaagcaggaacucgauaaguauaaaaaugcaguaacugagcugcagcuucugaugcagucgaccccugccgcugguucaggcagcgcaauagccagugggaucgcuguguguaaggucuugcaccucgagggagaagugaacaaaauuaagaaugcccugcuguccacaaacaaagcgguugugucucucagcggcugcggugucuccguguuaacguucaagguacuggaccuuaagaauuacaucgauaaacaauugcugccaauucuaaacaagcagucauguaguaucagcaauauagagacuguuauugaauuucagcagaaaaacaauaggcuccuggagaucacccgggaguucucugugaacgcaggggucacaacuccgguguccaccuauaugcuuacaaauucagaacuguugagccucauuaacgacaugcccaucaccaacgaucaaaagaaacugaugaguaauaacgugcagaucguccgccagcagucuuacuccauuaugugcauaaucaaggaggaaguuuuagccuaugugguacaacugccucucuacggagugauugacacgccauguuggaaacuucauacuagcccccugugcacaaccaauacuaaggagggcucgaacaucuguuugacacgaaccgaucguggcugguacugcgacaaugcugggucugucuccuuuuucccucaggccgaaacguguaaggugcagucaaacagaguguuuugcgauaccaugaauaguagaacacugccaagcgaggugaaccucugcaauauagacauuuucaaccccaaauaugauuguaagaucaugacuuccaaaaccgacgucucuagcucagugaucacaagucugggagcaauuguauccugcuacgguaagacuaaauguaccgcuagcaauaagugcaggggcaucauuaagacauuuucuaacgggugugauuauguuucaaauaaaggaguggacaccgucagugugggcaacacucuuuacuaugucaauaagcaagaggguaaaagccuguacgugaagggggaaccuauaaucaacuucuaugacccauugguuuuuccguccgaugaguucgacgccucuauuucgcagguuaacgagaaaaucaaucagagccucgcguuuauccggaaguccgaugaacuguuacacaacguaaaugucggaaagucaacgacaaacauuaugauaaccacuaucauuaucgugauuaucguuauacugcuacuccugaucgccgugggccuuuucuuguacugcaaagcacgcugaggacuaguaauaaggaaacuguaugaaugucugugggcaggaagugaagagauccuucuguaaagguuuuuggaauuaugucugcugaauaauaaacuuuuuugaaauaauaaaucugguagaaaaaugagaucuaaaaaaaaaaaaaaaaaaaaaaaaaaaaaaaaaaaaaaaaaaaaaaaaaaaaaaaaaaaaaaaaugcaucccccccccccccccccccccccccccccccaaaggcucuuuucagagccaccagaauu

SEQ ID NO: 17546 - RNA, 1934 nt, Artificial Sequence
  mRNA product Design g-4 comprising derived and/or modified sequence from HRSV(Memphis-37)__AIY60640.1__F-del_DSCav1_mut5 (opt4)
gggagacuccugucgggcggaaguaggaggaguagaguuuaaaaacaguacucuuuuuccgguucgggacguaguugaagcaacgacaagccggauaaccgcucuugagacaggaagcuuaccauggagcugcccauccugaagaccaacgccaucaccaccauccuggccgccgugacccugugcuucgccagcagccagaacaucaccgaggaguucuaccagagcaccugcagcgccgugagcaagggcuaccugagcgcccugagaaccggcugguacaccagcgugaucaccaucgagcugagcaacaucaaggagaacaagugcaacggcaccgacgccaaggugaagcugaucaagcaggagcuggacaaguacaagaacgccgugaccgagcugcagcugcugaugcagagcacccccgccgccggcagcggcagcgccaucgccagcggcaucgccgugugcaaggugcugcaccuggagggcgaggugaacaagaucaagaacgcccugcugagcaccaacaaggccguggugagccugagcggcugcggcgugagcgugcugaccuucaaggugcuggaccugaagaacuacaucgacaagcagcugcugcccauccugaacaagcagagcugcagcaucagcaacaucgagaccgugaucgaguuccagcagaagaacaacagacugcuggagaucaccagagaguucagcgugaacgccggcgugaccacccccgugagcaccuacaugcugaccaacagcgagcugcugagccugaucaacgacaugcccaucaccaacgaccagaagaagcugaugagcaacaacgugcagaucgugagacagcagagcuacagcaucaugugcaucaucaaggaggaggugcuggccuacguggugcagcugccccuguacggcgugaucgacacccccugcuggaagcugcacaccagcccccugugcaccaccaacaccaaggagggcagcaacaucugccugaccagaaccgacagaggcugguacugcgacaacgccggcagcgugagcuucuucccccaggccgagaccugcaaggugcagagcaacagaguguucugcgacaccaugaacagcagaacccugcccagcgaggugaaccugugcaacaucgacaucuucaaccccaaguacgacugcaagaucaugaccagcaagaccgacgugagcagcagcgugaucaccagccugggcgccaucgugagcugcuacggcaagaccaagugcaccgccagcaacaagugcagaggcaucaucaagaccuucagcaacggcugcgacuacgugagcaacaagggcguggacaccgugagcgugggcaacacccuguacuacgugaacaagcaggagggcaagagccuguacgugaagggcgagcccaucaucaacuucuacgacccccugguguuccccagcgacgaguucgacgccagcaucagccaggugaacgagaagaucaaccagagccuggccuucaucagaaagagcgacgagcugcugcacaacgugaacgugggcaagagcaccaccaacaucaugaucaccaccaucaucaucgugaucaucgugauccugcugcugcugaucgccgugggccuguuccuguacugcaaggccagaugaggacuaguaauaaggaaacuguaugaaugucugugggcaggaagugaagagauccuucuguaaagguuuuuggaauuaugucugcugaauaauaaacuuuuuugaaauaauaaaucugguagaaaaaugagaucuaaaaaaaaaaaaaaaaaaaaaaaaaaaaaaaaaaaaaaaaaaaaaaaaaaaaaaaaaaaaaaaaugcaucccccccccccccccccccccccccccccccaaaggcucuuuucagagccaccagaauu

SEQ ID NO: 17547 - RNA, 1934 nt, Artificial Sequence
  mRNA product Design g-4 comprising derived and/or modified sequence from HRSV(Memphis-37)__AIY60640.1__F-del_DSCav1_mut5 (opt5)
gggagacuccugucgggcggaaguaggaggaguagaguuuaaaaacaguacucuuuuuccgguucgggacguaguugaagcaacgacaagccggauaaccgcucuugagacaggaagcuuaccauggagcugcccauccucaagaccaacgccauuacaacgauccuggcugccgugacccuuugcuucgcgagcucccagaauauuacagaagaguuuuaccaaucuaccuguagcgcugucuccaaaggcuaucugucugcccucagaacagggugguacaccagcguuaucacaauugaacuguccaacaucaaggagaauaaaugcaacggaaccgacgccaaggugaaacuuaucaagcaggaacuggauaaguauaaaaaugcugugacggagcuccagcugcugaugcagucuaccccugccgcuggcagcggguccgccauugcgagcggaaucgccgucuguaaggugcuccaccuggagggcgaaguuaacaaaauuaagaaugcccuucugucuacaaacaaagcuguggucucccucagcgggugcggagugucuguucugaccuucaaggugcuugaccugaagaauuacaucgauaaacaacuccugccgauucugaacaagcaguccuguagcaucucuaauauugagacagucaucgaauuucagcagaaaaacaaucggcuccuggagaucacccgcgaguucuccgugaacgcuggcgugacgacacccgucagcaccuauaugcuuacaaauuccgaacugcucucucugauuaacgacaugccuaucaccaacgaucaaaagaaacuuaugagcaauaacguucagauugugagacagcaguccuacagcaucaugugcauuaucaaggaggaagugcuggccuaugucgugcaacucccccuguacggcguuaucgacaccccuuguuggaaacugcauacaucuccccucugcacgaccaauacaaaggagggguccaacauuugucugacccggacagaucgcggaugguacugcgacaaugcgggcagcgugagcuuuuucccucaggccgaaaccuguaagguccagucuaacagaguguuuugcgauacgaugaacuccagaacacugccgucugagguuaaucucugcaauaucgacauuuucaaccccaaauaugauuguaagaucaugaccagcaaaaccgacguguccagcucugucauuacaucccugggggcuaucgugagcugcuacggaaagaccaaauguacagccucuaauaagugccggggcaucauuaagacguuuuccaacgggugugauuaugucagcaauaaaggaguggacaccguuuccgugggcaacacacuuuacuaugucaauaagcaagagggcaaaucucuguacgugaagggggaaccuaucauuaacuucuaugacccccucguuuuuccuagcgaugaguucgacgcuuccaucucucaggugaacgagaaaauuaaucagagccuggccuuuauccgcaaguccgaugaacugcuccacaacgucaaugugggaaagagcaccacaaacauuaugaucaccacgaucauuaucgugauuaucguuauucugcuucugcucaucgccgucggccuguuccuguacugcaaagcuagaugaggacuaguaauaaggaaacuguaugaaugucugugggcaggaagugaagagauccuucuguaaagguuuuuggaauuaugucugcugaauaauaaacuuuuuugaaauaauaaaucugguagaaaaaugagaucuaaaaaaaaaaaaaaaaaaaaaaaaaaaaaaaaaaaaaaaaaaaaaaaaaaaaaaaaaaaaaaaaugcaucccccccccccccccccccccccccccccccaaaggcucuuuucagagccaccagaauu

SEQ ID NO: 17548 - RNA, 1934 nt, Artificial Sequence
  mRNA product Design g-4 comprising derived and/or modified sequence from HRSV(Memphis-37)__AIY60640.1__F-del_DSCav1_mut5 (opt6)
gggagacuccugucgggcggaaguaggaggaguagaguuuaaaaacaguacucuuuuuccgguucgggacguaguugaagcaacgacaagccggauaaccgcucuugagacaggaagcuuaccauggaauuacccaucuuaaaaacaaaugcaauaacaacaauacuagcagccguaacauuaugcuucgccucaagccaaaacauaacagaagaauuuuaccaaagcacauguuccgccguaucaaaaggauaucucucagcacuacguacuggaugguauacauccguaaucacaauugaacuaucaaacauuaaagaaaacaaaugcaauggaacagaugcgaaaguaaaacuaauaaaacaagaauuagauaaauauaaaaaugcaguaaccgaacuacaacuacuaaugcaaucaacucccgcugccgguagcggauccgccauagcaagcggaauugcuguauguaaaguccuacaucuugaaggcgaagucaacaaaaucaaaaaugcauuacucucgaccaacaaagcagucguaucacuaucaggaugcggagucucaguauuaacuuuuaaaguccuugaccuaaaaaacuacauagacaaacaacuacuaccaauucuaaauaaacaaaguugcagcauauccaauaucgaaacaguuauagaauuucaacaaaaaaacaaccgccuacuagaaaucacuagagaauuuucaguaaaugcaggcguaaccacaccagucucuaccuauaugcuuaccaacucugaauuauuaucacuuauaaacgacaugcccauaacaaaugaucaaaaaaaacuaaugagcaacaacguacaaauaguaagacaacaaagcuacagcauuauguguauaauaaaagaagaaguguuagcuuauguaguccaacuaccccucuauggcguuaucgauacaccaugcuggaaauuacacacaagcccucuaugcacaacuaacaccaaagaaggcucuaacauaugcuuaacaagaacagauagaggaugguauugcgauaacgcaggaucaguaucauucuuuccacaagcagaaacauguaaaguacaaucuaaccgaguauucugcgacacaaugaacucuagaacacuacccucagaaguuaaucucuguaauauugacauuuucaauccaaaauacgauugcaaaauaaugaccucuaaaaccgacguaucauccucaguuauaacguccuuaggagcaaucguaagcugcuauggcaaaacaaaauguaccgcaucaaacaaaugcagaggaauaauaaaaacauucucaaacggcugugacuacguaagcaauaaagguguugacacaguuucaguaggaaauacacuauacuauguaaauaaacaagaaggaaaaucucucuauguaaaaggagaacccauaauaaacuucuacgacccacucguauuuccaagcgaugaauuugaugcgagcauuucccagguaaaugaaaaaauaaaucaaucacuagcauucaucagaaaaagugaugaauuacuacacaauguuaacguaggaaaaucaacaacaaauaucaugauaacaacaaucauaauagucauaaucguaauauuacuauuacuaauagcaguagguuuauuucuauacuguaaagcaagguaaggacuaguaauaaggaaacuguaugaaugucugugggcaggaagugaagagauccuucuguaaagguuuuuggaauuaugucugcugaauaauaaacuuuuuugaaauaauaaaucugguagaaaaaugagaucuaaaaaaaaaaaaaaaaaaaaaaaaaaaaaaaaaaaaaaaaaaaaaaaaaaaaaaaaaaaaaaaaugcaucccccccccccccccccccccccccccccccaaaggcucuuuucagagccaccagaauu

SEQ ID NO: 17549 - RNA, 1934 nt, Artificial Sequence
  mRNA product Design g-4 comprising derived and/or modified sequence from HRSV(Memphis-37)__AIY60640.1__F-del_DSCav1_mut5 (opt11)
gggagacuccugucgggcggaaguaggaggaguagaguuuaaaaacaguacucuuuuuccgguucgggacguaguugaagcaacgacaagccggauaaccgcucuugagacaggaagcuuaccauggaacuucccauccuaaaaaccaacgccauaacaacaauccucgcagcagucacccucugcuucgccucuucacaaaacaucaccgaagaauuuuaccaaucaaccugcuccgccguguccaaaggcuaccucucagcacugcgcacaggaugguauaccagcguaaucaccaucgaacucuccaacaucaaggaaaacaaaugcaacggcaccgaugccaaagucaaacucaucaagcaagaacuugacaaauacaaaaacgccgugaccgagcuacaacuccucaugcaguccacuccagccgccggcuccggcagcgccaucgccuccggcaucgccguaugcaaaguccuccaccucgaaggcgaaguaaacaaaaucaagaacgcacuccuaagcaccaacaaagccgucgucucacucuccgguugcggcgucagcguccuaacauucaaaguucucgaccucaaaaacuacauagacaaacaacuccuccccauccucaacaaacaauccugcuccauaucaaacaucgaaaccguuaucgaauuucaacaaaaaaacaaccgccuccuagaaaucacccgcgaauuuuccgucaacgcaggcgucaccacccccguuuccaccuauaugcucaccaacuccgaacuccucucccucaucaacgacaugcccauuaccaacgaccaaaagaaacuuaugagcaacaacguucaaaucguccgacaacaaucauacuccaucaugugcauuaucaaagaagaaguacucgccuacguaguacaauuaccccucuacggcguaaucgacaccccaugcuggaaacuacacaccuccccccucuguaccaccaacaccaaagaaggcucuaacaucugccucacccgcacagaccguggcugguauugcgauaacgcagggucugucuccuucuucccccaagccgaaacaugcaaaguccaauccaacagagucuucugcgacaccaugaacucgagaacccuccccuccgaagucaaccuaugcaacaucgacaucuucaacccaaaauacgacugcaaaaucaugacuucaaaaacagacgugagcucguccgucaucacaagccuaggagcuaucguauccugcuacggaaaaacaaaaugcacugcuuccaacaaaugccgcggaaucauaaaaaccuucuccaacggcugcgacuacgucagcaacaaaggcgucgacacagucuccguaggcaacacccuauacuacgucaauaaacaagaaggcaagucccuauaugucaaaggcgagcccaucaucaauuucuaugauccccucguuuucccauccgacgaauuugacgcauccaucucccaagucaacgaaaaaauaaaccaaagccucgcauucauccgcaaauccgacgaacuccuccacaacguaaacguaggaaaauccacaacuaacaucaugaucaccaccaucaucaucgucauuaucgucauccuacuccuccucauagcagucggccucuuccucuacugcaaagcacgcuagggacuaguaauaaggaaacuguaugaaugucugugggcaggaagugaagagauccuucuguaaagguuuuuggaauuaugucugcugaauaauaaacuuuuuugaaauaauaaaucugguagaaaaaugagaucuaaaaaaaaaaaaaaaaaaaaaaaaaaaaaaaaaaaaaaaaaaaaaaaaaaaaaaaaaaaaaaaaugcaucccccccccccccccccccccccccccccccaaaggcucuuuucagagccaccagaauu

SEQ ID NO: 17550 - RNA, 1910 nt, Artificial Sequence
  mRNA product Design g-5 comprising derived and/or modified sequence from HRSV(Memphis-37)__AIY60640.1__F-del_DSCav1_mut5 (opt1)
gggagacccgugacccggaaguuguacggcuacgcgacuuucccucccacaaacccucgcgcccuuccuuuccuacuugggcccggcagaaagcuuaccauggagcugcccauccucaagaccaacgccaucaccacgauccuggccgcggugacccugugcuucgccagcucccagaacaucaccgaggaguucuaccagagcacgugcuccgccgucagcaagggcuaccucuccgcccugcgcaccgggugguacaccagcgugaucaccaucgagcuguccaacaucaaggagaacaagugcaacggcaccgacgccaaggugaagcucaucaagcaggagcuggacaaguacaagaacgcggucacggagcugcagcuccugaugcagagcaccccggccgccggcuccgggagcgcgaucgccuccggcaucgccgucugcaaggugcugcaccucgagggcgaggugaacaagaucaagaacgcccugcuguccaccaacaaggccgucgugagccucuccggcugcggggugagcguccugaccuucaaggugcuggaccucaagaacuacaucgacaagcagcugcugcccauccugaacaagcagagcugcuccaucagcaacaucgagaccgucaucgaguuccagcagaagaacaaccgccuccuggagaucacgcgggaguucagcgugaacgcgggcgugaccacccccgucuccaccuacaugcugacgaacagcgagcuccugucccugaucaacgacaugccgaucaccaacgaccagaagaagcucaugagcaacaacgugcagaucgugcgccagcaguccuacagcaucaugugcaucaucaaggaggagguccuggccuacguggugcagcugccccucuacggggucaucgacacccccugcuggaagcugcacaccagcccccugugcacgaccaacaccaaggagggcuccaacaucugccucacccggacggaccgcgggugguacugcgacaacgccggcagcguguccuucuucccgcaggccgagaccugcaagguccagagcaaccggguguucugcgacaccaugaacucccggacccugcccagcgaggugaaccucugcaacaucgacaucuucaaccccaaguacgacugcaagaucaugacguccaagaccgacgucagcuccagcgugaucaccucccugggcgccaucgugagcugcuacgggaagaccaagugcacggcgagcaacaagugccgcggcaucaucaagaccuucuccaacgggugcgacuacgucagcaacaagggcguggacaccguguccgucggcaacacccuguacuacgugaacaagcaggagggcaagagccucuacgugaagggggagcccaucaucaacuucuacgacccgcuggucuuccccuccgacgaguucgacgccagcaucucccaggugaacgagaagaucaaccagagccuggccuucauccggaaguccgacgagcuccugcacaacgugaacgucggcaagagcaccacgaacaucaugaucaccaccaucaucaucgugaucaucgugauccugcugcuccugaucgccgucgggcuguuccucuacugcaaggcccgcugaggacuaguaauaaggaaacuguaugaaugucugugggcaggaagugaagagauccuucuguaaagguuuuuggaauuaugucugcugaauaauaaacuuuuuugaaauaauaaaucugguagaaaaaugagaucuaaaaaaaaaaaaaaaaaaaaaaaaaaaaaaaaaaaaaaaaaaaaaaaaaaaaaaaaaaaaaaaaugcaucccccccccccccccccccccccccccccccaaaggcucuuuucagagccaccagaauu

SEQ ID NO: 17551 - RNA, 1910 nt, Artificial Sequence
  mRNA product Design g-5 comprising derived and/or modified sequence from HRSV(Memphis-37)__AIY60640.1__F-del_DSCav1_mut5 (opt1)
gggagacccgugacccggaaguuguacggcuacgcgacuuucccucccacaaacccucgcgcccuuccuuuccuacuugggcccggcagaaagcuuaccauggagcugcccauccucaagaccaacgccaucaccacgauccuggccgcggugacccugugcuucgccagcucccagaacaucaccgaggaguucuaccagagcacgugcuccgccgucagcaagggcuaccucuccgcccugcgcaccgggugguacaccagcgugaucaccaucgagcuguccaacaucaaggagaacaagugcaacggcaccgacgccaaggugaagcucaucaagcaggagcuggacaaguacaagaacgcggucacggagcugcagcuccugaugcagagcaccccggccgccggguccggcagcgccaucgcguccgggaucgccgugugcaaggugcugcaccucgagggcgaggucaacaagaucaagaacgcccugcugagcaccaacaaggccguggugucccucagcggcugcggggucuccgugcugaccuucaaggugcuggaccucaagaacuacaucgacaagcagcugcugcccauccucaacaagcagagcugcuccaucagcaacaucgagacggucaucgaguuccagcagaagaacaaccggcugcuggagaucacccgcgaguucuccgugaacgccggcgugaccacccccgucagcacguacaugcucaccaacagcgagcugcugucccucaucaacgacaugcccaucaccaacgaccagaagaagcugaugagcaacaacgugcagaucgugcggcagcaguccuacagcaucaugugcaucaucaaggaggagguccuggcguacguggugcagcucccgcuguacggggucaucgacacccccugcuggaagcugcacacgagcccccucugcaccaccaacaccaaggagggcuccaacaucugccugacgcgcaccgaccgggggugguacugcgacaacgccggcuccgugagcuucuucccccaggccgagaccugcaaggugcaguccaaccgcgucuucugcgacaccaugaacagccggacgcucccguccgaggugaaccugugcaacaucgacaucuucaaccccaaguacgacugcaagaucaugaccagcaagaccgacgucuccagcuccgugaucaccagccugggcgccaucguguccugcuacgggaagacgaagugcaccgccagcaacaagugccggggcaucaucaagaccuucuccaacgggugcgacuacgucagcaacaagggcguggacaccgugagcgucggcaacacgcucuacuacgugaacaagcaggaggggaagucccuguacgugaagggcgagcccaucaucaacuucuacgacccccuggucuucccgagcgacgaguucgacgcguccaucagccaggugaacgagaagaucaaccagucccucgccuucauccgcaagagcgacgagcugcugcacaacgugaacgucgggaaguccaccaccaacaucaugaucaccaccaucaucaucgugaucaucgugauccuccugcugcucaucgccgucggccuguuccuguacugcaaggcccggugaggacuaguaauaaggaaacuguaugaaugucugugggcaggaagugaagagauccuucuguaaagguuuuuggaauuaugucugcugaauaauaaacuuuuuugaaauaauaaaucugguagaaaaaugagaucuaaaaaaaaaaaaaaaaaaaaaaaaaaaaaaaaaaaaaaaaaaaaaaaaaaaaaaaaaaaaaaaaugcaucccccccccccccccccccccccccccccccaaaggcucuuuucagagccaccagaauu

SEQ ID NO: 17552 - RNA, 1910 nt, Artificial Sequence
  mRNA product Design g-5 comprising derived and/or modified sequence from HRSV(Memphis-37)__AIY60640.1__F-del_DSCav1_mut5 (opt2)
gggagacccgugacccggaaguuguacggcuacgcgacuuucccucccacaaacccucgcgcccuuccuuuccuacuugggcccggcagaaagcuuaccauggagcuccccauccucaagaccaacgccaucaccaccauccucgccgccgucacccucugcuucgccuccucccagaacaucaccgaggaguucuaccaguccaccugcuccgccgucuccaagggcuaccucuccgcccuccgcaccggcugguacaccuccgucaucaccaucgagcucuccaacaucaaggagaacaagugcaacggcaccgacgccaaggucaagcucaucaagcaggagcucgacaaguacaagaacgccgucaccgagcuccagcuccucaugcaguccacccccgccgccggcuccggcuccgccaucgccuccggcaucgccgucugcaagguccuccaccucgagggcgaggucaacaagaucaagaacgcccuccucuccaccaacaaggccgucgucucccucuccggcugcggcgucuccguccucaccuucaagguccucgaccucaagaacuacaucgacaagcagcuccuccccauccucaacaagcaguccugcuccaucuccaacaucgagaccgucaucgaguuccagcagaagaacaaccgccuccucgagaucacccgcgaguucuccgucaacgccggcgucaccacccccgucuccaccuacaugcucaccaacuccgagcuccucucccucaucaacgacaugcccaucaccaacgaccagaagaagcucauguccaacaacguccagaucguccgccagcaguccuacuccaucaugugcaucaucaaggaggagguccucgccuacgucguccagcucccccucuacggcgucaucgacacccccugcuggaagcuccacaccuccccccucugcaccaccaacaccaaggagggcuccaacaucugccucacccgcaccgaccgcggcugguacugcgacaacgccggcuccgucuccuucuucccccaggccgagaccugcaagguccaguccaaccgcgucuucugcgacaccaugaacucccgcacccuccccuccgaggucaaccucugcaacaucgacaucuucaaccccaaguacgacugcaagaucaugaccuccaagaccgacgucuccuccuccgucaucaccucccucggcgccaucgucuccugcuacggcaagaccaagugcaccgccuccaacaagugccgcggcaucaucaagaccuucuccaacggcugcgacuacgucuccaacaagggcgucgacaccgucuccgucggcaacacccucuacuacgucaacaagcaggagggcaagucccucuacgucaagggcgagcccaucaucaacuucuacgacccccucgucuuccccuccgacgaguucgacgccuccaucucccaggucaacgagaagaucaaccagucccucgccuucauccgcaaguccgacgagcuccuccacaacgucaacgucggcaaguccaccaccaacaucaugaucaccaccaucaucaucgucaucaucgucauccuccuccuccucaucgccgucggccucuuccucuacugcaaggcccgcugaggacuaguaauaaggaaacuguaugaaugucugugggcaggaagugaagagauccuucuguaaagguuuuuggaauuaugucugcugaauaauaaacuuuuuugaaauaauaaaucugguagaaaaaugagaucuaaaaaaaaaaaaaaaaaaaaaaaaaaaaaaaaaaaaaaaaaaaaaaaaaaaaaaaaaaaaaaaaugcaucccccccccccccccccccccccccccccccaaaggcucuuuucagagccaccagaauu

SEQ ID NO: 17553 - RNA, 1910 nt, Artificial Sequence
  mRNA product Design g-5 comprising derived and/or modified sequence from HRSV(Memphis-37)__AIY60640.1__F-del_DSCav1_mut5 (opt3)
gggagacccgugacccggaaguuguacggcuacgcgacuuucccucccacaaacccucgcgcccuuccuuuccuacuugggcccggcagaaagcuuaccauggagcugcccauccucaagaccaacgccauuacaacuauacuugcugcagugacgcugugcuucgccagcucccagaauaucaccgaagaguuuuaccaaucuacauguucagcggucaguaaaggcuauuugagcgcuuuaagaacugggugguacaccuccguuauuacaaucgaacugucuaacauuaaggagaauaaaugcaacggaaccgacgccaaggugaaacuaaucaagcaggaacucgauaaguauaaaaaugcaguaacugagcugcagcuucugaugcagucgaccccugccgcugguucaggcagcgcaauagccagugggaucgcuguguguaaggucuugcaccucgagggagaagugaacaaaauuaagaaugcccugcuguccacaaacaaagcgguugugucucucagcggcugcggugucuccguguuaacguucaagguacuggaccuuaagaauuacaucgauaaacaauugcugccaauucuaaacaagcagucauguaguaucagcaauauagagacuguuauugaauuucagcagaaaaacaauaggcuccuggagaucacccgggaguucucugugaacgcaggggucacaacuccgguguccaccuauaugcuuacaaauucagaacuguugagccucauuaacgacaugcccaucaccaacgaucaaaagaaacugaugaguaauaacgugcagaucguccgccagcagucuuacuccauuaugugcauaaucaaggaggaaguuuuagccuaugugguacaacugccucucuacggagugauugacacgccauguuggaaacuucauacuagcccccugugcacaaccaauacuaaggagggcucgaacaucuguuugacacgaaccgaucguggcugguacugcgacaaugcugggucugucuccuuuuucccucaggccgaaacguguaaggugcagucaaacagaguguuuugcgauaccaugaauaguagaacacugccaagcgaggugaaccucugcaauauagacauuuucaaccccaaauaugauuguaagaucaugacuuccaaaaccgacgucucuagcucagugaucacaagucugggagcaauuguauccugcuacgguaagacuaaauguaccgcuagcaauaagugcaggggcaucauuaagacauuuucuaacgggugugauuauguuucaaauaaaggaguggacaccgucagugugggcaacacucuuuacuaugucaauaagcaagaggguaaaagccuguacgugaagggggaaccuauaaucaacuucuaugacccauugguuuuuccguccgaugaguucgacgccucuauuucgcagguuaacgagaaaaucaaucagagccucgcguuuauccggaaguccgaugaacuguuacacaacguaaaugucggaaagucaacgacaaacauuaugauaaccacuaucauuaucgugauuaucguuauacugcuacuccugaucgccgugggccuuuucuuguacugcaaagcacgcugaggacuaguaauaaggaaacuguaugaaugucugugggcaggaagugaagagauccuucuguaaagguuuuuggaauuaugucugcugaauaauaaacuuuuuugaaauaauaaaucugguagaaaaaugagaucuaaaaaaaaaaaaaaaaaaaaaaaaaaaaaaaaaaaaaaaaaaaaaaaaaaaaaaaaaaaaaaaaugcaucccccccccccccccccccccccccccccccaaaggcucuuuucagagccaccagaauu

SEQ ID NO: 17554 - RNA, 1910 nt, Artificial Sequence
  mRNA product Design g-5 comprising derived and/or modified sequence from HRSV(Memphis-37)__AIY60640.1__F-del_DSCav1_mut5 (opt4)
gggagacccgugacccggaaguuguacggcuacgcgacuuucccucccacaaacccucgcgcccuuccuuuccuacuugggcccggcagaaagcuuaccauggagcugcccauccugaagaccaacgccaucaccaccauccuggccgccgugacccugugcuucgccagcagccagaacaucaccgaggaguucuaccagagcaccugcagcgccgugagcaagggcuaccugagcgcccugagaaccggcugguacaccagcgugaucaccaucgagcugagcaacaucaaggagaacaagugcaacggcaccgacgccaaggugaagcugaucaagcaggagcuggacaaguacaagaacgccgugaccgagcugcagcugcugaugcagagcacccccgccgccggcagcggcagcgccaucgccagcggcaucgccgugugcaaggugcugcaccuggagggcgaggugaacaagaucaagaacgcccugcugagcaccaacaaggccguggugagccugagcggcugcggcgugagcgugcugaccuucaaggugcuggaccugaagaacuacaucgacaagcagcugcugcccauccugaacaagcagagcugcagcaucagcaacaucgagaccgugaucgaguuccagcagaagaacaacagacugcuggagaucaccagagaguucagcgugaacgccggcgugaccacccccgugagcaccuacaugcugaccaacagcgagcugcugagccugaucaacgacaugcccaucaccaacgaccagaagaagcugaugagcaacaacgugcagaucgugagacagcagagcuacagcaucaugugcaucaucaaggaggaggugcuggccuacguggugcagcugccccuguacggcgugaucgacacccccugcuggaagcugcacaccagcccccugugcaccaccaacaccaaggagggcagcaacaucugccugaccagaaccgacagaggcugguacugcgacaacgccggcagcgugagcuucuucccccaggccgagaccugcaaggugcagagcaacagaguguucugcgacaccaugaacagcagaacccugcccagcgaggugaaccugugcaacaucgacaucuucaaccccaaguacgacugcaagaucaugaccagcaagaccgacgugagcagcagcgugaucaccagccugggcgccaucgugagcugcuacggcaagaccaagugcaccgccagcaacaagugcagaggcaucaucaagaccuucagcaacggcugcgacuacgugagcaacaagggcguggacaccgugagcgugggcaacacccuguacuacgugaacaagcaggagggcaagagccuguacgugaagggcgagcccaucaucaacuucuacgacccccugguguuccccagcgacgaguucgacgccagcaucagccaggugaacgagaagaucaaccagagccuggccuucaucagaaagagcgacgagcugcugcacaacgugaacgugggcaagagcaccaccaacaucaugaucaccaccaucaucaucgugaucaucgugauccugcugcugcugaucgccgugggccuguuccuguacugcaaggccagaugaggacuaguaauaaggaaacuguaugaaugucugugggcaggaagugaagagauccuucuguaaagguuuuuggaauuaugucugcugaauaauaaacuuuuuugaaauaauaaaucugguagaaaaaugagaucuaaaaaaaaaaaaaaaaaaaaaaaaaaaaaaaaaaaaaaaaaaaaaaaaaaaaaaaaaaaaaaaaugcaucccccccccccccccccccccccccccccccaaaggcucuuuucagagccaccagaauu

SEQ ID NO: 17555 - RNA, 1910 nt, Artificial Sequence
  mRNA product Design g-5 comprising derived and/or modified sequence from HRSV(Memphis-37)__AIY60640.1__F-del_DSCav1_mut5 (opt5)
gggagacccgugacccggaaguuguacggcuacgcgacuuucccucccacaaacccucgcgcccuuccuuuccuacuugggcccggcagaaagcuuaccauggagcugcccauccucaagaccaacgccauuacaacgauccuggcugccgugacccuuugcuucgcgagcucccagaauauuacagaagaguuuuaccaaucuaccuguagcgcugucuccaaaggcuaucugucugcccucagaacagggugguacaccagcguuaucacaauugaacuguccaacaucaaggagaauaaaugcaacggaaccgacgccaaggugaaacuuaucaagcaggaacuggauaaguauaaaaaugcugugacggagcuccagcugcugaugcagucuaccccugccgcuggcagcggguccgccauugcgagcggaaucgccgucuguaaggugcuccaccuggagggcgaaguuaacaaaauuaagaaugcccuucugucuacaaacaaagcuguggucucccucagcgggugcggagugucuguucugaccuucaaggugcuugaccugaagaauuacaucgauaaacaacuccugccgauucugaacaagcaguccuguagcaucucuaauauugagacagucaucgaauuucagcagaaaaacaaucggcuccuggagaucacccgcgaguucuccgugaacgcuggcgugacgacacccgucagcaccuauaugcuuacaaauuccgaacugcucucucugauuaacgacaugccuaucaccaacgaucaaaagaaacuuaugagcaauaacguucagauugugagacagcaguccuacagcaucaugugcauuaucaaggaggaagugcuggccuaugucgugcaacucccccuguacggcguuaucgacaccccuuguuggaaacugcauacaucuccccucugcacgaccaauacaaaggagggguccaacauuugucugacccggacagaucgcggaugguacugcgacaaugcgggcagcgugagcuuuuucccucaggccgaaaccuguaagguccagucuaacagaguguuuugcgauacgaugaacuccagaacacugccgucugagguuaaucucugcaauaucgacauuuucaaccccaaauaugauuguaagaucaugaccagcaaaaccgacguguccagcucugucauuacaucccugggggcuaucgugagcugcuacggaaagaccaaauguacagccucuaauaagugccggggcaucauuaagacguuuuccaacgggugugauuaugucagcaauaaaggaguggacaccguuuccgugggcaacacacuuuacuaugucaauaagcaagagggcaaaucucuguacgugaagggggaaccuaucauuaacuucuaugacccccucguuuuuccuagcgaugaguucgacgcuuccaucucucaggugaacgagaaaauuaaucagagccuggccuuuauccgcaaguccgaugaacugcuccacaacgucaaugugggaaagagcaccacaaacauuaugaucaccacgaucauuaucgugauuaucguuauucugcuucugcucaucgccgucggccuguuccuguacugcaaagcuagaugaggacuaguaauaaggaaacuguaugaaugucugugggcaggaagugaagagauccuucuguaaagguuuuuggaauuaugucugcugaauaauaaacuuuuuugaaauaauaaaucugguagaaaaaugagaucuaaaaaaaaaaaaaaaaaaaaaaaaaaaaaaaaaaaaaaaaaaaaaaaaaaaaaaaaaaaaaaaaugcaucccccccccccccccccccccccccccccccaaaggcucuuuucagagccaccagaauu

SEQ ID NO: 17556 - RNA, 1910 nt, Artificial Sequence
  mRNA product Design g-5 comprising derived and/or modified sequence from HRSV(Memphis-37)__AIY60640.1__F-del_DSCav1_mut5 (opt6)
gggagacccgugacccggaaguuguacggcuacgcgacuuucccucccacaaacccucgcgcccuuccuuuccuacuugggcccggcagaaagcuuaccauggaauuacccaucuuaaaaacaaaugcaauaacaacaauacuagcagccguaacauuaugcuucgccucaagccaaaacauaacagaagaauuuuaccaaagcacauguuccgccguaucaaaaggauaucucucagcacuacguacuggaugguauacauccguaaucacaauugaacuaucaaacauuaaagaaaacaaaugcaauggaacagaugcgaaaguaaaacuaauaaaacaagaauuagauaaauauaaaaaugcaguaaccgaacuacaacuacuaaugcaaucaacucccgcugccgguagcggauccgccauagcaagcggaauugcuguauguaaaguccuacaucuugaaggcgaagucaacaaaaucaaaaaugcauuacucucgaccaacaaagcagucguaucacuaucaggaugcggagucucaguauuaacuuuuaaaguccuugaccuaaaaaacuacauagacaaacaacuacuaccaauucuaaauaaacaaaguugcagcauauccaauaucgaaacaguuauagaauuucaacaaaaaaacaaccgccuacuagaaaucacuagagaauuuucaguaaaugcaggcguaaccacaccagucucuaccuauaugcuuaccaacucugaauuauuaucacuuauaaacgacaugcccauaacaaaugaucaaaaaaaacuaaugagcaacaacguacaaauaguaagacaacaaagcuacagcauuauguguauaauaaaagaagaaguguuagcuuauguaguccaacuaccccucuauggcguuaucgauacaccaugcuggaaauuacacacaagcccucuaugcacaacuaacaccaaagaaggcucuaacauaugcuuaacaagaacagauagaggaugguauugcgauaacgcaggaucaguaucauucuuuccacaagcagaaacauguaaaguacaaucuaaccgaguauucugcgacacaaugaacucuagaacacuacccucagaaguuaaucucuguaauauugacauuuucaauccaaaauacgauugcaaaauaaugaccucuaaaaccgacguaucauccucaguuauaacguccuuaggagcaaucguaagcugcuauggcaaaacaaaauguaccgcaucaaacaaaugcagaggaauaauaaaaacauucucaaacggcugugacuacguaagcaauaaagguguugacacaguuucaguaggaaauacacuauacuauguaaauaaacaagaaggaaaaucucucuauguaaaaggagaacccauaauaaacuucuacgacccacucguauuuccaagcgaugaauuugaugcgagcauuucccagguaaaugaaaaaauaaaucaaucacuagcauucaucagaaaaagugaugaauuacuacacaauguuaacguaggaaaaucaacaacaaauaucaugauaacaacaaucauaauagucauaaucguaauauuacuauuacuaauagcaguagguuuauuucuauacuguaaagcaagguaaggacuaguaauaaggaaacuguaugaaugucugugggcaggaagugaagagauccuucuguaaagguuuuuggaauuaugucugcugaauaauaaacuuuuuugaaauaauaaaucugguagaaaaaugagaucuaaaaaaaaaaaaaaaaaaaaaaaaaaaaaaaaaaaaaaaaaaaaaaaaaaaaaaaaaaaaaaaaugcaucccccccccccccccccccccccccccccccaaaggcucuuuucagagccaccagaauu

SEQ ID NO: 17557 - RNA, 1910 nt, Artificial Sequence
  mRNA product Design g-5 comprising derived and/or modified sequence from HRSV(Memphis-37)__AIY60640.1__F-del_DSCav1_mut5 (opt11)
gggagacccgugacccggaaguuguacggcuacgcgacuuucccucccacaaacccucgcgcccuuccuuuccuacuugggcccggcagaaagcuuaccauggaacuucccauccuaaaaaccaacgccauaacaacaauccucgcagcagucacccucugcuucgccucuucacaaaacaucaccgaagaauuuuaccaaucaaccugcuccgccguguccaaaggcuaccucucagcacugcgcacaggaugguauaccagcguaaucaccaucgaacucuccaacaucaaggaaaacaaaugcaacggcaccgaugccaaagucaaacucaucaagcaagaacuugacaaauacaaaaacgccgugaccgagcuacaacuccucaugcaguccacuccagccgccggcuccggcagcgccaucgccuccggcaucgccguaugcaaaguccuccaccucgaaggcgaaguaaacaaaaucaagaacgcacuccuaagcaccaacaaagccgucgucucacucuccgguugcggcgucagcguccuaacauucaaaguucucgaccucaaaaacuacauagacaaacaacuccuccccauccucaacaaacaauccugcuccauaucaaacaucgaaaccguuaucgaauuucaacaaaaaaacaaccgccuccuagaaaucacccgcgaauuuuccgucaacgcaggcgucaccacccccguuuccaccuauaugcucaccaacuccgaacuccucucccucaucaacgacaugcccauuaccaacgaccaaaagaaacuuaugagcaacaacguucaaaucguccgacaacaaucauacuccaucaugugcauuaucaaagaagaaguacucgccuacguaguacaauuaccccucuacggcguaaucgacaccccaugcuggaaacuacacaccuccccccucuguaccaccaacaccaaagaaggcucuaacaucugccucacccgcacagaccguggcugguauugcgauaacgcagggucugucuccuucuucccccaagccgaaacaugcaaaguccaauccaacagagucuucugcgacaccaugaacucgagaacccuccccuccgaagucaaccuaugcaacaucgacaucuucaacccaaaauacgacugcaaaaucaugacuucaaaaacagacgugagcucguccgucaucacaagccuaggagcuaucguauccugcuacggaaaaacaaaaugcacugcuuccaacaaaugccgcggaaucauaaaaaccuucuccaacggcugcgacuacgucagcaacaaaggcgucgacacagucuccguaggcaacacccuauacuacgucaauaaacaagaaggcaagucccuauaugucaaaggcgagcccaucaucaauuucuaugauccccucguuuucccauccgacgaauuugacgcauccaucucccaagucaacgaaaaaauaaaccaaagccucgcauucauccgcaaauccgacgaacuccuccacaacguaaacguaggaaaauccacaacuaacaucaugaucaccaccaucaucaucgucauuaucgucauccuacuccuccucauagcagucggccucuuccucuacugcaaagcacgcuagggacuaguaauaaggaaacuguaugaaugucugugggcaggaagugaagagauccuucuguaaagguuuuuggaauuaugucugcugaauaauaaacuuuuuugaaauaauaaaucugguagaaaaaugagaucuaaaaaaaaaaaaaaaaaaaaaaaaaaaaaaaaaaaaaaaaaaaaaaaaaaaaaaaaaaaaaaaaugcaucccccccccccccccccccccccccccccccaaaggcucuuuucagagccaccagaauu

SEQ ID NO: 17558 - RNA, 1926 nt, Artificial Sequence
  mRNA product Design h-1 comprising derived and/or modified sequence from HRSV(Memphis-37)__AIY60640.1__F-del_DSCav1_mut5 (opt1)
gggagacccgugacccggaaguuguacggcuacgcgacuuucccucccacaaacccucgcgcccuuccuuuccuacuugggcccggcagaaagcuuaccauggagcugcccauccucaagaccaacgccaucaccacgauccuggccgcggugacccugugcuucgccagcucccagaacaucaccgaggaguucuaccagagcacgugcuccgccgucagcaagggcuaccucuccgcccugcgcaccgggugguacaccagcgugaucaccaucgagcuguccaacaucaaggagaacaagugcaacggcaccgacgccaaggugaagcucaucaagcaggagcuggacaaguacaagaacgcggucacggagcugcagcuccugaugcagagcaccccggccgccggcuccgggagcgcgaucgccuccggcaucgccgucugcaaggugcugcaccucgagggcgaggugaacaagaucaagaacgcccugcuguccaccaacaaggccgucgugagccucuccggcugcggggugagcguccugaccuucaaggugcuggaccucaagaacuacaucgacaagcagcugcugcccauccugaacaagcagagcugcuccaucagcaacaucgagaccgucaucgaguuccagcagaagaacaaccgccuccuggagaucacgcgggaguucagcgugaacgcgggcgugaccacccccgucuccaccuacaugcugacgaacagcgagcuccugucccugaucaacgacaugccgaucaccaacgaccagaagaagcucaugagcaacaacgugcagaucgugcgccagcaguccuacagcaucaugugcaucaucaaggaggagguccuggccuacguggugcagcugccccucuacggggucaucgacacccccugcuggaagcugcacaccagcccccugugcacgaccaacaccaaggagggcuccaacaucugccucacccggacggaccgcgggugguacugcgacaacgccggcagcguguccuucuucccgcaggccgagaccugcaagguccagagcaaccggguguucugcgacaccaugaacucccggacccugcccagcgaggugaaccucugcaacaucgacaucuucaaccccaaguacgacugcaagaucaugacguccaagaccgacgucagcuccagcgugaucaccucccugggcgccaucgugagcugcuacgggaagaccaagugcacggcgagcaacaagugccgcggcaucaucaagaccuucuccaacgggugcgacuacgucagcaacaagggcguggacaccguguccgucggcaacacccuguacuacgugaacaagcaggagggcaagagccucuacgugaagggggagcccaucaucaacuucuacgacccgcuggucuuccccuccgacgaguucgacgccagcaucucccaggugaacgagaagaucaaccagagccuggccuucauccggaaguccgacgagcuccugcacaacgugaacgucggcaagagcaccacgaacaucaugaucaccaccaucaucaucgugaucaucgugauccugcugcuccugaucgccgucgggcuguuccucuacugcaaggcccgcugaggacuaguacuggcugcaucucccuuuccucuguccuccauccuucucccaggauggugaagggggaccugguacccagugauccccaccccaggauccuaaaucaugacuuaccugcuaauaaaaacucauuggaaaagugagaagaucuaaaaaaaaaaaaaaaaaaaaaaaaaaaaaaaaaaaaaaaaaaaaaaaaaaaaaaaaaaaaaaaaugcaucccccccccccccccccccccccccccccccaaaggcucuuuucagagccaccagaauu

SEQ ID NO: 17559 - RNA, 1926 nt, Artificial Sequence
  mRNA product Design h-1 comprising derived and/or modified sequence from HRSV(Memphis-37)__AIY60640.1__F-del_DSCav1_mut5 (opt1)
gggagacccgugacccggaaguuguacggcuacgcgacuuucccucccacaaacccucgcgcccuuccuuuccuacuugggcccggcagaaagcuuaccauggagcugcccauccucaagaccaacgccaucaccacgauccuggccgcggugacccugugcuucgccagcucccagaacaucaccgaggaguucuaccagagcacgugcuccgccgucagcaagggcuaccucuccgcccugcgcaccgggugguacaccagcgugaucaccaucgagcuguccaacaucaaggagaacaagugcaacggcaccgacgccaaggugaagcucaucaagcaggagcuggacaaguacaagaacgcggucacggagcugcagcuccugaugcagagcaccccggccgccggguccggcagcgccaucgcguccgggaucgccgugugcaaggugcugcaccucgagggcgaggucaacaagaucaagaacgcccugcugagcaccaacaaggccguggugucccucagcggcugcggggucuccgugcugaccuucaaggugcuggaccucaagaacuacaucgacaagcagcugcugcccauccucaacaagcagagcugcuccaucagcaacaucgagacggucaucgaguuccagcagaagaacaaccggcugcuggagaucacccgcgaguucuccgugaacgccggcgugaccacccccgucagcacguacaugcucaccaacagcgagcugcugucccucaucaacgacaugcccaucaccaacgaccagaagaagcugaugagcaacaacgugcagaucgugcggcagcaguccuacagcaucaugugcaucaucaaggaggagguccuggcguacguggugcagcucccgcuguacggggucaucgacacccccugcuggaagcugcacacgagcccccucugcaccaccaacaccaaggagggcuccaacaucugccugacgcgcaccgaccgggggugguacugcgacaacgccggcuccgugagcuucuucccccaggccgagaccugcaaggugcaguccaaccgcgucuucugcgacaccaugaacagccggacgcucccguccgaggugaaccugugcaacaucgacaucuucaaccccaaguacgacugcaagaucaugaccagcaagaccgacgucuccagcuccgugaucaccagccugggcgccaucguguccugcuacgggaagacgaagugcaccgccagcaacaagugccggggcaucaucaagaccuucuccaacgggugcgacuacgucagcaacaagggcguggacaccgugagcgucggcaacacgcucuacuacgugaacaagcaggaggggaagucccuguacgugaagggcgagcccaucaucaacuucuacgacccccuggucuucccgagcgacgaguucgacgcguccaucagccaggugaacgagaagaucaaccagucccucgccuucauccgcaagagcgacgagcugcugcacaacgugaacgucgggaaguccaccaccaacaucaugaucaccaccaucaucaucgugaucaucgugauccuccugcugcucaucgccgucggccuguuccuguacugcaaggcccggugaggacuaguacuggcugcaucucccuuuccucuguccuccauccuucucccaggauggugaagggggaccugguacccagugauccccaccccaggauccuaaaucaugacuuaccugcuaauaaaaacucauuggaaaagugagaagaucuaaaaaaaaaaaaaaaaaaaaaaaaaaaaaaaaaaaaaaaaaaaaaaaaaaaaaaaaaaaaaaaaugcaucccccccccccccccccccccccccccccccaaaggcucuuuucagagccaccagaauu

SEQ ID NO: 17560 - RNA, 1926 nt, Artificial Sequence
  mRNA product Design h-1 comprising derived and/or modified sequence from HRSV(Memphis-37)__AIY60640.1__F-del_DSCav1_mut5 (opt2)
gggagacccgugacccggaaguuguacggcuacgcgacuuucccucccacaaacccucgcgcccuuccuuuccuacuugggcccggcagaaagcuuaccauggagcuccccauccucaagaccaacgccaucaccaccauccucgccgccgucacccucugcuucgccuccucccagaacaucaccgaggaguucuaccaguccaccugcuccgccgucuccaagggcuaccucuccgcccuccgcaccggcugguacaccuccgucaucaccaucgagcucuccaacaucaaggagaacaagugcaacggcaccgacgccaaggucaagcucaucaagcaggagcucgacaaguacaagaacgccgucaccgagcuccagcuccucaugcaguccacccccgccgccggcuccggcuccgccaucgccuccggcaucgccgucugcaagguccuccaccucgagggcgaggucaacaagaucaagaacgcccuccucuccaccaacaaggccgucgucucccucuccggcugcggcgucuccguccucaccuucaagguccucgaccucaagaacuacaucgacaagcagcuccuccccauccucaacaagcaguccugcuccaucuccaacaucgagaccgucaucgaguuccagcagaagaacaaccgccuccucgagaucacccgcgaguucuccgucaacgccggcgucaccacccccgucuccaccuacaugcucaccaacuccgagcuccucucccucaucaacgacaugcccaucaccaacgaccagaagaagcucauguccaacaacguccagaucguccgccagcaguccuacuccaucaugugcaucaucaaggaggagguccucgccuacgucguccagcucccccucuacggcgucaucgacacccccugcuggaagcuccacaccuccccccucugcaccaccaacaccaaggagggcuccaacaucugccucacccgcaccgaccgcggcugguacugcgacaacgccggcuccgucuccuucuucccccaggccgagaccugcaagguccaguccaaccgcgucuucugcgacaccaugaacucccgcacccuccccuccgaggucaaccucugcaacaucgacaucuucaaccccaaguacgacugcaagaucaugaccuccaagaccgacgucuccuccuccgucaucaccucccucggcgccaucgucuccugcuacggcaagaccaagugcaccgccuccaacaagugccgcggcaucaucaagaccuucuccaacggcugcgacuacgucuccaacaagggcgucgacaccgucuccgucggcaacacccucuacuacgucaacaagcaggagggcaagucccucuacgucaagggcgagcccaucaucaacuucuacgacccccucgucuuccccuccgacgaguucgacgccuccaucucccaggucaacgagaagaucaaccagucccucgccuucauccgcaaguccgacgagcuccuccacaacgucaacgucggcaaguccaccaccaacaucaugaucaccaccaucaucaucgucaucaucgucauccuccuccuccucaucgccgucggccucuuccucuacugcaaggcccgcugaggacuaguacuggcugcaucucccuuuccucuguccuccauccuucucccaggauggugaagggggaccugguacccagugauccccaccccaggauccuaaaucaugacuuaccugcuaauaaaaacucauuggaaaagugagaagaucuaaaaaaaaaaaaaaaaaaaaaaaaaaaaaaaaaaaaaaaaaaaaaaaaaaaaaaaaaaaaaaaaugcaucccccccccccccccccccccccccccccccaaaggcucuuuucagagccaccagaauu

SEQ ID NO: 17561 - RNA, 1926 nt, Artificial Sequence
  mRNA product Design h-1 comprising derived and/or modified sequence from HRSV(Memphis-37)__AIY60640.1__F-del_DSCav1_mut5 (opt3)
gggagacccgugacccggaaguuguacggcuacgcgacuuucccucccacaaacccucgcgcccuuccuuuccuacuugggcccggcagaaagcuuaccauggagcugcccauccucaagaccaacgccauuacaacuauacuugcugcagugacgcugugcuucgccagcucccagaauaucaccgaagaguuuuaccaaucuacauguucagcggucaguaaaggcuauuugagcgcuuuaagaacugggugguacaccuccguuauuacaaucgaacugucuaacauuaaggagaauaaaugcaacggaaccgacgccaaggugaaacuaaucaagcaggaacucgauaaguauaaaaaugcaguaacugagcugcagcuucugaugcagucgaccccugccgcugguucaggcagcgcaauagccagugggaucgcuguguguaaggucuugcaccucgagggagaagugaacaaaauuaagaaugcccugcuguccacaaacaaagcgguugugucucucagcggcugcggugucuccguguuaacguucaagguacuggaccuuaagaauuacaucgauaaacaauugcugccaauucuaaacaagcagucauguaguaucagcaauauagagacuguuauugaauuucagcagaaaaacaauaggcuccuggagaucacccgggaguucucugugaacgcaggggucacaacuccgguguccaccuauaugcuuacaaauucagaacuguugagccucauuaacgacaugcccaucaccaacgaucaaaagaaacugaugaguaauaacgugcagaucguccgccagcagucuuacuccauuaugugcauaaucaaggaggaaguuuuagccuaugugguacaacugccucucuacggagugauugacacgccauguuggaaacuucauacuagcccccugugcacaaccaauacuaaggagggcucgaacaucuguuugacacgaaccgaucguggcugguacugcgacaaugcugggucugucuccuuuuucccucaggccgaaacguguaaggugcagucaaacagaguguuuugcgauaccaugaauaguagaacacugccaagcgaggugaaccucugcaauauagacauuuucaaccccaaauaugauuguaagaucaugacuuccaaaaccgacgucucuagcucagugaucacaagucugggagcaauuguauccugcuacgguaagacuaaauguaccgcuagcaauaagugcaggggcaucauuaagacauuuucuaacgggugugauuauguuucaaauaaaggaguggacaccgucagugugggcaacacucuuuacuaugucaauaagcaagaggguaaaagccuguacgugaagggggaaccuauaaucaacuucuaugacccauugguuuuuccguccgaugaguucgacgccucuauuucgcagguuaacgagaaaaucaaucagagccucgcguuuauccggaaguccgaugaacuguuacacaacguaaaugucggaaagucaacgacaaacauuaugauaaccacuaucauuaucgugauuaucguuauacugcuacuccugaucgccgugggccuuuucuuguacugcaaagcacgcugaggacuaguacuggcugcaucucccuuuccucuguccuccauccuucucccaggauggugaagggggaccugguacccagugauccccaccccaggauccuaaaucaugacuuaccugcuaauaaaaacucauuggaaaagugagaagaucuaaaaaaaaaaaaaaaaaaaaaaaaaaaaaaaaaaaaaaaaaaaaaaaaaaaaaaaaaaaaaaaaugcaucccccccccccccccccccccccccccccccaaaggcucuuuucagagccaccagaauu

SEQ ID NO: 17562 - RNA, 1926 nt, Artificial Sequence
  mRNA product Design h-1 comprising derived and/or modified sequence from HRSV(Memphis-37)__AIY60640.1__F-del_DSCav1_mut5 (opt4)
gggagacccgugacccggaaguuguacggcuacgcgacuuucccucccacaaacccucgcgcccuuccuuuccuacuugggcccggcagaaagcuuaccauggagcugcccauccugaagaccaacgccaucaccaccauccuggccgccgugacccugugcuucgccagcagccagaacaucaccgaggaguucuaccagagcaccugcagcgccgugagcaagggcuaccugagcgcccugagaaccggcugguacaccagcgugaucaccaucgagcugagcaacaucaaggagaacaagugcaacggcaccgacgccaaggugaagcugaucaagcaggagcuggacaaguacaagaacgccgugaccgagcugcagcugcugaugcagagcacccccgccgccggcagcggcagcgccaucgccagcggcaucgccgugugcaaggugcugcaccuggagggcgaggugaacaagaucaagaacgcccugcugagcaccaacaaggccguggugagccugagcggcugcggcgugagcgugcugaccuucaaggugcuggaccugaagaacuacaucgacaagcagcugcugcccauccugaacaagcagagcugcagcaucagcaacaucgagaccgugaucgaguuccagcagaagaacaacagacugcuggagaucaccagagaguucagcgugaacgccggcgugaccacccccgugagcaccuacaugcugaccaacagcgagcugcugagccugaucaacgacaugcccaucaccaacgaccagaagaagcugaugagcaacaacgugcagaucgugagacagcagagcuacagcaucaugugcaucaucaaggaggaggugcuggccuacguggugcagcugccccuguacggcgugaucgacacccccugcuggaagcugcacaccagcccccugugcaccaccaacaccaaggagggcagcaacaucugccugaccagaaccgacagaggcugguacugcgacaacgccggcagcgugagcuucuucccccaggccgagaccugcaaggugcagagcaacagaguguucugcgacaccaugaacagcagaacccugcccagcgaggugaaccugugcaacaucgacaucuucaaccccaaguacgacugcaagaucaugaccagcaagaccgacgugagcagcagcgugaucaccagccugggcgccaucgugagcugcuacggcaagaccaagugcaccgccagcaacaagugcagaggcaucaucaagaccuucagcaacggcugcgacuacgugagcaacaagggcguggacaccgugagcgugggcaacacccuguacuacgugaacaagcaggagggcaagagccuguacgugaagggcgagcccaucaucaacuucuacgacccccugguguuccccagcgacgaguucgacgccagcaucagccaggugaacgagaagaucaaccagagccuggccuucaucagaaagagcgacgagcugcugcacaacgugaacgugggcaagagcaccaccaacaucaugaucaccaccaucaucaucgugaucaucgugauccugcugcugcugaucgccgugggccuguuccuguacugcaaggccagaugaggacuaguacuggcugcaucucccuuuccucuguccuccauccuucucccaggauggugaagggggaccugguacccagugauccccaccccaggauccuaaaucaugacuuaccugcuaauaaaaacucauuggaaaagugagaagaucuaaaaaaaaaaaaaaaaaaaaaaaaaaaaaaaaaaaaaaaaaaaaaaaaaaaaaaaaaaaaaaaaugcaucccccccccccccccccccccccccccccccaaaggcucuuuucagagccaccagaauu

SEQ ID NO: 17563 - RNA, 1926 nt, Artificial Sequence
  mRNA product Design h-1 comprising derived and/or modified sequence from HRSV(Memphis-37)__AIY60640.1__F-del_DSCav1_mut5 (opt5)
gggagacccgugacccggaaguuguacggcuacgcgacuuucccucccacaaacccucgcgcccuuccuuuccuacuugggcccggcagaaagcuuaccauggagcugcccauccucaagaccaacgccauuacaacgauccuggcugccgugacccuuugcuucgcgagcucccagaauauuacagaagaguuuuaccaaucuaccuguagcgcugucuccaaaggcuaucugucugcccucagaacagggugguacaccagcguuaucacaauugaacuguccaacaucaaggagaauaaaugcaacggaaccgacgccaaggugaaacuuaucaagcaggaacuggauaaguauaaaaaugcugugacggagcuccagcugcugaugcagucuaccccugccgcuggcagcggguccgccauugcgagcggaaucgccgucuguaaggugcuccaccuggagggcgaaguuaacaaaauuaagaaugcccuucugucuacaaacaaagcuguggucucccucagcgggugcggagugucuguucugaccuucaaggugcuugaccugaagaauuacaucgauaaacaacuccugccgauucugaacaagcaguccuguagcaucucuaauauugagacagucaucgaauuucagcagaaaaacaaucggcuccuggagaucacccgcgaguucuccgugaacgcuggcgugacgacacccgucagcaccuauaugcuuacaaauuccgaacugcucucucugauuaacgacaugccuaucaccaacgaucaaaagaaacuuaugagcaauaacguucagauugugagacagcaguccuacagcaucaugugcauuaucaaggaggaagugcuggccuaugucgugcaacucccccuguacggcguuaucgacaccccuuguuggaaacugcauacaucuccccucugcacgaccaauacaaaggagggguccaacauuugucugacccggacagaucgcggaugguacugcgacaaugcgggcagcgugagcuuuuucccucaggccgaaaccuguaagguccagucuaacagaguguuuugcgauacgaugaacuccagaacacugccgucugagguuaaucucugcaauaucgacauuuucaaccccaaauaugauuguaagaucaugaccagcaaaaccgacguguccagcucugucauuacaucccugggggcuaucgugagcugcuacggaaagaccaaauguacagccucuaauaagugccggggcaucauuaagacguuuuccaacgggugugauuaugucagcaauaaaggaguggacaccguuuccgugggcaacacacuuuacuaugucaauaagcaagagggcaaaucucuguacgugaagggggaaccuaucauuaacuucuaugacccccucguuuuuccuagcgaugaguucgacgcuuccaucucucaggugaacgagaaaauuaaucagagccuggccuuuauccgcaaguccgaugaacugcuccacaacgucaaugugggaaagagcaccacaaacauuaugaucaccacgaucauuaucgugauuaucguuauucugcuucugcucaucgccgucggccuguuccuguacugcaaagcuagaugaggacuaguacuggcugcaucucccuuuccucuguccuccauccuucucccaggauggugaagggggaccugguacccagugauccccaccccaggauccuaaaucaugacuuaccugcuaauaaaaacucauuggaaaagugagaagaucuaaaaaaaaaaaaaaaaaaaaaaaaaaaaaaaaaaaaaaaaaaaaaaaaaaaaaaaaaaaaaaaaugcaucccccccccccccccccccccccccccccccaaaggcucuuuucagagccaccagaauu

SEQ ID NO: 17564 - RNA, 1926 nt, Artificial Sequence
  mRNA product Design h-1 comprising derived and/or modified sequence from HRSV(Memphis-37)__AIY60640.1__F-del_DSCav1_mut5 (opt6)
gggagacccgugacccggaaguuguacggcuacgcgacuuucccucccacaaacccucgcgcccuuccuuuccuacuugggcccggcagaaagcuuaccauggaauuacccaucuuaaaaacaaaugcaauaacaacaauacuagcagccguaacauuaugcuucgccucaagccaaaacauaacagaagaauuuuaccaaagcacauguuccgccguaucaaaaggauaucucucagcacuacguacuggaugguauacauccguaaucacaauugaacuaucaaacauuaaagaaaacaaaugcaauggaacagaugcgaaaguaaaacuaauaaaacaagaauuagauaaauauaaaaaugcaguaaccgaacuacaacuacuaaugcaaucaacucccgcugccgguagcggauccgccauagcaagcggaauugcuguauguaaaguccuacaucuugaaggcgaagucaacaaaaucaaaaaugcauuacucucgaccaacaaagcagucguaucacuaucaggaugcggagucucaguauuaacuuuuaaaguccuugaccuaaaaaacuacauagacaaacaacuacuaccaauucuaaauaaacaaaguugcagcauauccaauaucgaaacaguuauagaauuucaacaaaaaaacaaccgccuacuagaaaucacuagagaauuuucaguaaaugcaggcguaaccacaccagucucuaccuauaugcuuaccaacucugaauuauuaucacuuauaaacgacaugcccauaacaaaugaucaaaaaaaacuaaugagcaacaacguacaaauaguaagacaacaaagcuacagcauuauguguauaauaaaagaagaaguguuagcuuauguaguccaacuaccccucuauggcguuaucgauacaccaugcuggaaauuacacacaagcccucuaugcacaacuaacaccaaagaaggcucuaacauaugcuuaacaagaacagauagaggaugguauugcgauaacgcaggaucaguaucauucuuuccacaagcagaaacauguaaaguacaaucuaaccgaguauucugcgacacaaugaacucuagaacacuacccucagaaguuaaucucuguaauauugacauuuucaauccaaaauacgauugcaaaauaaugaccucuaaaaccgacguaucauccucaguuauaacguccuuaggagcaaucguaagcugcuauggcaaaacaaaauguaccgcaucaaacaaaugcagaggaauaauaaaaacauucucaaacggcugugacuacguaagcaauaaagguguugacacaguuucaguaggaaauacacuauacuauguaaauaaacaagaaggaaaaucucucuauguaaaaggagaacccauaauaaacuucuacgacccacucguauuuccaagcgaugaauuugaugcgagcauuucccagguaaaugaaaaaauaaaucaaucacuagcauucaucagaaaaagugaugaauuacuacacaauguuaacguaggaaaaucaacaacaaauaucaugauaacaacaaucauaauagucauaaucguaauauuacuauuacuaauagcaguagguuuauuucuauacuguaaagcaagguaaggacuaguacuggcugcaucucccuuuccucuguccuccauccuucucccaggauggugaagggggaccugguacccagugauccccaccccaggauccuaaaucaugacuuaccugcuaauaaaaacucauuggaaaagugagaagaucuaaaaaaaaaaaaaaaaaaaaaaaaaaaaaaaaaaaaaaaaaaaaaaaaaaaaaaaaaaaaaaaaugcaucccccccccccccccccccccccccccccccaaaggcucuuuucagagccaccagaauu

SEQ ID NO: 17565 - RNA, 1926 nt, Artificial Sequence
  mRNA product Design h-1 comprising derived and/or modified sequence from HRSV(Memphis-37)__AIY60640.1__F-del_DSCav1_mut5 (opt11)
gggagacccgugacccggaaguuguacggcuacgcgacuuucccucccacaaacccucgcgcccuuccuuuccuacuugggcccggcagaaagcuuaccauggaacuucccauccuaaaaaccaacgccauaacaacaauccucgcagcagucacccucugcuucgccucuucacaaaacaucaccgaagaauuuuaccaaucaaccugcuccgccguguccaaaggcuaccucucagcacugcgcacaggaugguauaccagcguaaucaccaucgaacucuccaacaucaaggaaaacaaaugcaacggcaccgaugccaaagucaaacucaucaagcaagaacuugacaaauacaaaaacgccgugaccgagcuacaacuccucaugcaguccacuccagccgccggcuccggcagcgccaucgccuccggcaucgccguaugcaaaguccuccaccucgaaggcgaaguaaacaaaaucaagaacgcacuccuaagcaccaacaaagccgucgucucacucuccgguugcggcgucagcguccuaacauucaaaguucucgaccucaaaaacuacauagacaaacaacuccuccccauccucaacaaacaauccugcuccauaucaaacaucgaaaccguuaucgaauuucaacaaaaaaacaaccgccuccuagaaaucacccgcgaauuuuccgucaacgcaggcgucaccacccccguuuccaccuauaugcucaccaacuccgaacuccucucccucaucaacgacaugcccauuaccaacgaccaaaagaaacuuaugagcaacaacguucaaaucguccgacaacaaucauacuccaucaugugcauuaucaaagaagaaguacucgccuacguaguacaauuaccccucuacggcguaaucgacaccccaugcuggaaacuacacaccuccccccucuguaccaccaacaccaaagaaggcucuaacaucugccucacccgcacagaccguggcugguauugcgauaacgcagggucugucuccuucuucccccaagccgaaacaugcaaaguccaauccaacagagucuucugcgacaccaugaacucgagaacccuccccuccgaagucaaccuaugcaacaucgacaucuucaacccaaaauacgacugcaaaaucaugacuucaaaaacagacgugagcucguccgucaucacaagccuaggagcuaucguauccugcuacggaaaaacaaaaugcacugcuuccaacaaaugccgcggaaucauaaaaaccuucuccaacggcugcgacuacgucagcaacaaaggcgucgacacagucuccguaggcaacacccuauacuacgucaauaaacaagaaggcaagucccuauaugucaaaggcgagcccaucaucaauuucuaugauccccucguuuucccauccgacgaauuugacgcauccaucucccaagucaacgaaaaaauaaaccaaagccucgcauucauccgcaaauccgacgaacuccuccacaacguaaacguaggaaaauccacaacuaacaucaugaucaccaccaucaucaucgucauuaucgucauccuacuccuccucauagcagucggccucuuccucuacugcaaagcacgcuagggacuaguacuggcugcaucucccuuuccucuguccuccauccuucucccaggauggugaagggggaccugguacccagugauccccaccccaggauccuaaaucaugacuuaccugcuaauaaaaacucauuggaaaagugagaagaucuaaaaaaaaaaaaaaaaaaaaaaaaaaaaaaaaaaaaaaaaaaaaaaaaaaaaaaaaaaaaaaaaugcaucccccccccccccccccccccccccccccccaaaggcucuuuucagagccaccagaauu

SEQ ID NO: 17566 - RNA, 2142 nt, Artificial Sequence
  mRNA product Design h-2 comprising derived and/or modified sequence from HRSV(Memphis-37)__AIY60640.1__F-del_DSCav1_mut5 (opt1)
gggagacccgugacccggaaguuguacggcuacgcgacuuucccucccacaaacccucgcgcccuuccuuuccuacuugggcccggcagaaagcuuaccauggagcugcccauccucaagaccaacgccaucaccacgauccuggccgcggugacccugugcuucgccagcucccagaacaucaccgaggaguucuaccagagcacgugcuccgccgucagcaagggcuaccucuccgcccugcgcaccgggugguacaccagcgugaucaccaucgagcuguccaacaucaaggagaacaagugcaacggcaccgacgccaaggugaagcucaucaagcaggagcuggacaaguacaagaacgcggucacggagcugcagcuccugaugcagagcaccccggccgccggcuccgggagcgcgaucgccuccggcaucgccgucugcaaggugcugcaccucgagggcgaggugaacaagaucaagaacgcccugcuguccaccaacaaggccgucgugagccucuccggcugcggggugagcguccugaccuucaaggugcuggaccucaagaacuacaucgacaagcagcugcugcccauccugaacaagcagagcugcuccaucagcaacaucgagaccgucaucgaguuccagcagaagaacaaccgccuccuggagaucacgcgggaguucagcgugaacgcgggcgugaccacccccgucuccaccuacaugcugacgaacagcgagcuccugucccugaucaacgacaugccgaucaccaacgaccagaagaagcucaugagcaacaacgugcagaucgugcgccagcaguccuacagcaucaugugcaucaucaaggaggagguccuggccuacguggugcagcugccccucuacggggucaucgacacccccugcuggaagcugcacaccagcccccugugcacgaccaacaccaaggagggcuccaacaucugccucacccggacggaccgcgggugguacugcgacaacgccggcagcguguccuucuucccgcaggccgagaccugcaagguccagagcaaccggguguucugcgacaccaugaacucccggacccugcccagcgaggugaaccucugcaacaucgacaucuucaaccccaaguacgacugcaagaucaugacguccaagaccgacgucagcuccagcgugaucaccucccugggcgccaucgugagcugcuacgggaagaccaagugcacggcgagcaacaagugccgcggcaucaucaagaccuucuccaacgggugcgacuacgucagcaacaagggcguggacaccguguccgucggcaacacccuguacuacgugaacaagcaggagggcaagagccucuacgugaagggggagcccaucaucaacuucuacgacccgcuggucuuccccuccgacgaguucgacgccagcaucucccaggugaacgagaagaucaaccagagccuggccuucauccggaaguccgacgagcuccugcacaacgugaacgucggcaagagcaccacgaacaucaugaucaccaccaucaucaucgugaucaucgugauccugcugcuccugaucgccgucgggcuguuccucuacugcaaggcccgcugaggacuagugaagggaacacccaaauuuaauucagccuuaagcacaauuaauuaagagugaaacguaauuguacaagcaguuggucacccaccauagggcaugaucaacaccgcaaccuuuccuuuuucccccagugauucugaaaaaccccucuucccuucagcuugcuuagauguuccaaauuuaguaagcuuaaggcggccuacagaagaaaaagaaaaaaaaggccacaaaaguucccucucacuuucaguaaauaaaauaaaagcagcaacagaaauaaagaaauaaaugaaauucaaaaugaaauaaauauuguguugugcagcauuaaaaaaucaauaaaaauuaaaaaugagcaagaucuaaaaaaaaaaaaaaaaaaaaaaaaaaaaaaaaaaaaaaaaaaaaaaaaaaaaaaaaaaaaaaaaugcaucccccccccccccccccccccccccccccccaaaggcucuuuucagagccaccagaauu

SEQ ID NO: 17567 - RNA, 2142 nt, Artificial Sequence
  mRNA product Design h-2 comprising derived and/or modified sequence from HRSV(Memphis-37)__AIY60640.1__F-del_DSCav1_mut5 (opt1)
gggagacccgugacccggaaguuguacggcuacgcgacuuucccucccacaaacccucgcgcccuuccuuuccuacuugggcccggcagaaagcuuaccauggagcugcccauccucaagaccaacgccaucaccacgauccuggccgcggugacccugugcuucgccagcucccagaacaucaccgaggaguucuaccagagcacgugcuccgccgucagcaagggcuaccucuccgcccugcgcaccgggugguacaccagcgugaucaccaucgagcuguccaacaucaaggagaacaagugcaacggcaccgacgccaaggugaagcucaucaagcaggagcuggacaaguacaagaacgcggucacggagcugcagcuccugaugcagagcaccccggccgccggguccggcagcgccaucgcguccgggaucgccgugugcaaggugcugcaccucgagggcgaggucaacaagaucaagaacgcccugcugagcaccaacaaggccguggugucccucagcggcugcggggucuccgugcugaccuucaaggugcuggaccucaagaacuacaucgacaagcagcugcugcccauccucaacaagcagagcugcuccaucagcaacaucgagacggucaucgaguuccagcagaagaacaaccggcugcuggagaucacccgcgaguucuccgugaacgccggcgugaccacccccgucagcacguacaugcucaccaacagcgagcugcugucccucaucaacgacaugcccaucaccaacgaccagaagaagcugaugagcaacaacgugcagaucgugcggcagcaguccuacagcaucaugugcaucaucaaggaggagguccuggcguacguggugcagcucccgcuguacggggucaucgacacccccugcuggaagcugcacacgagcccccucugcaccaccaacaccaaggagggcuccaacaucugccugacgcgcaccgaccgggggugguacugcgacaacgccggcuccgugagcuucuucccccaggccgagaccugcaaggugcaguccaaccgcgucuucugcgacaccaugaacagccggacgcucccguccgaggugaaccugugcaacaucgacaucuucaaccccaaguacgacugcaagaucaugaccagcaagaccgacgucuccagcuccgugaucaccagccugggcgccaucguguccugcuacgggaagacgaagugcaccgccagcaacaagugccggggcaucaucaagaccuucuccaacgggugcgacuacgucagcaacaagggcguggacaccgugagcgucggcaacacgcucuacuacgugaacaagcaggaggggaagucccuguacgugaagggcgagcccaucaucaacuucuacgacccccuggucuucccgagcgacgaguucgacgcguccaucagccaggugaacgagaagaucaaccagucccucgccuucauccgcaagagcgacgagcugcugcacaacgugaacgucgggaaguccaccaccaacaucaugaucaccaccaucaucaucgugaucaucgugauccuccugcugcucaucgccgucggccuguuccuguacugcaaggcccggugaggacuagugaagggaacacccaaauuuaauucagccuuaagcacaauuaauuaagagugaaacguaauuguacaagcaguuggucacccaccauagggcaugaucaacaccgcaaccuuuccuuuuucccccagugauucugaaaaaccccucuucccuucagcuugcuuagauguuccaaauuuaguaagcuuaaggcggccuacagaagaaaaagaaaaaaaaggccacaaaaguucccucucacuuucaguaaauaaaauaaaagcagcaacagaaauaaagaaauaaaugaaauucaaaaugaaauaaauauuguguugugcagcauuaaaaaaucaauaaaaauuaaaaaugagcaagaucuaaaaaaaaaaaaaaaaaaaaaaaaaaaaaaaaaaaaaaaaaaaaaaaaaaaaaaaaaaaaaaaaugcaucccccccccccccccccccccccccccccccaaaggcucuuuucagagccaccagaauu

SEQ ID NO: 17568 - RNA, 2142 nt, Artificial Sequence
  mRNA product Design h-2 comprising derived and/or modified sequence from HRSV(Memphis-37)__AIY60640.1__F-del_DSCav1_mut5 (opt2)
gggagacccgugacccggaaguuguacggcuacgcgacuuucccucccacaaacccucgcgcccuuccuuuccuacuugggcccggcagaaagcuuaccauggagcuccccauccucaagaccaacgccaucaccaccauccucgccgccgucacccucugcuucgccuccucccagaacaucaccgaggaguucuaccaguccaccugcuccgccgucuccaagggcuaccucuccgcccuccgcaccggcugguacaccuccgucaucaccaucgagcucuccaacaucaaggagaacaagugcaacggcaccgacgccaaggucaagcucaucaagcaggagcucgacaaguacaagaacgccgucaccgagcuccagcuccucaugcaguccacccccgccgccggcuccggcuccgccaucgccuccggcaucgccgucugcaagguccuccaccucgagggcgaggucaacaagaucaagaacgcccuccucuccaccaacaaggccgucgucucccucuccggcugcggcgucuccguccucaccuucaagguccucgaccucaagaacuacaucgacaagcagcuccuccccauccucaacaagcaguccugcuccaucuccaacaucgagaccgucaucgaguuccagcagaagaacaaccgccuccucgagaucacccgcgaguucuccgucaacgccggcgucaccacccccgucuccaccuacaugcucaccaacuccgagcuccucucccucaucaacgacaugcccaucaccaacgaccagaagaagcucauguccaacaacguccagaucguccgccagcaguccuacuccaucaugugcaucaucaaggaggagguccucgccuacgucguccagcucccccucuacggcgucaucgacacccccugcuggaagcuccacaccuccccccucugcaccaccaacaccaaggagggcuccaacaucugccucacccgcaccgaccgcggcugguacugcgacaacgccggcuccgucuccuucuucccccaggccgagaccugcaagguccaguccaaccgcgucuucugcgacaccaugaacucccgcacccuccccuccgaggucaaccucugcaacaucgacaucuucaaccccaaguacgacugcaagaucaugaccuccaagaccgacgucuccuccuccgucaucaccucccucggcgccaucgucuccugcuacggcaagaccaagugcaccgccuccaacaagugccgcggcaucaucaagaccuucuccaacggcugcgacuacgucuccaacaagggcgucgacaccgucuccgucggcaacacccucuacuacgucaacaagcaggagggcaagucccucuacgucaagggcgagcccaucaucaacuucuacgacccccucgucuuccccuccgacgaguucgacgccuccaucucccaggucaacgagaagaucaaccagucccucgccuucauccgcaaguccgacgagcuccuccacaacgucaacgucggcaaguccaccaccaacaucaugaucaccaccaucaucaucgucaucaucgucauccuccuccuccucaucgccgucggccucuuccucuacugcaaggcccgcugaggacuagugaagggaacacccaaauuuaauucagccuuaagcacaauuaauuaagagugaaacguaauuguacaagcaguuggucacccaccauagggcaugaucaacaccgcaaccuuuccuuuuucccccagugauucugaaaaaccccucuucccuucagcuugcuuagauguuccaaauuuaguaagcuuaaggcggccuacagaagaaaaagaaaaaaaaggccacaaaaguucccucucacuuucaguaaauaaaauaaaagcagcaacagaaauaaagaaauaaaugaaauucaaaaugaaauaaauauuguguugugcagcauuaaaaaaucaauaaaaauuaaaaaugagcaagaucuaaaaaaaaaaaaaaaaaaaaaaaaaaaaaaaaaaaaaaaaaaaaaaaaaaaaaaaaaaaaaaaaugcaucccccccccccccccccccccccccccccccaaaggcucuuuucagagccaccagaauu

SEQ ID NO: 17569 - RNA, 2142 nt, Artificial Sequence
  mRNA product Design h-2 comprising derived and/or modified sequence from HRSV(Memphis-37)__AIY60640.1__F-del_DSCav1_mut5 (opt3)
gggagacccgugacccggaaguuguacggcuacgcgacuuucccucccacaaacccucgcgcccuuccuuuccuacuugggcccggcagaaagcuuaccauggagcugcccauccucaagaccaacgccauuacaacuauacuugcugcagugacgcugugcuucgccagcucccagaauaucaccgaagaguuuuaccaaucuacauguucagcggucaguaaaggcuauuugagcgcuuuaagaacugggugguacaccuccguuauuacaaucgaacugucuaacauuaaggagaauaaaugcaacggaaccgacgccaaggugaaacuaaucaagcaggaacucgauaaguauaaaaaugcaguaacugagcugcagcuucugaugcagucgaccccugccgcugguucaggcagcgcaauagccagugggaucgcuguguguaaggucuugcaccucgagggagaagugaacaaaauuaagaaugcccugcuguccacaaacaaagcgguugugucucucagcggcugcggugucuccguguuaacguucaagguacuggaccuuaagaauuacaucgauaaacaauugcugccaauucuaaacaagcagucauguaguaucagcaauauagagacuguuauugaauuucagcagaaaaacaauaggcuccuggagaucacccgggaguucucugugaacgcaggggucacaacuccgguguccaccuauaugcuuacaaauucagaacuguugagccucauuaacgacaugcccaucaccaacgaucaaaagaaacugaugaguaauaacgugcagaucguccgccagcagucuuacuccauuaugugcauaaucaaggaggaaguuuuagccuaugugguacaacugccucucuacggagugauugacacgccauguuggaaacuucauacuagcccccugugcacaaccaauacuaaggagggcucgaacaucuguuugacacgaaccgaucguggcugguacugcgacaaugcugggucugucuccuuuuucccucaggccgaaacguguaaggugcagucaaacagaguguuuugcgauaccaugaauaguagaacacugccaagcgaggugaaccucugcaauauagacauuuucaaccccaaauaugauuguaagaucaugacuuccaaaaccgacgucucuagcucagugaucacaagucugggagcaauuguauccugcuacgguaagacuaaauguaccgcuagcaauaagugcaggggcaucauuaagacauuuucuaacgggugugauuauguuucaaauaaaggaguggacaccgucagugugggcaacacucuuuacuaugucaauaagcaagaggguaaaagccuguacgugaagggggaaccuauaaucaacuucuaugacccauugguuuuuccguccgaugaguucgacgccucuauuucgcagguuaacgagaaaaucaaucagagccucgcguuuauccggaaguccgaugaacuguuacacaacguaaaugucggaaagucaacgacaaacauuaugauaaccacuaucauuaucgugauuaucguuauacugcuacuccugaucgccgugggccuuuucuuguacugcaaagcacgcugaggacuagugaagggaacacccaaauuuaauucagccuuaagcacaauuaauuaagagugaaacguaauuguacaagcaguuggucacccaccauagggcaugaucaacaccgcaaccuuuccuuuuucccccagugauucugaaaaaccccucuucccuucagcuugcuuagauguuccaaauuuaguaagcuuaaggcggccuacagaagaaaaagaaaaaaaaggccacaaaaguucccucucacuuucaguaaauaaaauaaaagcagcaacagaaauaaagaaauaaaugaaauucaaaaugaaauaaauauuguguugugcagcauuaaaaaaucaauaaaaauuaaaaaugagcaagaucuaaaaaaaaaaaaaaaaaaaaaaaaaaaaaaaaaaaaaaaaaaaaaaaaaaaaaaaaaaaaaaaaugcaucccccccccccccccccccccccccccccccaaaggcucuuuucagagccaccagaauu

SEQ ID NO: 17570 - RNA, 2142 nt, Artificial Sequence
  mRNA product Design h-2 comprising derived and/or modified sequence from HRSV(Memphis-37)__AIY60640.1__F-del_DSCav1_mut5 (opt4)
gggagacccgugacccggaaguuguacggcuacgcgacuuucccucccacaaacccucgcgcccuuccuuuccuacuugggcccggcagaaagcuuaccauggagcugcccauccugaagaccaacgccaucaccaccauccuggccgccgugacccugugcuucgccagcagccagaacaucaccgaggaguucuaccagagcaccugcagcgccgugagcaagggcuaccugagcgcccugagaaccggcugguacaccagcgugaucaccaucgagcugagcaacaucaaggagaacaagugcaacggcaccgacgccaaggugaagcugaucaagcaggagcuggacaaguacaagaacgccgugaccgagcugcagcugcugaugcagagcacccccgccgccggcagcggcagcgccaucgccagcggcaucgccgugugcaaggugcugcaccuggagggcgaggugaacaagaucaagaacgcccugcugagcaccaacaaggccguggugagccugagcggcugcggcgugagcgugcugaccuucaaggugcuggaccugaagaacuacaucgacaagcagcugcugcccauccugaacaagcagagcugcagcaucagcaacaucgagaccgugaucgaguuccagcagaagaacaacagacugcuggagaucaccagagaguucagcgugaacgccggcgugaccacccccgugagcaccuacaugcugaccaacagcgagcugcugagccugaucaacgacaugcccaucaccaacgaccagaagaagcugaugagcaacaacgugcagaucgugagacagcagagcuacagcaucaugugcaucaucaaggaggaggugcuggccuacguggugcagcugccccuguacggcgugaucgacacccccugcuggaagcugcacaccagcccccugugcaccaccaacaccaaggagggcagcaacaucugccugaccagaaccgacagaggcugguacugcgacaacgccggcagcgugagcuucuucccccaggccgagaccugcaaggugcagagcaacagaguguucugcgacaccaugaacagcagaacccugcccagcgaggugaaccugugcaacaucgacaucuucaaccccaaguacgacugcaagaucaugaccagcaagaccgacgugagcagcagcgugaucaccagccugggcgccaucgugagcugcuacggcaagaccaagugcaccgccagcaacaagugcagaggcaucaucaagaccuucagcaacggcugcgacuacgugagcaacaagggcguggacaccgugagcgugggcaacacccuguacuacgugaacaagcaggagggcaagagccuguacgugaagggcgagcccaucaucaacuucuacgacccccugguguuccccagcgacgaguucgacgccagcaucagccaggugaacgagaagaucaaccagagccuggccuucaucagaaagagcgacgagcugcugcacaacgugaacgugggcaagagcaccaccaacaucaugaucaccaccaucaucaucgugaucaucgugauccugcugcugcugaucgccgugggccuguuccuguacugcaaggccagaugaggacuagugaagggaacacccaaauuuaauucagccuuaagcacaauuaauuaagagugaaacguaauuguacaagcaguuggucacccaccauagggcaugaucaacaccgcaaccuuuccuuuuucccccagugauucugaaaaaccccucuucccuucagcuugcuuagauguuccaaauuuaguaagcuuaaggcggccuacagaagaaaaagaaaaaaaaggccacaaaaguucccucucacuuucaguaaauaaaauaaaagcagcaacagaaauaaagaaauaaaugaaauucaaaaugaaauaaauauuguguugugcagcauuaaaaaaucaauaaaaauuaaaaaugagcaagaucuaaaaaaaaaaaaaaaaaaaaaaaaaaaaaaaaaaaaaaaaaaaaaaaaaaaaaaaaaaaaaaaaugcaucccccccccccccccccccccccccccccccaaaggcucuuuucagagccaccagaauu

SEQ ID NO: 17571 - RNA, 2142 nt, Artificial Sequence
  mRNA product Design h-2 comprising derived and/or modified sequence from HRSV(Memphis-37)__AIY60640.1__F-del_DSCav1_mut5 (opt5)
gggagacccgugacccggaaguuguacggcuacgcgacuuucccucccacaaacccucgcgcccuuccuuuccuacuugggcccggcagaaagcuuaccauggagcugcccauccucaagaccaacgccauuacaacgauccuggcugccgugacccuuugcuucgcgagcucccagaauauuacagaagaguuuuaccaaucuaccuguagcgcugucuccaaaggcuaucugucugcccucagaacagggugguacaccagcguuaucacaauugaacuguccaacaucaaggagaauaaaugcaacggaaccgacgccaaggugaaacuuaucaagcaggaacuggauaaguauaaaaaugcugugacggagcuccagcugcugaugcagucuaccccugccgcuggcagcggguccgccauugcgagcggaaucgccgucuguaaggugcuccaccuggagggcgaaguuaacaaaauuaagaaugcccuucugucuacaaacaaagcuguggucucccucagcgggugcggagugucuguucugaccuucaaggugcuugaccugaagaauuacaucgauaaacaacuccugccgauucugaacaagcaguccuguagcaucucuaauauugagacagucaucgaauuucagcagaaaaacaaucggcuccuggagaucacccgcgaguucuccgugaacgcuggcgugacgacacccgucagcaccuauaugcuuacaaauuccgaacugcucucucugauuaacgacaugccuaucaccaacgaucaaaagaaacuuaugagcaauaacguucagauugugagacagcaguccuacagcaucaugugcauuaucaaggaggaagugcuggccuaugucgugcaacucccccuguacggcguuaucgacaccccuuguuggaaacugcauacaucuccccucugcacgaccaauacaaaggagggguccaacauuugucugacccggacagaucgcggaugguacugcgacaaugcgggcagcgugagcuuuuucccucaggccgaaaccuguaagguccagucuaacagaguguuuugcgauacgaugaacuccagaacacugccgucugagguuaaucucugcaauaucgacauuuucaaccccaaauaugauuguaagaucaugaccagcaaaaccgacguguccagcucugucauuacaucccugggggcuaucgugagcugcuacggaaagaccaaauguacagccucuaauaagugccggggcaucauuaagacguuuuccaacgggugugauuaugucagcaauaaaggaguggacaccguuuccgugggcaacacacuuuacuaugucaauaagcaagagggcaaaucucuguacgugaagggggaaccuaucauuaacuucuaugacccccucguuuuuccuagcgaugaguucgacgcuuccaucucucaggugaacgagaaaauuaaucagagccuggccuuuauccgcaaguccgaugaacugcuccacaacgucaaugugggaaagagcaccacaaacauuaugaucaccacgaucauuaucgugauuaucguuauucugcuucugcucaucgccgucggccuguuccuguacugcaaagcuagaugaggacuagugaagggaacacccaaauuuaauucagccuuaagcacaauuaauuaagagugaaacguaauuguacaagcaguuggucacccaccauagggcaugaucaacaccgcaaccuuuccuuuuucccccagugauucugaaaaaccccucuucccuucagcuugcuuagauguuccaaauuuaguaagcuuaaggcggccuacagaagaaaaagaaaaaaaaggccacaaaaguucccucucacuuucaguaaauaaaauaaaagcagcaacagaaauaaagaaauaaaugaaauucaaaaugaaauaaauauuguguugugcagcauuaaaaaaucaauaaaaauuaaaaaugagcaagaucuaaaaaaaaaaaaaaaaaaaaaaaaaaaaaaaaaaaaaaaaaaaaaaaaaaaaaaaaaaaaaaaaugcaucccccccccccccccccccccccccccccccaaaggcucuuuucagagccaccagaauu

SEQ ID NO: 17572 - RNA, 2142 nt, Artificial Sequence
  mRNA product Design h-2 comprising derived and/or modified sequence from HRSV(Memphis-37)__AIY60640.1__F-del_DSCav1_mut5 (opt6)
gggagacccgugacccggaaguuguacggcuacgcgacuuucccucccacaaacccucgcgcccuuccuuuccuacuugggcccggcagaaagcuuaccauggaauuacccaucuuaaaaacaaaugcaauaacaacaauacuagcagccguaacauuaugcuucgccucaagccaaaacauaacagaagaauuuuaccaaagcacauguuccgccguaucaaaaggauaucucucagcacuacguacuggaugguauacauccguaaucacaauugaacuaucaaacauuaaagaaaacaaaugcaauggaacagaugcgaaaguaaaacuaauaaaacaagaauuagauaaauauaaaaaugcaguaaccgaacuacaacuacuaaugcaaucaacucccgcugccgguagcggauccgccauagcaagcggaauugcuguauguaaaguccuacaucuugaaggcgaagucaacaaaaucaaaaaugcauuacucucgaccaacaaagcagucguaucacuaucaggaugcggagucucaguauuaacuuuuaaaguccuugaccuaaaaaacuacauagacaaacaacuacuaccaauucuaaauaaacaaaguugcagcauauccaauaucgaaacaguuauagaauuucaacaaaaaaacaaccgccuacuagaaaucacuagagaauuuucaguaaaugcaggcguaaccacaccagucucuaccuauaugcuuaccaacucugaauuauuaucacuuauaaacgacaugcccauaacaaaugaucaaaaaaaacuaaugagcaacaacguacaaauaguaagacaacaaagcuacagcauuauguguauaauaaaagaagaaguguuagcuuauguaguccaacuaccccucuauggcguuaucgauacaccaugcuggaaauuacacacaagcccucuaugcacaacuaacaccaaagaaggcucuaacauaugcuuaacaagaacagauagaggaugguauugcgauaacgcaggaucaguaucauucuuuccacaagcagaaacauguaaaguacaaucuaaccgaguauucugcgacacaaugaacucuagaacacuacccucagaaguuaaucucuguaauauugacauuuucaauccaaaauacgauugcaaaauaaugaccucuaaaaccgacguaucauccucaguuauaacguccuuaggagcaaucguaagcugcuauggcaaaacaaaauguaccgcaucaaacaaaugcagaggaauaauaaaaacauucucaaacggcugugacuacguaagcaauaaagguguugacacaguuucaguaggaaauacacuauacuauguaaauaaacaagaaggaaaaucucucuauguaaaaggagaacccauaauaaacuucuacgacccacucguauuuccaagcgaugaauuugaugcgagcauuucccagguaaaugaaaaaauaaaucaaucacuagcauucaucagaaaaagugaugaauuacuacacaauguuaacguaggaaaaucaacaacaaauaucaugauaacaacaaucauaauagucauaaucguaauauuacuauuacuaauagcaguagguuuauuucuauacuguaaagcaagguaaggacuagugaagggaacacccaaauuuaauucagccuuaagcacaauuaauuaagagugaaacguaauuguacaagcaguuggucacccaccauagggcaugaucaacaccgcaaccuuuccuuuuucccccagugauucugaaaaaccccucuucccuucagcuugcuuagauguuccaaauuuaguaagcuuaaggcggccuacagaagaaaaagaaaaaaaaggccacaaaaguucccucucacuuucaguaaauaaaauaaaagcagcaacagaaauaaagaaauaaaugaaauucaaaaugaaauaaauauuguguugugcagcauuaaaaaaucaauaaaaauuaaaaaugagcaagaucuaaaaaaaaaaaaaaaaaaaaaaaaaaaaaaaaaaaaaaaaaaaaaaaaaaaaaaaaaaaaaaaaugcaucccccccccccccccccccccccccccccccaaaggcucuuuucagagccaccagaauu

SEQ ID NO: 17573 - RNA, 2142 nt, Artificial Sequence
  mRNA product Design h-2 comprising derived and/or modified sequence from HRSV(Memphis-37)__AIY60640.1__F-del_DSCav1_mut5 (opt11)
gggagacccgugacccggaaguuguacggcuacgcgacuuucccucccacaaacccucgcgcccuuccuuuccuacuugggcccggcagaaagcuuaccauggaacuucccauccuaaaaaccaacgccauaacaacaauccucgcagcagucacccucugcuucgccucuucacaaaacaucaccgaagaauuuuaccaaucaaccugcuccgccguguccaaaggcuaccucucagcacugcgcacaggaugguauaccagcguaaucaccaucgaacucuccaacaucaaggaaaacaaaugcaacggcaccgaugccaaagucaaacucaucaagcaagaacuugacaaauacaaaaacgccgugaccgagcuacaacuccucaugcaguccacuccagccgccggcuccggcagcgccaucgccuccggcaucgccguaugcaaaguccuccaccucgaaggcgaaguaaacaaaaucaagaacgcacuccuaagcaccaacaaagccgucgucucacucuccgguugcggcgucagcguccuaacauucaaaguucucgaccucaaaaacuacauagacaaacaacuccuccccauccucaacaaacaauccugcuccauaucaaacaucgaaaccguuaucgaauuucaacaaaaaaacaaccgccuccuagaaaucacccgcgaauuuuccgucaacgcaggcgucaccacccccguuuccaccuauaugcucaccaacuccgaacuccucucccucaucaacgacaugcccauuaccaacgaccaaaagaaacuuaugagcaacaacguucaaaucguccgacaacaaucauacuccaucaugugcauuaucaaagaagaaguacucgccuacguaguacaauuaccccucuacggcguaaucgacaccccaugcuggaaacuacacaccuccccccucuguaccaccaacaccaaagaaggcucuaacaucugccucacccgcacagaccguggcugguauugcgauaacgcagggucugucuccuucuucccccaagccgaaacaugcaaaguccaauccaacagagucuucugcgacaccaugaacucgagaacccuccccuccgaagucaaccuaugcaacaucgacaucuucaacccaaaauacgacugcaaaaucaugacuucaaaaacagacgugagcucguccgucaucacaagccuaggagcuaucguauccugcuacggaaaaacaaaaugcacugcuuccaacaaaugccgcggaaucauaaaaaccuucuccaacggcugcgacuacgucagcaacaaaggcgucgacacagucuccguaggcaacacccuauacuacgucaauaaacaagaaggcaagucccuauaugucaaaggcgagcccaucaucaauuucuaugauccccucguuuucccauccgacgaauuugacgcauccaucucccaagucaacgaaaaaauaaaccaaagccucgcauucauccgcaaauccgacgaacuccuccacaacguaaacguaggaaaauccacaacuaacaucaugaucaccaccaucaucaucgucauuaucgucauccuacuccuccucauagcagucggccucuuccucuacugcaaagcacgcuagggacuagugaagggaacacccaaauuuaauucagccuuaagcacaauuaauuaagagugaaacguaauuguacaagcaguuggucacccaccauagggcaugaucaacaccgcaaccuuuccuuuuucccccagugauucugaaaaaccccucuucccuucagcuugcuuagauguuccaaauuuaguaagcuuaaggcggccuacagaagaaaaagaaaaaaaaggccacaaaaguucccucucacuuucaguaaauaaaauaaaagcagcaacagaaauaaagaaauaaaugaaauucaaaaugaaauaaauauuguguugugcagcauuaaaaaaucaauaaaaauuaaaaaugagcaagaucuaaaaaaaaaaaaaaaaaaaaaaaaaaaaaaaaaaaaaaaaaaaaaaaaaaaaaaaaaaaaaaaaugcaucccccccccccccccccccccccccccccccaaaggcucuuuucagagccaccagaauu

SEQ ID NO: 17574 - RNA, 1922 nt, Artificial Sequence
  mRNA product Design h-3 comprising derived and/or modified sequence from HRSV(Memphis-37)__AIY60640.1__F-del_DSCav1_mut5 (opt1)
gggagacccgugacccggaaguuguacggcuacgcgacuuucccucccacaaacccucgcgcccuuccuuuccuacuugggcccggcagaaagcuuaccauggagcugcccauccucaagaccaacgccaucaccacgauccuggccgcggugacccugugcuucgccagcucccagaacaucaccgaggaguucuaccagagcacgugcuccgccgucagcaagggcuaccucuccgcccugcgcaccgggugguacaccagcgugaucaccaucgagcuguccaacaucaaggagaacaagugcaacggcaccgacgccaaggugaagcucaucaagcaggagcuggacaaguacaagaacgcggucacggagcugcagcuccugaugcagagcaccccggccgccggcuccgggagcgcgaucgccuccggcaucgccgucugcaaggugcugcaccucgagggcgaggugaacaagaucaagaacgcccugcuguccaccaacaaggccgucgugagccucuccggcugcggggugagcguccugaccuucaaggugcuggaccucaagaacuacaucgacaagcagcugcugcccauccugaacaagcagagcugcuccaucagcaacaucgagaccgucaucgaguuccagcagaagaacaaccgccuccuggagaucacgcgggaguucagcgugaacgcgggcgugaccacccccgucuccaccuacaugcugacgaacagcgagcuccugucccugaucaacgacaugccgaucaccaacgaccagaagaagcucaugagcaacaacgugcagaucgugcgccagcaguccuacagcaucaugugcaucaucaaggaggagguccuggccuacguggugcagcugccccucuacggggucaucgacacccccugcuggaagcugcacaccagcccccugugcacgaccaacaccaaggagggcuccaacaucugccucacccggacggaccgcgggugguacugcgacaacgccggcagcguguccuucuucccgcaggccgagaccugcaagguccagagcaaccggguguucugcgacaccaugaacucccggacccugcccagcgaggugaaccucugcaacaucgacaucuucaaccccaaguacgacugcaagaucaugacguccaagaccgacgucagcuccagcgugaucaccucccugggcgccaucgugagcugcuacgggaagaccaagugcacggcgagcaacaagugccgcggcaucaucaagaccuucuccaacgggugcgacuacgucagcaacaagggcguggacaccguguccgucggcaacacccuguacuacgugaacaagcaggagggcaagagccucuacgugaagggggagcccaucaucaacuucuacgacccgcuggucuuccccuccgacgaguucgacgccagcaucucccaggugaacgagaagaucaaccagagccuggccuucauccggaaguccgacgagcuccugcacaacgugaacgucggcaagagcaccacgaacaucaugaucaccaccaucaucaucgugaucaucgugauccugcugcuccugaucgccgucgggcuguuccucuacugcaaggcccgcugaggacuaguggaagcauuuuccuggcugauuaaaagaaauuacucagcuauggucaucuguuccuguuagaaggcuaugcagcauauuauauacuaugcgcauguuaugaaaugcauaauaaaaaauuuuaaaaaaucuaaaagaucuaaaaaaaaaaaaaaaaaaaaaaaaaaaaaaaaaaaaaaaaaaaaaaaaaaaaaaaaaaaaaaaaugcaucccccccccccccccccccccccccccccccaaaggcucuuuucagagccaccagaauu

SEQ ID NO: 17575 - RNA, 1922 nt, Artificial Sequence
  mRNA product Design h-3 comprising derived and/or modified sequence from HRSV(Memphis-37)__AIY60640.1__F-del_DSCav1_mut5 (opt1)
gggagacccgugacccggaaguuguacggcuacgcgacuuucccucccacaaacccucgcgcccuuccuuuccuacuugggcccggcagaaagcuuaccauggagcugcccauccucaagaccaacgccaucaccacgauccuggccgcggugacccugugcuucgccagcucccagaacaucaccgaggaguucuaccagagcacgugcuccgccgucagcaagggcuaccucuccgcccugcgcaccgggugguacaccagcgugaucaccaucgagcuguccaacaucaaggagaacaagugcaacggcaccgacgccaaggugaagcucaucaagcaggagcuggacaaguacaagaacgcggucacggagcugcagcuccugaugcagagcaccccggccgccggguccggcagcgccaucgcguccgggaucgccgugugcaaggugcugcaccucgagggcgaggucaacaagaucaagaacgcccugcugagcaccaacaaggccguggugucccucagcggcugcggggucuccgugcugaccuucaaggugcuggaccucaagaacuacaucgacaagcagcugcugcccauccucaacaagcagagcugcuccaucagcaacaucgagacggucaucgaguuccagcagaagaacaaccggcugcuggagaucacccgcgaguucuccgugaacgccggcgugaccacccccgucagcacguacaugcucaccaacagcgagcugcugucccucaucaacgacaugcccaucaccaacgaccagaagaagcugaugagcaacaacgugcagaucgugcggcagcaguccuacagcaucaugugcaucaucaaggaggagguccuggcguacguggugcagcucccgcuguacggggucaucgacacccccugcuggaagcugcacacgagcccccucugcaccaccaacaccaaggagggcuccaacaucugccugacgcgcaccgaccgggggugguacugcgacaacgccggcuccgugagcuucuucccccaggccgagaccugcaaggugcaguccaaccgcgucuucugcgacaccaugaacagccggacgcucccguccgaggugaaccugugcaacaucgacaucuucaaccccaaguacgacugcaagaucaugaccagcaagaccgacgucuccagcuccgugaucaccagccugggcgccaucguguccugcuacgggaagacgaagugcaccgccagcaacaagugccggggcaucaucaagaccuucuccaacgggugcgacuacgucagcaacaagggcguggacaccgugagcgucggcaacacgcucuacuacgugaacaagcaggaggggaagucccuguacgugaagggcgagcccaucaucaacuucuacgacccccuggucuucccgagcgacgaguucgacgcguccaucagccaggugaacgagaagaucaaccagucccucgccuucauccgcaagagcgacgagcugcugcacaacgugaacgucgggaaguccaccaccaacaucaugaucaccaccaucaucaucgugaucaucgugauccuccugcugcucaucgccgucggccuguuccuguacugcaaggcccggugaggacuaguggaagcauuuuccuggcugauuaaaagaaauuacucagcuauggucaucuguuccuguuagaaggcuaugcagcauauuauauacuaugcgcauguuaugaaaugcauaauaaaaaauuuuaaaaaaucuaaaagaucuaaaaaaaaaaaaaaaaaaaaaaaaaaaaaaaaaaaaaaaaaaaaaaaaaaaaaaaaaaaaaaaaugcaucccccccccccccccccccccccccccccccaaaggcucuuuucagagccaccagaauu

SEQ ID NO: 17576 - RNA, 1922 nt, Artificial Sequence
  mRNA product Design h-3 comprising derived and/or modified sequence from HRSV(Memphis-37)__AIY60640.1__F-del_DSCav1_mut5 (opt2)
gggagacccgugacccggaaguuguacggcuacgcgacuuucccucccacaaacccucgcgcccuuccuuuccuacuugggcccggcagaaagcuuaccauggagcuccccauccucaagaccaacgccaucaccaccauccucgccgccgucacccucugcuucgccuccucccagaacaucaccgaggaguucuaccaguccaccugcuccgccgucuccaagggcuaccucuccgcccuccgcaccggcugguacaccuccgucaucaccaucgagcucuccaacaucaaggagaacaagugcaacggcaccgacgccaaggucaagcucaucaagcaggagcucgacaaguacaagaacgccgucaccgagcuccagcuccucaugcaguccacccccgccgccggcuccggcuccgccaucgccuccggcaucgccgucugcaagguccuccaccucgagggcgaggucaacaagaucaagaacgcccuccucuccaccaacaaggccgucgucucccucuccggcugcggcgucuccguccucaccuucaagguccucgaccucaagaacuacaucgacaagcagcuccuccccauccucaacaagcaguccugcuccaucuccaacaucgagaccgucaucgaguuccagcagaagaacaaccgccuccucgagaucacccgcgaguucuccgucaacgccggcgucaccacccccgucuccaccuacaugcucaccaacuccgagcuccucucccucaucaacgacaugcccaucaccaacgaccagaagaagcucauguccaacaacguccagaucguccgccagcaguccuacuccaucaugugcaucaucaaggaggagguccucgccuacgucguccagcucccccucuacggcgucaucgacacccccugcuggaagcuccacaccuccccccucugcaccaccaacaccaaggagggcuccaacaucugccucacccgcaccgaccgcggcugguacugcgacaacgccggcuccgucuccuucuucccccaggccgagaccugcaagguccaguccaaccgcgucuucugcgacaccaugaacucccgcacccuccccuccgaggucaaccucugcaacaucgacaucuucaaccccaaguacgacugcaagaucaugaccuccaagaccgacgucuccuccuccgucaucaccucccucggcgccaucgucuccugcuacggcaagaccaagugcaccgccuccaacaagugccgcggcaucaucaagaccuucuccaacggcugcgacuacgucuccaacaagggcgucgacaccgucuccgucggcaacacccucuacuacgucaacaagcaggagggcaagucccucuacgucaagggcgagcccaucaucaacuucuacgacccccucgucuuccccuccgacgaguucgacgccuccaucucccaggucaacgagaagaucaaccagucccucgccuucauccgcaaguccgacgagcuccuccacaacgucaacgucggcaaguccaccaccaacaucaugaucaccaccaucaucaucgucaucaucgucauccuccuccuccucaucgccgucggccucuuccucuacugcaaggcccgcugaggacuaguggaagcauuuuccuggcugauuaaaagaaauuacucagcuauggucaucuguuccuguuagaaggcuaugcagcauauuauauacuaugcgcauguuaugaaaugcauaauaaaaaauuuuaaaaaaucuaaaagaucuaaaaaaaaaaaaaaaaaaaaaaaaaaaaaaaaaaaaaaaaaaaaaaaaaaaaaaaaaaaaaaaaugcaucccccccccccccccccccccccccccccccaaaggcucuuuucagagccaccagaauu

SEQ ID NO: 17577 - RNA, 1922 nt, Artificial Sequence
  mRNA product Design h-3 comprising derived and/or modified sequence from HRSV(Memphis-37)__AIY60640.1__F-del_DSCav1_mut5 (opt3)
gggagacccgugacccggaaguuguacggcuacgcgacuuucccucccacaaacccucgcgcccuuccuuuccuacuugggcccggcagaaagcuuaccauggagcugcccauccucaagaccaacgccauuacaacuauacuugcugcagugacgcugugcuucgccagcucccagaauaucaccgaagaguuuuaccaaucuacauguucagcggucaguaaaggcuauuugagcgcuuuaagaacugggugguacaccuccguuauuacaaucgaacugucuaacauuaaggagaauaaaugcaacggaaccgacgccaaggugaaacuaaucaagcaggaacucgauaaguauaaaaaugcaguaacugagcugcagcuucugaugcagucgaccccugccgcugguucaggcagcgcaauagccagugggaucgcuguguguaaggucuugcaccucgagggagaagugaacaaaauuaagaaugcccugcuguccacaaacaaagcgguugugucucucagcggcugcggugucuccguguuaacguucaagguacuggaccuuaagaauuacaucgauaaacaauugcugccaauucuaaacaagcagucauguaguaucagcaauauagagacuguuauugaauuucagcagaaaaacaauaggcuccuggagaucacccgggaguucucugugaacgcaggggucacaacuccgguguccaccuauaugcuuacaaauucagaacuguugagccucauuaacgacaugcccaucaccaacgaucaaaagaaacugaugaguaauaacgugcagaucguccgccagcagucuuacuccauuaugugcauaaucaaggaggaaguuuuagccuaugugguacaacugccucucuacggagugauugacacgccauguuggaaacuucauacuagcccccugugcacaaccaauacuaaggagggcucgaacaucuguuugacacgaaccgaucguggcugguacugcgacaaugcugggucugucuccuuuuucccucaggccgaaacguguaaggugcagucaaacagaguguuuugcgauaccaugaauaguagaacacugccaagcgaggugaaccucugcaauauagacauuuucaaccccaaauaugauuguaagaucaugacuuccaaaaccgacgucucuagcucagugaucacaagucugggagcaauuguauccugcuacgguaagacuaaauguaccgcuagcaauaagugcaggggcaucauuaagacauuuucuaacgggugugauuauguuucaaauaaaggaguggacaccgucagugugggcaacacucuuuacuaugucaauaagcaagaggguaaaagccuguacgugaagggggaaccuauaaucaacuucuaugacccauugguuuuuccguccgaugaguucgacgccucuauuucgcagguuaacgagaaaaucaaucagagccucgcguuuauccggaaguccgaugaacuguuacacaacguaaaugucggaaagucaacgacaaacauuaugauaaccacuaucauuaucgugauuaucguuauacugcuacuccugaucgccgugggccuuuucuuguacugcaaagcacgcugaggacuaguggaagcauuuuccuggcugauuaaaagaaauuacucagcuauggucaucuguuccuguuagaaggcuaugcagcauauuauauacuaugcgcauguuaugaaaugcauaauaaaaaauuuuaaaaaaucuaaaagaucuaaaaaaaaaaaaaaaaaaaaaaaaaaaaaaaaaaaaaaaaaaaaaaaaaaaaaaaaaaaaaaaaugcaucccccccccccccccccccccccccccccccaaaggcucuuuucagagccaccagaauu

SEQ ID NO: 17578 - RNA, 1922 nt, Artificial Sequence
  mRNA product Design h-3 comprising derived and/or modified sequence from HRSV(Memphis-37)__AIY60640.1__F-del_DSCav1_mut5 (opt4)
gggagacccgugacccggaaguuguacggcuacgcgacuuucccucccacaaacccucgcgcccuuccuuuccuacuugggcccggcagaaagcuuaccauggagcugcccauccugaagaccaacgccaucaccaccauccuggccgccgugacccugugcuucgccagcagccagaacaucaccgaggaguucuaccagagcaccugcagcgccgugagcaagggcuaccugagcgcccugagaaccggcugguacaccagcgugaucaccaucgagcugagcaacaucaaggagaacaagugcaacggcaccgacgccaaggugaagcugaucaagcaggagcuggacaaguacaagaacgccgugaccgagcugcagcugcugaugcagagcacccccgccgccggcagcggcagcgccaucgccagcggcaucgccgugugcaaggugcugcaccuggagggcgaggugaacaagaucaagaacgcccugcugagcaccaacaaggccguggugagccugagcggcugcggcgugagcgugcugaccuucaaggugcuggaccugaagaacuacaucgacaagcagcugcugcccauccugaacaagcagagcugcagcaucagcaacaucgagaccgugaucgaguuccagcagaagaacaacagacugcuggagaucaccagagaguucagcgugaacgccggcgugaccacccccgugagcaccuacaugcugaccaacagcgagcugcugagccugaucaacgacaugcccaucaccaacgaccagaagaagcugaugagcaacaacgugcagaucgugagacagcagagcuacagcaucaugugcaucaucaaggaggaggugcuggccuacguggugcagcugccccuguacggcgugaucgacacccccugcuggaagcugcacaccagcccccugugcaccaccaacaccaaggagggcagcaacaucugccugaccagaaccgacagaggcugguacugcgacaacgccggcagcgugagcuucuucccccaggccgagaccugcaaggugcagagcaacagaguguucugcgacaccaugaacagcagaacccugcccagcgaggugaaccugugcaacaucgacaucuucaaccccaaguacgacugcaagaucaugaccagcaagaccgacgugagcagcagcgugaucaccagccugggcgccaucgugagcugcuacggcaagaccaagugcaccgccagcaacaagugcagaggcaucaucaagaccuucagcaacggcugcgacuacgugagcaacaagggcguggacaccgugagcgugggcaacacccuguacuacgugaacaagcaggagggcaagagccuguacgugaagggcgagcccaucaucaacuucuacgacccccugguguuccccagcgacgaguucgacgccagcaucagccaggugaacgagaagaucaaccagagccuggccuucaucagaaagagcgacgagcugcugcacaacgugaacgugggcaagagcaccaccaacaucaugaucaccaccaucaucaucgugaucaucgugauccugcugcugcugaucgccgugggccuguuccuguacugcaaggccagaugaggacuaguggaagcauuuuccuggcugauuaaaagaaauuacucagcuauggucaucuguuccuguuagaaggcuaugcagcauauuauauacuaugcgcauguuaugaaaugcauaauaaaaaauuuuaaaaaaucuaaaagaucuaaaaaaaaaaaaaaaaaaaaaaaaaaaaaaaaaaaaaaaaaaaaaaaaaaaaaaaaaaaaaaaaugcaucccccccccccccccccccccccccccccccaaaggcucuuuucagagccaccagaauu

SEQ ID NO: 17579 - RNA, 1922 nt, Artificial Sequence
  mRNA product Design h-3 comprising derived and/or modified sequence from HRSV(Memphis-37)__AIY60640.1__F-del_DSCav1_mut5 (opt5)
gggagacccgugacccggaaguuguacggcuacgcgacuuucccucccacaaacccucgcgcccuuccuuuccuacuugggcccggcagaaagcuuaccauggagcugcccauccucaagaccaacgccauuacaacgauccuggcugccgugacccuuugcuucgcgagcucccagaauauuacagaagaguuuuaccaaucuaccuguagcgcugucuccaaaggcuaucugucugcccucagaacagggugguacaccagcguuaucacaauugaacuguccaacaucaaggagaauaaaugcaacggaaccgacgccaaggugaaacuuaucaagcaggaacuggauaaguauaaaaaugcugugacggagcuccagcugcugaugcagucuaccccugccgcuggcagcggguccgccauugcgagcggaaucgccgucuguaaggugcuccaccuggagggcgaaguuaacaaaauuaagaaugcccuucugucuacaaacaaagcuguggucucccucagcgggugcggagugucuguucugaccuucaaggugcuugaccugaagaauuacaucgauaaacaacuccugccgauucugaacaagcaguccuguagcaucucuaauauugagacagucaucgaauuucagcagaaaaacaaucggcuccuggagaucacccgcgaguucuccgugaacgcuggcgugacgacacccgucagcaccuauaugcuuacaaauuccgaacugcucucucugauuaacgacaugccuaucaccaacgaucaaaagaaacuuaugagcaauaacguucagauugugagacagcaguccuacagcaucaugugcauuaucaaggaggaagugcuggccuaugucgugcaacucccccuguacggcguuaucgacaccccuuguuggaaacugcauacaucuccccucugcacgaccaauacaaaggagggguccaacauuugucugacccggacagaucgcggaugguacugcgacaaugcgggcagcgugagcuuuuucccucaggccgaaaccuguaagguccagucuaacagaguguuuugcgauacgaugaacuccagaacacugccgucugagguuaaucucugcaauaucgacauuuucaaccccaaauaugauuguaagaucaugaccagcaaaaccgacguguccagcucugucauuacaucccugggggcuaucgugagcugcuacggaaagaccaaauguacagccucuaauaagugccggggcaucauuaagacguuuuccaacgggugugauuaugucagcaauaaaggaguggacaccguuuccgugggcaacacacuuuacuaugucaauaagcaagagggcaaaucucuguacgugaagggggaaccuaucauuaacuucuaugacccccucguuuuuccuagcgaugaguucgacgcuuccaucucucaggugaacgagaaaauuaaucagagccuggccuuuauccgcaaguccgaugaacugcuccacaacgucaaugugggaaagagcaccacaaacauuaugaucaccacgaucauuaucgugauuaucguuauucugcuucugcucaucgccgucggccuguuccuguacugcaaagcuagaugaggacuaguggaagcauuuuccuggcugauuaaaagaaauuacucagcuauggucaucuguuccuguuagaaggcuaugcagcauauuauauacuaugcgcauguuaugaaaugcauaauaaaaaauuuuaaaaaaucuaaaagaucuaaaaaaaaaaaaaaaaaaaaaaaaaaaaaaaaaaaaaaaaaaaaaaaaaaaaaaaaaaaaaaaaugcaucccccccccccccccccccccccccccccccaaaggcucuuuucagagccaccagaauu

SEQ ID NO: 17580 - RNA, 1922 nt, Artificial Sequence
  mRNA product Design h-3 comprising derived and/or modified sequence from HRSV(Memphis-37)__AIY60640.1__F-del_DSCav1_mut5 (opt6)
gggagacccgugacccggaaguuguacggcuacgcgacuuucccucccacaaacccucgcgcccuuccuuuccuacuugggcccggcagaaagcuuaccauggaauuacccaucuuaaaaacaaaugcaauaacaacaauacuagcagccguaacauuaugcuucgccucaagccaaaacauaacagaagaauuuuaccaaagcacauguuccgccguaucaaaaggauaucucucagcacuacguacuggaugguauacauccguaaucacaauugaacuaucaaacauuaaagaaaacaaaugcaauggaacagaugcgaaaguaaaacuaauaaaacaagaauuagauaaauauaaaaaugcaguaaccgaacuacaacuacuaaugcaaucaacucccgcugccgguagcggauccgccauagcaagcggaauugcuguauguaaaguccuacaucuugaaggcgaagucaacaaaaucaaaaaugcauuacucucgaccaacaaagcagucguaucacuaucaggaugcggagucucaguauuaacuuuuaaaguccuugaccuaaaaaacuacauagacaaacaacuacuaccaauucuaaauaaacaaaguugcagcauauccaauaucgaaacaguuauagaauuucaacaaaaaaacaaccgccuacuagaaaucacuagagaauuuucaguaaaugcaggcguaaccacaccagucucuaccuauaugcuuaccaacucugaauuauuaucacuuauaaacgacaugcccauaacaaaugaucaaaaaaaacuaaugagcaacaacguacaaauaguaagacaacaaagcuacagcauuauguguauaauaaaagaagaaguguuagcuuauguaguccaacuaccccucuauggcguuaucgauacaccaugcuggaaauuacacacaagcccucuaugcacaacuaacaccaaagaaggcucuaacauaugcuuaacaagaacagauagaggaugguauugcgauaacgcaggaucaguaucauucuuuccacaagcagaaacauguaaaguacaaucuaaccgaguauucugcgacacaaugaacucuagaacacuacccucagaaguuaaucucuguaauauugacauuuucaauccaaaauacgauugcaaaauaaugaccucuaaaaccgacguaucauccucaguuauaacguccuuaggagcaaucguaagcugcuauggcaaaacaaaauguaccgcaucaaacaaaugcagaggaauaauaaaaacauucucaaacggcugugacuacguaagcaauaaagguguugacacaguuucaguaggaaauacacuauacuauguaaauaaacaagaaggaaaaucucucuauguaaaaggagaacccauaauaaacuucuacgacccacucguauuuccaagcgaugaauuugaugcgagcauuucccagguaaaugaaaaaauaaaucaaucacuagcauucaucagaaaaagugaugaauuacuacacaauguuaacguaggaaaaucaacaacaaauaucaugauaacaacaaucauaauagucauaaucguaauauuacuauuacuaauagcaguagguuuauuucuauacuguaaagcaagguaaggacuaguggaagcauuuuccuggcugauuaaaagaaauuacucagcuauggucaucuguuccuguuagaaggcuaugcagcauauuauauacuaugcgcauguuaugaaaugcauaauaaaaaauuuuaaaaaaucuaaaagaucuaaaaaaaaaaaaaaaaaaaaaaaaaaaaaaaaaaaaaaaaaaaaaaaaaaaaaaaaaaaaaaaaugcaucccccccccccccccccccccccccccccccaaaggcucuuuucagagccaccagaauu

SEQ ID NO: 17581 - RNA, 1922 nt, Artificial Sequence
  mRNA product Design h-3 comprising derived and/or modified sequence from HRSV(Memphis-37)__AIY60640.1__F-del_DSCav1_mut5 (opt11)
gggagacccgugacccggaaguuguacggcuacgcgacuuucccucccacaaacccucgcgcccuuccuuuccuacuugggcccggcagaaagcuuaccauggaacuucccauccuaaaaaccaacgccauaacaacaauccucgcagcagucacccucugcuucgccucuucacaaaacaucaccgaagaauuuuaccaaucaaccugcuccgccguguccaaaggcuaccucucagcacugcgcacaggaugguauaccagcguaaucaccaucgaacucuccaacaucaaggaaaacaaaugcaacggcaccgaugccaaagucaaacucaucaagcaagaacuugacaaauacaaaaacgccgugaccgagcuacaacuccucaugcaguccacuccagccgccggcuccggcagcgccaucgccuccggcaucgccguaugcaaaguccuccaccucgaaggcgaaguaaacaaaaucaagaacgcacuccuaagcaccaacaaagccgucgucucacucuccgguugcggcgucagcguccuaacauucaaaguucucgaccucaaaaacuacauagacaaacaacuccuccccauccucaacaaacaauccugcuccauaucaaacaucgaaaccguuaucgaauuucaacaaaaaaacaaccgccuccuagaaaucacccgcgaauuuuccgucaacgcaggcgucaccacccccguuuccaccuauaugcucaccaacuccgaacuccucucccucaucaacgacaugcccauuaccaacgaccaaaagaaacuuaugagcaacaacguucaaaucguccgacaacaaucauacuccaucaugugcauuaucaaagaagaaguacucgccuacguaguacaauuaccccucuacggcguaaucgacaccccaugcuggaaacuacacaccuccccccucuguaccaccaacaccaaagaaggcucuaacaucugccucacccgcacagaccguggcugguauugcgauaacgcagggucugucuccuucuucccccaagccgaaacaugcaaaguccaauccaacagagucuucugcgacaccaugaacucgagaacccuccccuccgaagucaaccuaugcaacaucgacaucuucaacccaaaauacgacugcaaaaucaugacuucaaaaacagacgugagcucguccgucaucacaagccuaggagcuaucguauccugcuacggaaaaacaaaaugcacugcuuccaacaaaugccgcggaaucauaaaaaccuucuccaacggcugcgacuacgucagcaacaaaggcgucgacacagucuccguaggcaacacccuauacuacgucaauaaacaagaaggcaagucccuauaugucaaaggcgagcccaucaucaauuucuaugauccccucguuuucccauccgacgaauuugacgcauccaucucccaagucaacgaaaaaauaaaccaaagccucgcauucauccgcaaauccgacgaacuccuccacaacguaaacguaggaaaauccacaacuaacaucaugaucaccaccaucaucaucgucauuaucgucauccuacuccuccucauagcagucggccucuuccucuacugcaaagcacgcuagggacuaguggaagcauuuuccuggcugauuaaaagaaauuacucagcuauggucaucuguuccuguuagaaggcuaugcagcauauuauauacuaugcgcauguuaugaaaugcauaauaaaaaauuuuaaaaaaucuaaaagaucuaaaaaaaaaaaaaaaaaaaaaaaaaaaaaaaaaaaaaaaaaaaaaaaaaaaaaaaaaaaaaaaaugcaucccccccccccccccccccccccccccccccaaaggcucuuuucagagccaccagaauu

SEQ ID NO: 17582 - RNA, 1985 nt, Artificial Sequence
  mRNA product Design h-4 comprising derived and/or modified sequence from HRSV(Memphis-37)__AIY60640.1__F-del_DSCav1_mut5 (opt1)
gggagagggcgcuuggcuugcaaggacccugagcugcggcauugaagcacacccaacccaacucgacugaagucagccucacugaaccggaucugagaaucuucucucucugggcuugccagggcucuccgaaccuagcuagcauccucuucaauuccaacuagaaagcuuaccauggagcugcccauccucaagaccaacgccaucaccacgauccuggccgcggugacccugugcuucgccagcucccagaacaucaccgaggaguucuaccagagcacgugcuccgccgucagcaagggcuaccucuccgcccugcgcaccgggugguacaccagcgugaucaccaucgagcuguccaacaucaaggagaacaagugcaacggcaccgacgccaaggugaagcucaucaagcaggagcuggacaaguacaagaacgcggucacggagcugcagcuccugaugcagagcaccccggccgccggcuccgggagcgcgaucgccuccggcaucgccgucugcaaggugcugcaccucgagggcgaggugaacaagaucaagaacgcccugcuguccaccaacaaggccgucgugagccucuccggcugcggggugagcguccugaccuucaaggugcuggaccucaagaacuacaucgacaagcagcugcugcccauccugaacaagcagagcugcuccaucagcaacaucgagaccgucaucgaguuccagcagaagaacaaccgccuccuggagaucacgcgggaguucagcgugaacgcgggcgugaccacccccgucuccaccuacaugcugacgaacagcgagcuccugucccugaucaacgacaugccgaucaccaacgaccagaagaagcucaugagcaacaacgugcagaucgugcgccagcaguccuacagcaucaugugcaucaucaaggaggagguccuggccuacguggugcagcugccccucuacggggucaucgacacccccugcuggaagcugcacaccagcccccugugcacgaccaacaccaaggagggcuccaacaucugccucacccggacggaccgcgggugguacugcgacaacgccggcagcguguccuucuucccgcaggccgagaccugcaagguccagagcaaccggguguucugcgacaccaugaacucccggacccugcccagcgaggugaaccucugcaacaucgacaucuucaaccccaaguacgacugcaagaucaugacguccaagaccgacgucagcuccagcgugaucaccucccugggcgccaucgugagcugcuacgggaagaccaagugcacggcgagcaacaagugccgcggcaucaucaagaccuucuccaacgggugcgacuacgucagcaacaagggcguggacaccguguccgucggcaacacccuguacuacgugaacaagcaggagggcaagagccucuacgugaagggggagcccaucaucaacuucuacgacccgcuggucuuccccuccgacgaguucgacgccagcaucucccaggugaacgagaagaucaaccagagccuggccuucauccggaaguccgacgagcuccugcacaacgugaacgucggcaagagcaccacgaacaucaugaucaccaccaucaucaucgugaucaucgugauccugcugcuccugaucgccgucgggcuguuccucuacugcaaggcccgcugaggacuaguaauaaggaaacuguaugaaugucugugggcaggaagugaagagauccuucuguaaagguuuuuggaauuaugucugcugaauaauaaacuuuuuugaaauaauaaaucugguagaaaaaugagaucuaaaaaaaaaaaaaaaaaaaaaaaaaaaaaaaaaaaaaaaaaaaaaaaaaaaaaaaaaaaaaaaaugcaucccccccccccccccccccccccccccccccaaaggcucuuuucagagccaccagaauu

SEQ ID NO: 17583 - RNA, 1985 nt, Artificial Sequence
  mRNA product Design h-4 comprising derived and/or modified sequence from HRSV(Memphis-37)__AIY60640.1__F-del_DSCav1_mut5 (opt1)
gggagagggcgcuuggcuugcaaggacccugagcugcggcauugaagcacacccaacccaacucgacugaagucagccucacugaaccggaucugagaaucuucucucucugggcuugccagggcucuccgaaccuagcuagcauccucuucaauuccaacuagaaagcuuaccauggagcugcccauccucaagaccaacgccaucaccacgauccuggccgcggugacccugugcuucgccagcucccagaacaucaccgaggaguucuaccagagcacgugcuccgccgucagcaagggcuaccucuccgcccugcgcaccgggugguacaccagcgugaucaccaucgagcuguccaacaucaaggagaacaagugcaacggcaccgacgccaaggugaagcucaucaagcaggagcuggacaaguacaagaacgcggucacggagcugcagcuccugaugcagagcaccccggccgccggguccggcagcgccaucgcguccgggaucgccgugugcaaggugcugcaccucgagggcgaggucaacaagaucaagaacgcccugcugagcaccaacaaggccguggugucccucagcggcugcggggucuccgugcugaccuucaaggugcuggaccucaagaacuacaucgacaagcagcugcugcccauccucaacaagcagagcugcuccaucagcaacaucgagacggucaucgaguuccagcagaagaacaaccggcugcuggagaucacccgcgaguucuccgugaacgccggcgugaccacccccgucagcacguacaugcucaccaacagcgagcugcugucccucaucaacgacaugcccaucaccaacgaccagaagaagcugaugagcaacaacgugcagaucgugcggcagcaguccuacagcaucaugugcaucaucaaggaggagguccuggcguacguggugcagcucccgcuguacggggucaucgacacccccugcuggaagcugcacacgagcccccucugcaccaccaacaccaaggagggcuccaacaucugccugacgcgcaccgaccgggggugguacugcgacaacgccggcuccgugagcuucuucccccaggccgagaccugcaaggugcaguccaaccgcgucuucugcgacaccaugaacagccggacgcucccguccgaggugaaccugugcaacaucgacaucuucaaccccaaguacgacugcaagaucaugaccagcaagaccgacgucuccagcuccgugaucaccagccugggcgccaucguguccugcuacgggaagacgaagugcaccgccagcaacaagugccggggcaucaucaagaccuucuccaacgggugcgacuacgucagcaacaagggcguggacaccgugagcgucggcaacacgcucuacuacgugaacaagcaggaggggaagucccuguacgugaagggcgagcccaucaucaacuucuacgacccccuggucuucccgagcgacgaguucgacgcguccaucagccaggugaacgagaagaucaaccagucccucgccuucauccgcaagagcgacgagcugcugcacaacgugaacgucgggaaguccaccaccaacaucaugaucaccaccaucaucaucgugaucaucgugauccuccugcugcucaucgccgucggccuguuccuguacugcaaggcccggugaggacuaguaauaaggaaacuguaugaaugucugugggcaggaagugaagagauccuucuguaaagguuuuuggaauuaugucugcugaauaauaaacuuuuuugaaauaauaaaucugguagaaaaaugagaucuaaaaaaaaaaaaaaaaaaaaaaaaaaaaaaaaaaaaaaaaaaaaaaaaaaaaaaaaaaaaaaaaugcaucccccccccccccccccccccccccccccccaaaggcucuuuucagagccaccagaauu

SEQ ID NO: 17584 - RNA, 1985 nt, Artificial Sequence
  mRNA product Design h-4 comprising derived and/or modified sequence from HRSV(Memphis-37)__AIY60640.1__F-del_DSCav1_mut5 (opt2)
gggagagggcgcuuggcuugcaaggacccugagcugcggcauugaagcacacccaacccaacucgacugaagucagccucacugaaccggaucugagaaucuucucucucugggcuugccagggcucuccgaaccuagcuagcauccucuucaauuccaacuagaaagcuuaccauggagcuccccauccucaagaccaacgccaucaccaccauccucgccgccgucacccucugcuucgccuccucccagaacaucaccgaggaguucuaccaguccaccugcuccgccgucuccaagggcuaccucuccgcccuccgcaccggcugguacaccuccgucaucaccaucgagcucuccaacaucaaggagaacaagugcaacggcaccgacgccaaggucaagcucaucaagcaggagcucgacaaguacaagaacgccgucaccgagcuccagcuccucaugcaguccacccccgccgccggcuccggcuccgccaucgccuccggcaucgccgucugcaagguccuccaccucgagggcgaggucaacaagaucaagaacgcccuccucuccaccaacaaggccgucgucucccucuccggcugcggcgucuccguccucaccuucaagguccucgaccucaagaacuacaucgacaagcagcuccuccccauccucaacaagcaguccugcuccaucuccaacaucgagaccgucaucgaguuccagcagaagaacaaccgccuccucgagaucacccgcgaguucuccgucaacgccggcgucaccacccccgucuccaccuacaugcucaccaacuccgagcuccucucccucaucaacgacaugcccaucaccaacgaccagaagaagcucauguccaacaacguccagaucguccgccagcaguccuacuccaucaugugcaucaucaaggaggagguccucgccuacgucguccagcucccccucuacggcgucaucgacacccccugcuggaagcuccacaccuccccccucugcaccaccaacaccaaggagggcuccaacaucugccucacccgcaccgaccgcggcugguacugcgacaacgccggcuccgucuccuucuucccccaggccgagaccugcaagguccaguccaaccgcgucuucugcgacaccaugaacucccgcacccuccccuccgaggucaaccucugcaacaucgacaucuucaaccccaaguacgacugcaagaucaugaccuccaagaccgacgucuccuccuccgucaucaccucccucggcgccaucgucuccugcuacggcaagaccaagugcaccgccuccaacaagugccgcggcaucaucaagaccuucuccaacggcugcgacuacgucuccaacaagggcgucgacaccgucuccgucggcaacacccucuacuacgucaacaagcaggagggcaagucccucuacgucaagggcgagcccaucaucaacuucuacgacccccucgucuuccccuccgacgaguucgacgccuccaucucccaggucaacgagaagaucaaccagucccucgccuucauccgcaaguccgacgagcuccuccacaacgucaacgucggcaaguccaccaccaacaucaugaucaccaccaucaucaucgucaucaucgucauccuccuccuccucaucgccgucggccucuuccucuacugcaaggcccgcugaggacuaguaauaaggaaacuguaugaaugucugugggcaggaagugaagagauccuucuguaaagguuuuuggaauuaugucugcugaauaauaaacuuuuuugaaauaauaaaucugguagaaaaaugagaucuaaaaaaaaaaaaaaaaaaaaaaaaaaaaaaaaaaaaaaaaaaaaaaaaaaaaaaaaaaaaaaaaugcaucccccccccccccccccccccccccccccccaaaggcucuuuucagagccaccagaauu

SEQ ID NO: 17585 - RNA, 1985 nt, Artificial Sequence
  mRNA product Design h-4 comprising derived and/or modified sequence from HRSV(Memphis-37)__AIY60640.1__F-del_DSCav1_mut5 (opt3)
gggagagggcgcuuggcuugcaaggacccugagcugcggcauugaagcacacccaacccaacucgacugaagucagccucacugaaccggaucugagaaucuucucucucugggcuugccagggcucuccgaaccuagcuagcauccucuucaauuccaacuagaaagcuuaccauggagcugcccauccucaagaccaacgccauuacaacuauacuugcugcagugacgcugugcuucgccagcucccagaauaucaccgaagaguuuuaccaaucuacauguucagcggucaguaaaggcuauuugagcgcuuuaagaacugggugguacaccuccguuauuacaaucgaacugucuaacauuaaggagaauaaaugcaacggaaccgacgccaaggugaaacuaaucaagcaggaacucgauaaguauaaaaaugcaguaacugagcugcagcuucugaugcagucgaccccugccgcugguucaggcagcgcaauagccagugggaucgcuguguguaaggucuugcaccucgagggagaagugaacaaaauuaagaaugcccugcuguccacaaacaaagcgguugugucucucagcggcugcggugucuccguguuaacguucaagguacuggaccuuaagaauuacaucgauaaacaauugcugccaauucuaaacaagcagucauguaguaucagcaauauagagacuguuauugaauuucagcagaaaaacaauaggcuccuggagaucacccgggaguucucugugaacgcaggggucacaacuccgguguccaccuauaugcuuacaaauucagaacuguugagccucauuaacgacaugcccaucaccaacgaucaaaagaaacugaugaguaauaacgugcagaucguccgccagcagucuuacuccauuaugugcauaaucaaggaggaaguuuuagccuaugugguacaacugccucucuacggagugauugacacgccauguuggaaacuucauacuagcccccugugcacaaccaauacuaaggagggcucgaacaucuguuugacacgaaccgaucguggcugguacugcgacaaugcugggucugucuccuuuuucccucaggccgaaacguguaaggugcagucaaacagaguguuuugcgauaccaugaauaguagaacacugccaagcgaggugaaccucugcaauauagacauuuucaaccccaaauaugauuguaagaucaugacuuccaaaaccgacgucucuagcucagugaucacaagucugggagcaauuguauccugcuacgguaagacuaaauguaccgcuagcaauaagugcaggggcaucauuaagacauuuucuaacgggugugauuauguuucaaauaaaggaguggacaccgucagugugggcaacacucuuuacuaugucaauaagcaagaggguaaaagccuguacgugaagggggaaccuauaaucaacuucuaugacccauugguuuuuccguccgaugaguucgacgccucuauuucgcagguuaacgagaaaaucaaucagagccucgcguuuauccggaaguccgaugaacuguuacacaacguaaaugucggaaagucaacgacaaacauuaugauaaccacuaucauuaucgugauuaucguuauacugcuacuccugaucgccgugggccuuuucuuguacugcaaagcacgcugaggacuaguaauaaggaaacuguaugaaugucugugggcaggaagugaagagauccuucuguaaagguuuuuggaauuaugucugcugaauaauaaacuuuuuugaaauaauaaaucugguagaaaaaugagaucuaaaaaaaaaaaaaaaaaaaaaaaaaaaaaaaaaaaaaaaaaaaaaaaaaaaaaaaaaaaaaaaaugcaucccccccccccccccccccccccccccccccaaaggcucuuuucagagccaccagaauu

SEQ ID NO: 17586 - RNA, 1985 nt, Artificial Sequence
  mRNA product Design h-4 comprising derived and/or modified sequence from HRSV(Memphis-37)__AIY60640.1__F-del_DSCav1_mut5 (opt4)
gggagagggcgcuuggcuugcaaggacccugagcugcggcauugaagcacacccaacccaacucgacugaagucagccucacugaaccggaucugagaaucuucucucucugggcuugccagggcucuccgaaccuagcuagcauccucuucaauuccaacuagaaagcuuaccauggagcugcccauccugaagaccaacgccaucaccaccauccuggccgccgugacccugugcuucgccagcagccagaacaucaccgaggaguucuaccagagcaccugcagcgccgugagcaagggcuaccugagcgcccugagaaccggcugguacaccagcgugaucaccaucgagcugagcaacaucaaggagaacaagugcaacggcaccgacgccaaggugaagcugaucaagcaggagcuggacaaguacaagaacgccgugaccgagcugcagcugcugaugcagagcacccccgccgccggcagcggcagcgccaucgccagcggcaucgccgugugcaaggugcugcaccuggagggcgaggugaacaagaucaagaacgcccugcugagcaccaacaaggccguggugagccugagcggcugcggcgugagcgugcugaccuucaaggugcuggaccugaagaacuacaucgacaagcagcugcugcccauccugaacaagcagagcugcagcaucagcaacaucgagaccgugaucgaguuccagcagaagaacaacagacugcuggagaucaccagagaguucagcgugaacgccggcgugaccacccccgugagcaccuacaugcugaccaacagcgagcugcugagccugaucaacgacaugcccaucaccaacgaccagaagaagcugaugagcaacaacgugcagaucgugagacagcagagcuacagcaucaugugcaucaucaaggaggaggugcuggccuacguggugcagcugccccuguacggcgugaucgacacccccugcuggaagcugcacaccagcccccugugcaccaccaacaccaaggagggcagcaacaucugccugaccagaaccgacagaggcugguacugcgacaacgccggcagcgugagcuucuucccccaggccgagaccugcaaggugcagagcaacagaguguucugcgacaccaugaacagcagaacccugcccagcgaggugaaccugugcaacaucgacaucuucaaccccaaguacgacugcaagaucaugaccagcaagaccgacgugagcagcagcgugaucaccagccugggcgccaucgugagcugcuacggcaagaccaagugcaccgccagcaacaagugcagaggcaucaucaagaccuucagcaacggcugcgacuacgugagcaacaagggcguggacaccgugagcgugggcaacacccuguacuacgugaacaagcaggagggcaagagccuguacgugaagggcgagcccaucaucaacuucuacgacccccugguguuccccagcgacgaguucgacgccagcaucagccaggugaacgagaagaucaaccagagccuggccuucaucagaaagagcgacgagcugcugcacaacgugaacgugggcaagagcaccaccaacaucaugaucaccaccaucaucaucgugaucaucgugauccugcugcugcugaucgccgugggccuguuccuguacugcaaggccagaugaggacuaguaauaaggaaacuguaugaaugucugugggcaggaagugaagagauccuucuguaaagguuuuuggaauuaugucugcugaauaauaaacuuuuuugaaauaauaaaucugguagaaaaaugagaucuaaaaaaaaaaaaaaaaaaaaaaaaaaaaaaaaaaaaaaaaaaaaaaaaaaaaaaaaaaaaaaaaugcaucccccccccccccccccccccccccccccccaaaggcucuuuucagagccaccagaauu

SEQ ID NO: 17587 - RNA, 1985 nt, Artificial Sequence
  mRNA product Design h-4 comprising derived and/or modified sequence from HRSV(Memphis-37)__AIY60640.1__F-del_DSCav1_mut5 (opt5)
gggagagggcgcuuggcuugcaaggacccugagcugcggcauugaagcacacccaacccaacucgacugaagucagccucacugaaccggaucugagaaucuucucucucugggcuugccagggcucuccgaaccuagcuagcauccucuucaauuccaacuagaaagcuuaccauggagcugcccauccucaagaccaacgccauuacaacgauccuggcugccgugacccuuugcuucgcgagcucccagaauauuacagaagaguuuuaccaaucuaccuguagcgcugucuccaaaggcuaucugucugcccucagaacagggugguacaccagcguuaucacaauugaacuguccaacaucaaggagaauaaaugcaacggaaccgacgccaaggugaaacuuaucaagcaggaacuggauaaguauaaaaaugcugugacggagcuccagcugcugaugcagucuaccccugccgcuggcagcggguccgccauugcgagcggaaucgccgucuguaaggugcuccaccuggagggcgaaguuaacaaaauuaagaaugcccuucugucuacaaacaaagcuguggucucccucagcgggugcggagugucuguucugaccuucaaggugcuugaccugaagaauuacaucgauaaacaacuccugccgauucugaacaagcaguccuguagcaucucuaauauugagacagucaucgaauuucagcagaaaaacaaucggcuccuggagaucacccgcgaguucuccgugaacgcuggcgugacgacacccgucagcaccuauaugcuuacaaauuccgaacugcucucucugauuaacgacaugccuaucaccaacgaucaaaagaaacuuaugagcaauaacguucagauugugagacagcaguccuacagcaucaugugcauuaucaaggaggaagugcuggccuaugucgugcaacucccccuguacggcguuaucgacaccccuuguuggaaacugcauacaucuccccucugcacgaccaauacaaaggagggguccaacauuugucugacccggacagaucgcggaugguacugcgacaaugcgggcagcgugagcuuuuucccucaggccgaaaccuguaagguccagucuaacagaguguuuugcgauacgaugaacuccagaacacugccgucugagguuaaucucugcaauaucgacauuuucaaccccaaauaugauuguaagaucaugaccagcaaaaccgacguguccagcucugucauuacaucccugggggcuaucgugagcugcuacggaaagaccaaauguacagccucuaauaagugccggggcaucauuaagacguuuuccaacgggugugauuaugucagcaauaaaggaguggacaccguuuccgugggcaacacacuuuacuaugucaauaagcaagagggcaaaucucuguacgugaagggggaaccuaucauuaacuucuaugacccccucguuuuuccuagcgaugaguucgacgcuuccaucucucaggugaacgagaaaauuaaucagagccuggccuuuauccgcaaguccgaugaacugcuccacaacgucaaugugggaaagagcaccacaaacauuaugaucaccacgaucauuaucgugauuaucguuauucugcuucugcucaucgccgucggccuguuccuguacugcaaagcuagaugaggacuaguaauaaggaaacuguaugaaugucugugggcaggaagugaagagauccuucuguaaagguuuuuggaauuaugucugcugaauaauaaacuuuuuugaaauaauaaaucugguagaaaaaugagaucuaaaaaaaaaaaaaaaaaaaaaaaaaaaaaaaaaaaaaaaaaaaaaaaaaaaaaaaaaaaaaaaaugcaucccccccccccccccccccccccccccccccaaaggcucuuuucagagccaccagaauu

SEQ ID NO: 17588 - RNA, 1985 nt, Artificial Sequence
  mRNA product Design h-4 comprising derived and/or modified sequence from HRSV(Memphis-37)__AIY60640.1__F-del_DSCav1_mut5 (opt6)
gggagagggcgcuuggcuugcaaggacccugagcugcggcauugaagcacacccaacccaacucgacugaagucagccucacugaaccggaucugagaaucuucucucucugggcuugccagggcucuccgaaccuagcuagcauccucuucaauuccaacuagaaagcuuaccauggaauuacccaucuuaaaaacaaaugcaauaacaacaauacuagcagccguaacauuaugcuucgccucaagccaaaacauaacagaagaauuuuaccaaagcacauguuccgccguaucaaaaggauaucucucagcacuacguacuggaugguauacauccguaaucacaauugaacuaucaaacauuaaagaaaacaaaugcaauggaacagaugcgaaaguaaaacuaauaaaacaagaauuagauaaauauaaaaaugcaguaaccgaacuacaacuacuaaugcaaucaacucccgcugccgguagcggauccgccauagcaagcggaauugcuguauguaaaguccuacaucuugaaggcgaagucaacaaaaucaaaaaugcauuacucucgaccaacaaagcagucguaucacuaucaggaugcggagucucaguauuaacuuuuaaaguccuugaccuaaaaaacuacauagacaaacaacuacuaccaauucuaaauaaacaaaguugcagcauauccaauaucgaaacaguuauagaauuucaacaaaaaaacaaccgccuacuagaaaucacuagagaauuuucaguaaaugcaggcguaaccacaccagucucuaccuauaugcuuaccaacucugaauuauuaucacuuauaaacgacaugcccauaacaaaugaucaaaaaaaacuaaugagcaacaacguacaaauaguaagacaacaaagcuacagcauuauguguauaauaaaagaagaaguguuagcuuauguaguccaacuaccccucuauggcguuaucgauacaccaugcuggaaauuacacacaagcccucuaugcacaacuaacaccaaagaaggcucuaacauaugcuuaacaagaacagauagaggaugguauugcgauaacgcaggaucaguaucauucuuuccacaagcagaaacauguaaaguacaaucuaaccgaguauucugcgacacaaugaacucuagaacacuacccucagaaguuaaucucuguaauauugacauuuucaauccaaaauacgauugcaaaauaaugaccucuaaaaccgacguaucauccucaguuauaacguccuuaggagcaaucguaagcugcuauggcaaaacaaaauguaccgcaucaaacaaaugcagaggaauaauaaaaacauucucaaacggcugugacuacguaagcaauaaagguguugacacaguuucaguaggaaauacacuauacuauguaaauaaacaagaaggaaaaucucucuauguaaaaggagaacccauaauaaacuucuacgacccacucguauuuccaagcgaugaauuugaugcgagcauuucccagguaaaugaaaaaauaaaucaaucacuagcauucaucagaaaaagugaugaauuacuacacaauguuaacguaggaaaaucaacaacaaauaucaugauaacaacaaucauaauagucauaaucguaauauuacuauuacuaauagcaguagguuuauuucuauacuguaaagcaagguaaggacuaguaauaaggaaacuguaugaaugucugugggcaggaagugaagagauccuucuguaaagguuuuuggaauuaugucugcugaauaauaaacuuuuuugaaauaauaaaucugguagaaaaaugagaucuaaaaaaaaaaaaaaaaaaaaaaaaaaaaaaaaaaaaaaaaaaaaaaaaaaaaaaaaaaaaaaaaugcaucccccccccccccccccccccccccccccccaaaggcucuuuucagagccaccagaauu

SEQ ID NO: 17589 - RNA, 1985 nt, Artificial Sequence
  mRNA product Design h-4 comprising derived and/or modified sequence from HRSV(Memphis-37)__AIY60640.1__F-del_DSCav1_mut5 (opt11)
gggagagggcgcuuggcuugcaaggacccugagcugcggcauugaagcacacccaacccaacucgacugaagucagccucacugaaccggaucugagaaucuucucucucugggcuugccagggcucuccgaaccuagcuagcauccucuucaauuccaacuagaaagcuuaccauggaacuucccauccuaaaaaccaacgccauaacaacaauccucgcagcagucacccucugcuucgccucuucacaaaacaucaccgaagaauuuuaccaaucaaccugcuccgccguguccaaaggcuaccucucagcacugcgcacaggaugguauaccagcguaaucaccaucgaacucuccaacaucaaggaaaacaaaugcaacggcaccgaugccaaagucaaacucaucaagcaagaacuugacaaauacaaaaacgccgugaccgagcuacaacuccucaugcaguccacuccagccgccggcuccggcagcgccaucgccuccggcaucgccguaugcaaaguccuccaccucgaaggcgaaguaaacaaaaucaagaacgcacuccuaagcaccaacaaagccgucgucucacucuccgguugcggcgucagcguccuaacauucaaaguucucgaccucaaaaacuacauagacaaacaacuccuccccauccucaacaaacaauccugcuccauaucaaacaucgaaaccguuaucgaauuucaacaaaaaaacaaccgccuccuagaaaucacccgcgaauuuuccgucaacgcaggcgucaccacccccguuuccaccuauaugcucaccaacuccgaacuccucucccucaucaacgacaugcccauuaccaacgaccaaaagaaacuuaugagcaacaacguucaaaucguccgacaacaaucauacuccaucaugugcauuaucaaagaagaaguacucgccuacguaguacaauuaccccucuacggcguaaucgacaccccaugcuggaaacuacacaccuccccccucuguaccaccaacaccaaagaaggcucuaacaucugccucacccgcacagaccguggcugguauugcgauaacgcagggucugucuccuucuucccccaagccgaaacaugcaaaguccaauccaacagagucuucugcgacaccaugaacucgagaacccuccccuccgaagucaaccuaugcaacaucgacaucuucaacccaaaauacgacugcaaaaucaugacuucaaaaacagacgugagcucguccgucaucacaagccuaggagcuaucguauccugcuacggaaaaacaaaaugcacugcuuccaacaaaugccgcggaaucauaaaaaccuucuccaacggcugcgacuacgucagcaacaaaggcgucgacacagucuccguaggcaacacccuauacuacgucaauaaacaagaaggcaagucccuauaugucaaaggcgagcccaucaucaauuucuaugauccccucguuuucccauccgacgaauuugacgcauccaucucccaagucaacgaaaaaauaaaccaaagccucgcauucauccgcaaauccgacgaacuccuccacaacguaaacguaggaaaauccacaacuaacaucaugaucaccaccaucaucaucgucauuaucgucauccuacuccuccucauagcagucggccucuuccucuacugcaaagcacgcuagggacuaguaauaaggaaacuguaugaaugucugugggcaggaagugaagagauccuucuguaaagguuuuuggaauuaugucugcugaauaauaaacuuuuuugaaauaauaaaucugguagaaaaaugagaucuaaaaaaaaaaaaaaaaaaaaaaaaaaaaaaaaaaaaaaaaaaaaaaaaaaaaaaaaaaaaaaaaugcaucccccccccccccccccccccccccccccccaaaggcucuuuucagagccaccagaauu

SEQ ID NO: 17590 - RNA, 2001 nt, Artificial Sequence
  mRNA product Design h-5 comprising derived and/or modified sequence from HRSV(Memphis-37)__AIY60640.1__F-del_DSCav1_mut5 (opt1)
gggagagggcgcuuggcuugcaaggacccugagcugcggcauugaagcacacccaacccaacucgacugaagucagccucacugaaccggaucugagaaucuucucucucugggcuugccagggcucuccgaaccuagcuagcauccucuucaauuccaacuagaaagcuuaccauggagcugcccauccucaagaccaacgccaucaccacgauccuggccgcggugacccugugcuucgccagcucccagaacaucaccgaggaguucuaccagagcacgugcuccgccgucagcaagggcuaccucuccgcccugcgcaccgggugguacaccagcgugaucaccaucgagcuguccaacaucaaggagaacaagugcaacggcaccgacgccaaggugaagcucaucaagcaggagcuggacaaguacaagaacgcggucacggagcugcagcuccugaugcagagcaccccggccgccggcuccgggagcgcgaucgccuccggcaucgccgucugcaaggugcugcaccucgagggcgaggugaacaagaucaagaacgcccugcuguccaccaacaaggccgucgugagccucuccggcugcggggugagcguccugaccuucaaggugcuggaccucaagaacuacaucgacaagcagcugcugcccauccugaacaagcagagcugcuccaucagcaacaucgagaccgucaucgaguuccagcagaagaacaaccgccuccuggagaucacgcgggaguucagcgugaacgcgggcgugaccacccccgucuccaccuacaugcugacgaacagcgagcuccugucccugaucaacgacaugccgaucaccaacgaccagaagaagcucaugagcaacaacgugcagaucgugcgccagcaguccuacagcaucaugugcaucaucaaggaggagguccuggccuacguggugcagcugccccucuacggggucaucgacacccccugcuggaagcugcacaccagcccccugugcacgaccaacaccaaggagggcuccaacaucugccucacccggacggaccgcgggugguacugcgacaacgccggcagcguguccuucuucccgcaggccgagaccugcaagguccagagcaaccggguguucugcgacaccaugaacucccggacccugcccagcgaggugaaccucugcaacaucgacaucuucaaccccaaguacgacugcaagaucaugacguccaagaccgacgucagcuccagcgugaucaccucccugggcgccaucgugagcugcuacgggaagaccaagugcacggcgagcaacaagugccgcggcaucaucaagaccuucuccaacgggugcgacuacgucagcaacaagggcguggacaccguguccgucggcaacacccuguacuacgugaacaagcaggagggcaagagccucuacgugaagggggagcccaucaucaacuucuacgacccgcuggucuuccccuccgacgaguucgacgccagcaucucccaggugaacgagaagaucaaccagagccuggccuucauccggaaguccgacgagcuccugcacaacgugaacgucggcaagagcaccacgaacaucaugaucaccaccaucaucaucgugaucaucgugauccugcugcuccugaucgccgucgggcuguuccucuacugcaaggcccgcugaggacuaguacuggcugcaucucccuuuccucuguccuccauccuucucccaggauggugaagggggaccugguacccagugauccccaccccaggauccuaaaucaugacuuaccugcuaauaaaaacucauuggaaaagugagaagaucuaaaaaaaaaaaaaaaaaaaaaaaaaaaaaaaaaaaaaaaaaaaaaaaaaaaaaaaaaaaaaaaaugcaucccccccccccccccccccccccccccccccaaaggcucuuuucagagccaccagaauu

SEQ ID NO: 17591 - RNA, 2001 nt, Artificial Sequence
  mRNA product Design h-5 comprising derived and/or modified sequence from HRSV(Memphis-37)__AIY60640.1__F-del_DSCav1_mut5 (opt1)
gggagagggcgcuuggcuugcaaggacccugagcugcggcauugaagcacacccaacccaacucgacugaagucagccucacugaaccggaucugagaaucuucucucucugggcuugccagggcucuccgaaccuagcuagcauccucuucaauuccaacuagaaagcuuaccauggagcugcccauccucaagaccaacgccaucaccacgauccuggccgcggugacccugugcuucgccagcucccagaacaucaccgaggaguucuaccagagcacgugcuccgccgucagcaagggcuaccucuccgcccugcgcaccgggugguacaccagcgugaucaccaucgagcuguccaacaucaaggagaacaagugcaacggcaccgacgccaaggugaagcucaucaagcaggagcuggacaaguacaagaacgcggucacggagcugcagcuccugaugcagagcaccccggccgccggguccggcagcgccaucgcguccgggaucgccgugugcaaggugcugcaccucgagggcgaggucaacaagaucaagaacgcccugcugagcaccaacaaggccguggugucccucagcggcugcggggucuccgugcugaccuucaaggugcuggaccucaagaacuacaucgacaagcagcugcugcccauccucaacaagcagagcugcuccaucagcaacaucgagacggucaucgaguuccagcagaagaacaaccggcugcuggagaucacccgcgaguucuccgugaacgccggcgugaccacccccgucagcacguacaugcucaccaacagcgagcugcugucccucaucaacgacaugcccaucaccaacgaccagaagaagcugaugagcaacaacgugcagaucgugcggcagcaguccuacagcaucaugugcaucaucaaggaggagguccuggcguacguggugcagcucccgcuguacggggucaucgacacccccugcuggaagcugcacacgagcccccucugcaccaccaacaccaaggagggcuccaacaucugccugacgcgcaccgaccgggggugguacugcgacaacgccggcuccgugagcuucuucccccaggccgagaccugcaaggugcaguccaaccgcgucuucugcgacaccaugaacagccggacgcucccguccgaggugaaccugugcaacaucgacaucuucaaccccaaguacgacugcaagaucaugaccagcaagaccgacgucuccagcuccgugaucaccagccugggcgccaucguguccugcuacgggaagacgaagugcaccgccagcaacaagugccggggcaucaucaagaccuucuccaacgggugcgacuacgucagcaacaagggcguggacaccgugagcgucggcaacacgcucuacuacgugaacaagcaggaggggaagucccuguacgugaagggcgagcccaucaucaacuucuacgacccccuggucuucccgagcgacgaguucgacgcguccaucagccaggugaacgagaagaucaaccagucccucgccuucauccgcaagagcgacgagcugcugcacaacgugaacgucgggaaguccaccaccaacaucaugaucaccaccaucaucaucgugaucaucgugauccuccugcugcucaucgccgucggccuguuccuguacugcaaggcccggugaggacuaguacuggcugcaucucccuuuccucuguccuccauccuucucccaggauggugaagggggaccugguacccagugauccccaccccaggauccuaaaucaugacuuaccugcuaauaaaaacucauuggaaaagugagaagaucuaaaaaaaaaaaaaaaaaaaaaaaaaaaaaaaaaaaaaaaaaaaaaaaaaaaaaaaaaaaaaaaaugcaucccccccccccccccccccccccccccccccaaaggcucuuuucagagccaccagaauu

SEQ ID NO: 17592 - RNA, 2001 nt, Artificial Sequence
  mRNA product Design h-5 comprising derived and/or modified sequence from HRSV(Memphis-37)__AIY60640.1__F-del_DSCav1_mut5 (opt2)
gggagagggcgcuuggcuugcaaggacccugagcugcggcauugaagcacacccaacccaacucgacugaagucagccucacugaaccggaucugagaaucuucucucucugggcuugccagggcucuccgaaccuagcuagcauccucuucaauuccaacuagaaagcuuaccauggagcuccccauccucaagaccaacgccaucaccaccauccucgccgccgucacccucugcuucgccuccucccagaacaucaccgaggaguucuaccaguccaccugcuccgccgucuccaagggcuaccucuccgcccuccgcaccggcugguacaccuccgucaucaccaucgagcucuccaacaucaaggagaacaagugcaacggcaccgacgccaaggucaagcucaucaagcaggagcucgacaaguacaagaacgccgucaccgagcuccagcuccucaugcaguccacccccgccgccggcuccggcuccgccaucgccuccggcaucgccgucugcaagguccuccaccucgagggcgaggucaacaagaucaagaacgcccuccucuccaccaacaaggccgucgucucccucuccggcugcggcgucuccguccucaccuucaagguccucgaccucaagaacuacaucgacaagcagcuccuccccauccucaacaagcaguccugcuccaucuccaacaucgagaccgucaucgaguuccagcagaagaacaaccgccuccucgagaucacccgcgaguucuccgucaacgccggcgucaccacccccgucuccaccuacaugcucaccaacuccgagcuccucucccucaucaacgacaugcccaucaccaacgaccagaagaagcucauguccaacaacguccagaucguccgccagcaguccuacuccaucaugugcaucaucaaggaggagguccucgccuacgucguccagcucccccucuacggcgucaucgacacccccugcuggaagcuccacaccuccccccucugcaccaccaacaccaaggagggcuccaacaucugccucacccgcaccgaccgcggcugguacugcgacaacgccggcuccgucuccuucuucccccaggccgagaccugcaagguccaguccaaccgcgucuucugcgacaccaugaacucccgcacccuccccuccgaggucaaccucugcaacaucgacaucuucaaccccaaguacgacugcaagaucaugaccuccaagaccgacgucuccuccuccgucaucaccucccucggcgccaucgucuccugcuacggcaagaccaagugcaccgccuccaacaagugccgcggcaucaucaagaccuucuccaacggcugcgacuacgucuccaacaagggcgucgacaccgucuccgucggcaacacccucuacuacgucaacaagcaggagggcaagucccucuacgucaagggcgagcccaucaucaacuucuacgacccccucgucuuccccuccgacgaguucgacgccuccaucucccaggucaacgagaagaucaaccagucccucgccuucauccgcaaguccgacgagcuccuccacaacgucaacgucggcaaguccaccaccaacaucaugaucaccaccaucaucaucgucaucaucgucauccuccuccuccucaucgccgucggccucuuccucuacugcaaggcccgcugaggacuaguacuggcugcaucucccuuuccucuguccuccauccuucucccaggauggugaagggggaccugguacccagugauccccaccccaggauccuaaaucaugacuuaccugcuaauaaaaacucauuggaaaagugagaagaucuaaaaaaaaaaaaaaaaaaaaaaaaaaaaaaaaaaaaaaaaaaaaaaaaaaaaaaaaaaaaaaaaugcaucccccccccccccccccccccccccccccccaaaggcucuuuucagagccaccagaauu

SEQ ID NO: 17593 - RNA, 2001 nt, Artificial Sequence
  mRNA product Design h-5 comprising derived and/or modified sequence from HRSV(Memphis-37)__AIY60640.1__F-del_DSCav1_mut5 (opt3)
gggagagggcgcuuggcuugcaaggacccugagcugcggcauugaagcacacccaacccaacucgacugaagucagccucacugaaccggaucugagaaucuucucucucugggcuugccagggcucuccgaaccuagcuagcauccucuucaauuccaacuagaaagcuuaccauggagcugcccauccucaagaccaacgccauuacaacuauacuugcugcagugacgcugugcuucgccagcucccagaauaucaccgaagaguuuuaccaaucuacauguucagcggucaguaaaggcuauuugagcgcuuuaagaacugggugguacaccuccguuauuacaaucgaacugucuaacauuaaggagaauaaaugcaacggaaccgacgccaaggugaaacuaaucaagcaggaacucgauaaguauaaaaaugcaguaacugagcugcagcuucugaugcagucgaccccugccgcugguucaggcagcgcaauagccagugggaucgcuguguguaaggucuugcaccucgagggagaagugaacaaaauuaagaaugcccugcuguccacaaacaaagcgguugugucucucagcggcugcggugucuccguguuaacguucaagguacuggaccuuaagaauuacaucgauaaacaauugcugccaauucuaaacaagcagucauguaguaucagcaauauagagacuguuauugaauuucagcagaaaaacaauaggcuccuggagaucacccgggaguucucugugaacgcaggggucacaacuccgguguccaccuauaugcuuacaaauucagaacuguugagccucauuaacgacaugcccaucaccaacgaucaaaagaaacugaugaguaauaacgugcagaucguccgccagcagucuuacuccauuaugugcauaaucaaggaggaaguuuuagccuaugugguacaacugccucucuacggagugauugacacgccauguuggaaacuucauacuagcccccugugcacaaccaauacuaaggagggcucgaacaucuguuugacacgaaccgaucguggcugguacugcgacaaugcugggucugucuccuuuuucccucaggccgaaacguguaaggugcagucaaacagaguguuuugcgauaccaugaauaguagaacacugccaagcgaggugaaccucugcaauauagacauuuucaaccccaaauaugauuguaagaucaugacuuccaaaaccgacgucucuagcucagugaucacaagucugggagcaauuguauccugcuacgguaagacuaaauguaccgcuagcaauaagugcaggggcaucauuaagacauuuucuaacgggugugauuauguuucaaauaaaggaguggacaccgucagugugggcaacacucuuuacuaugucaauaagcaagaggguaaaagccuguacgugaagggggaaccuauaaucaacuucuaugacccauugguuuuuccguccgaugaguucgacgccucuauuucgcagguuaacgagaaaaucaaucagagccucgcguuuauccggaaguccgaugaacuguuacacaacguaaaugucggaaagucaacgacaaacauuaugauaaccacuaucauuaucgugauuaucguuauacugcuacuccugaucgccgugggccuuuucuuguacugcaaagcacgcugaggacuaguacuggcugcaucucccuuuccucuguccuccauccuucucccaggauggugaagggggaccugguacccagugauccccaccccaggauccuaaaucaugacuuaccugcuaauaaaaacucauuggaaaagugagaagaucuaaaaaaaaaaaaaaaaaaaaaaaaaaaaaaaaaaaaaaaaaaaaaaaaaaaaaaaaaaaaaaaaugcaucccccccccccccccccccccccccccccccaaaggcucuuuucagagccaccagaauu

SEQ ID NO: 17594 - RNA, 2001 nt, Artificial Sequence
  mRNA product Design h-5 comprising derived and/or modified sequence from HRSV(Memphis-37)__AIY60640.1__F-del_DSCav1_mut5 (opt4)
gggagagggcgcuuggcuugcaaggacccugagcugcggcauugaagcacacccaacccaacucgacugaagucagccucacugaaccggaucugagaaucuucucucucugggcuugccagggcucuccgaaccuagcuagcauccucuucaauuccaacuagaaagcuuaccauggagcugcccauccugaagaccaacgccaucaccaccauccuggccgccgugacccugugcuucgccagcagccagaacaucaccgaggaguucuaccagagcaccugcagcgccgugagcaagggcuaccugagcgcccugagaaccggcugguacaccagcgugaucaccaucgagcugagcaacaucaaggagaacaagugcaacggcaccgacgccaaggugaagcugaucaagcaggagcuggacaaguacaagaacgccgugaccgagcugcagcugcugaugcagagcacccccgccgccggcagcggcagcgccaucgccagcggcaucgccgugugcaaggugcugcaccuggagggcgaggugaacaagaucaagaacgcccugcugagcaccaacaaggccguggugagccugagcggcugcggcgugagcgugcugaccuucaaggugcuggaccugaagaacuacaucgacaagcagcugcugcccauccugaacaagcagagcugcagcaucagcaacaucgagaccgugaucgaguuccagcagaagaacaacagacugcuggagaucaccagagaguucagcgugaacgccggcgugaccacccccgugagcaccuacaugcugaccaacagcgagcugcugagccugaucaacgacaugcccaucaccaacgaccagaagaagcugaugagcaacaacgugcagaucgugagacagcagagcuacagcaucaugugcaucaucaaggaggaggugcuggccuacguggugcagcugccccuguacggcgugaucgacacccccugcuggaagcugcacaccagcccccugugcaccaccaacaccaaggagggcagcaacaucugccugaccagaaccgacagaggcugguacugcgacaacgccggcagcgugagcuucuucccccaggccgagaccugcaaggugcagagcaacagaguguucugcgacaccaugaacagcagaacccugcccagcgaggugaaccugugcaacaucgacaucuucaaccccaaguacgacugcaagaucaugaccagcaagaccgacgugagcagcagcgugaucaccagccugggcgccaucgugagcugcuacggcaagaccaagugcaccgccagcaacaagugcagaggcaucaucaagaccuucagcaacggcugcgacuacgugagcaacaagggcguggacaccgugagcgugggcaacacccuguacuacgugaacaagcaggagggcaagagccuguacgugaagggcgagcccaucaucaacuucuacgacccccugguguuccccagcgacgaguucgacgccagcaucagccaggugaacgagaagaucaaccagagccuggccuucaucagaaagagcgacgagcugcugcacaacgugaacgugggcaagagcaccaccaacaucaugaucaccaccaucaucaucgugaucaucgugauccugcugcugcugaucgccgugggccuguuccuguacugcaaggccagaugaggacuaguacuggcugcaucucccuuuccucuguccuccauccuucucccaggauggugaagggggaccugguacccagugauccccaccccaggauccuaaaucaugacuuaccugcuaauaaaaacucauuggaaaagugagaagaucuaaaaaaaaaaaaaaaaaaaaaaaaaaaaaaaaaaaaaaaaaaaaaaaaaaaaaaaaaaaaaaaaugcaucccccccccccccccccccccccccccccccaaaggcucuuuucagagccaccagaauu

SEQ ID NO: 17595 - RNA, 2001 nt, Artificial Sequence
  mRNA product Design h-5 comprising derived and/or modified sequence from HRSV(Memphis-37)__AIY60640.1__F-del_DSCav1_mut5 (opt5)
gggagagggcgcuuggcuugcaaggacccugagcugcggcauugaagcacacccaacccaacucgacugaagucagccucacugaaccggaucugagaaucuucucucucugggcuugccagggcucuccgaaccuagcuagcauccucuucaauuccaacuagaaagcuuaccauggagcugcccauccucaagaccaacgccauuacaacgauccuggcugccgugacccuuugcuucgcgagcucccagaauauuacagaagaguuuuaccaaucuaccuguagcgcugucuccaaaggcuaucugucugcccucagaacagggugguacaccagcguuaucacaauugaacuguccaacaucaaggagaauaaaugcaacggaaccgacgccaaggugaaacuuaucaagcaggaacuggauaaguauaaaaaugcugugacggagcuccagcugcugaugcagucuaccccugccgcuggcagcggguccgccauugcgagcggaaucgccgucuguaaggugcuccaccuggagggcgaaguuaacaaaauuaagaaugcccuucugucuacaaacaaagcuguggucucccucagcgggugcggagugucuguucugaccuucaaggugcuugaccugaagaauuacaucgauaaacaacuccugccgauucugaacaagcaguccuguagcaucucuaauauugagacagucaucgaauuucagcagaaaaacaaucggcuccuggagaucacccgcgaguucuccgugaacgcuggcgugacgacacccgucagcaccuauaugcuuacaaauuccgaacugcucucucugauuaacgacaugccuaucaccaacgaucaaaagaaacuuaugagcaauaacguucagauugugagacagcaguccuacagcaucaugugcauuaucaaggaggaagugcuggccuaugucgugcaacucccccuguacggcguuaucgacaccccuuguuggaaacugcauacaucuccccucugcacgaccaauacaaaggagggguccaacauuugucugacccggacagaucgcggaugguacugcgacaaugcgggcagcgugagcuuuuucccucaggccgaaaccuguaagguccagucuaacagaguguuuugcgauacgaugaacuccagaacacugccgucugagguuaaucucugcaauaucgacauuuucaaccccaaauaugauuguaagaucaugaccagcaaaaccgacguguccagcucugucauuacaucccugggggcuaucgugagcugcuacggaaagaccaaauguacagccucuaauaagugccggggcaucauuaagacguuuuccaacgggugugauuaugucagcaauaaaggaguggacaccguuuccgugggcaacacacuuuacuaugucaauaagcaagagggcaaaucucuguacgugaagggggaaccuaucauuaacuucuaugacccccucguuuuuccuagcgaugaguucgacgcuuccaucucucaggugaacgagaaaauuaaucagagccuggccuuuauccgcaaguccgaugaacugcuccacaacgucaaugugggaaagagcaccacaaacauuaugaucaccacgaucauuaucgugauuaucguuauucugcuucugcucaucgccgucggccuguuccuguacugcaaagcuagaugaggacuaguacuggcugcaucucccuuuccucuguccuccauccuucucccaggauggugaagggggaccugguacccagugauccccaccccaggauccuaaaucaugacuuaccugcuaauaaaaacucauuggaaaagugagaagaucuaaaaaaaaaaaaaaaaaaaaaaaaaaaaaaaaaaaaaaaaaaaaaaaaaaaaaaaaaaaaaaaaugcaucccccccccccccccccccccccccccccccaaaggcucuuuucagagccaccagaauu

SEQ ID NO: 17596 - RNA, 2001 nt, Artificial Sequence
  mRNA product Design h-5 comprising derived and/or modified sequence from HRSV(Memphis-37)__AIY60640.1__F-del_DSCav1_mut5 (opt6)
gggagagggcgcuuggcuugcaaggacccugagcugcggcauugaagcacacccaacccaacucgacugaagucagccucacugaaccggaucugagaaucuucucucucugggcuugccagggcucuccgaaccuagcuagcauccucuucaauuccaacuagaaagcuuaccauggaauuacccaucuuaaaaacaaaugcaauaacaacaauacuagcagccguaacauuaugcuucgccucaagccaaaacauaacagaagaauuuuaccaaagcacauguuccgccguaucaaaaggauaucucucagcacuacguacuggaugguauacauccguaaucacaauugaacuaucaaacauuaaagaaaacaaaugcaauggaacagaugcgaaaguaaaacuaauaaaacaagaauuagauaaauauaaaaaugcaguaaccgaacuacaacuacuaaugcaaucaacucccgcugccgguagcggauccgccauagcaagcggaauugcuguauguaaaguccuacaucuugaaggcgaagucaacaaaaucaaaaaugcauuacucucgaccaacaaagcagucguaucacuaucaggaugcggagucucaguauuaacuuuuaaaguccuugaccuaaaaaacuacauagacaaacaacuacuaccaauucuaaauaaacaaaguugcagcauauccaauaucgaaacaguuauagaauuucaacaaaaaaacaaccgccuacuagaaaucacuagagaauuuucaguaaaugcaggcguaaccacaccagucucuaccuauaugcuuaccaacucugaauuauuaucacuuauaaacgacaugcccauaacaaaugaucaaaaaaaacuaaugagcaacaacguacaaauaguaagacaacaaagcuacagcauuauguguauaauaaaagaagaaguguuagcuuauguaguccaacuaccccucuauggcguuaucgauacaccaugcuggaaauuacacacaagcccucuaugcacaacuaacaccaaagaaggcucuaacauaugcuuaacaagaacagauagaggaugguauugcgauaacgcaggaucaguaucauucuuuccacaagcagaaacauguaaaguacaaucuaaccgaguauucugcgacacaaugaacucuagaacacuacccucagaaguuaaucucuguaauauugacauuuucaauccaaaauacgauugcaaaauaaugaccucuaaaaccgacguaucauccucaguuauaacguccuuaggagcaaucguaagcugcuauggcaaaacaaaauguaccgcaucaaacaaaugcagaggaauaauaaaaacauucucaaacggcugugacuacguaagcaauaaagguguugacacaguuucaguaggaaauacacuauacuauguaaauaaacaagaaggaaaaucucucuauguaaaaggagaacccauaauaaacuucuacgacccacucguauuuccaagcgaugaauuugaugcgagcauuucccagguaaaugaaaaaauaaaucaaucacuagcauucaucagaaaaagugaugaauuacuacacaauguuaacguaggaaaaucaacaacaaauaucaugauaacaacaaucauaauagucauaaucguaauauuacuauuacuaauagcaguagguuuauuucuauacuguaaagcaagguaaggacuaguacuggcugcaucucccuuuccucuguccuccauccuucucccaggauggugaagggggaccugguacccagugauccccaccccaggauccuaaaucaugacuuaccugcuaauaaaaacucauuggaaaagugagaagaucuaaaaaaaaaaaaaaaaaaaaaaaaaaaaaaaaaaaaaaaaaaaaaaaaaaaaaaaaaaaaaaaaugcaucccccccccccccccccccccccccccccccaaaggcucuuuucagagccaccagaauu

SEQ ID NO: 17597 - RNA, 2001 nt, Artificial Sequence
  mRNA product Design h-5 comprising derived and/or modified sequence from HRSV(Memphis-37)__AIY60640.1__F-del_DSCav1_mut5 (opt11)
gggagagggcgcuuggcuugcaaggacccugagcugcggcauugaagcacacccaacccaacucgacugaagucagccucacugaaccggaucugagaaucuucucucucugggcuugccagggcucuccgaaccuagcuagcauccucuucaauuccaacuagaaagcuuaccauggaacuucccauccuaaaaaccaacgccauaacaacaauccucgcagcagucacccucugcuucgccucuucacaaaacaucaccgaagaauuuuaccaaucaaccugcuccgccguguccaaaggcuaccucucagcacugcgcacaggaugguauaccagcguaaucaccaucgaacucuccaacaucaaggaaaacaaaugcaacggcaccgaugccaaagucaaacucaucaagcaagaacuugacaaauacaaaaacgccgugaccgagcuacaacuccucaugcaguccacuccagccgccggcuccggcagcgccaucgccuccggcaucgccguaugcaaaguccuccaccucgaaggcgaaguaaacaaaaucaagaacgcacuccuaagcaccaacaaagccgucgucucacucuccgguugcggcgucagcguccuaacauucaaaguucucgaccucaaaaacuacauagacaaacaacuccuccccauccucaacaaacaauccugcuccauaucaaacaucgaaaccguuaucgaauuucaacaaaaaaacaaccgccuccuagaaaucacccgcgaauuuuccgucaacgcaggcgucaccacccccguuuccaccuauaugcucaccaacuccgaacuccucucccucaucaacgacaugcccauuaccaacgaccaaaagaaacuuaugagcaacaacguucaaaucguccgacaacaaucauacuccaucaugugcauuaucaaagaagaaguacucgccuacguaguacaauuaccccucuacggcguaaucgacaccccaugcuggaaacuacacaccuccccccucuguaccaccaacaccaaagaaggcucuaacaucugccucacccgcacagaccguggcugguauugcgauaacgcagggucugucuccuucuucccccaagccgaaacaugcaaaguccaauccaacagagucuucugcgacaccaugaacucgagaacccuccccuccgaagucaaccuaugcaacaucgacaucuucaacccaaaauacgacugcaaaaucaugacuucaaaaacagacgugagcucguccgucaucacaagccuaggagcuaucguauccugcuacggaaaaacaaaaugcacugcuuccaacaaaugccgcggaaucauaaaaaccuucuccaacggcugcgacuacgucagcaacaaaggcgucgacacagucuccguaggcaacacccuauacuacgucaauaaacaagaaggcaagucccuauaugucaaaggcgagcccaucaucaauuucuaugauccccucguuuucccauccgacgaauuugacgcauccaucucccaagucaacgaaaaaauaaaccaaagccucgcauucauccgcaaauccgacgaacuccuccacaacguaaacguaggaaaauccacaacuaacaucaugaucaccaccaucaucaucgucauuaucgucauccuacuccuccucauagcagucggccucuuccucuacugcaaagcacgcuagggacuaguacuggcugcaucucccuuuccucuguccuccauccuucucccaggauggugaagggggaccugguacccagugauccccaccccaggauccuaaaucaugacuuaccugcuaauaaaaacucauuggaaaagugagaagaucuaaaaaaaaaaaaaaaaaaaaaaaaaaaaaaaaaaaaaaaaaaaaaaaaaaaaaaaaaaaaaaaaugcaucccccccccccccccccccccccccccccccaaaggcucuuuucagagccaccagaauu

SEQ ID NO: 17598 - RNA, 1934 nt, Artificial Sequence
  mRNA product Design i-1 comprising derived and/or modified sequence from HRSV(Memphis-37)__AIY60640.1__F-del_DSCav1_mut5 (opt1)
gggagagggcgcuuggcuugcaaggacccugagcugcggcauugaagcacacccaacccaacucgacugaagucagccucacugaaccggaucugagaaucuucucucucugggcuugccagggcucuccgaaccuagcuagcauccucuucaauuccaacuagaaagcuuaccauggagcugcccauccucaagaccaacgccaucaccacgauccuggccgcggugacccugugcuucgccagcucccagaacaucaccgaggaguucuaccagagcacgugcuccgccgucagcaagggcuaccucuccgcccugcgcaccgggugguacaccagcgugaucaccaucgagcuguccaacaucaaggagaacaagugcaacggcaccgacgccaaggugaagcucaucaagcaggagcuggacaaguacaagaacgcggucacggagcugcagcuccugaugcagagcaccccggccgccggcuccgggagcgcgaucgccuccggcaucgccgucugcaaggugcugcaccucgagggcgaggugaacaagaucaagaacgcccugcuguccaccaacaaggccgucgugagccucuccggcugcggggugagcguccugaccuucaaggugcuggaccucaagaacuacaucgacaagcagcugcugcccauccugaacaagcagagcugcuccaucagcaacaucgagaccgucaucgaguuccagcagaagaacaaccgccuccuggagaucacgcgggaguucagcgugaacgcgggcgugaccacccccgucuccaccuacaugcugacgaacagcgagcuccugucccugaucaacgacaugccgaucaccaacgaccagaagaagcucaugagcaacaacgugcagaucgugcgccagcaguccuacagcaucaugugcaucaucaaggaggagguccuggccuacguggugcagcugccccucuacggggucaucgacacccccugcuggaagcugcacaccagcccccugugcacgaccaacaccaaggagggcuccaacaucugccucacccggacggaccgcgggugguacugcgacaacgccggcagcguguccuucuucccgcaggccgagaccugcaagguccagagcaaccggguguucugcgacaccaugaacucccggacccugcccagcgaggugaaccucugcaacaucgacaucuucaaccccaaguacgacugcaagaucaugacguccaagaccgacgucagcuccagcgugaucaccucccugggcgccaucgugagcugcuacgggaagaccaagugcacggcgagcaacaagugccgcggcaucaucaagaccuucuccaacgggugcgacuacgucagcaacaagggcguggacaccguguccgucggcaacacccuguacuacgugaacaagcaggagggcaagagccucuacgugaagggggagcccaucaucaacuucuacgacccgcuggucuuccccuccgacgaguucgacgccagcaucucccaggugaacgagaagaucaaccagagccuggccuucauccggaaguccgacgagcuccugcacaacgugaacgucggcaagagcaccacgaacaucaugaucaccaccaucaucaucgugaucaucgugauccugcugcuccugaucgccgucgggcuguuccucuacugcaaggcccgcugaggacuaguguccaccugucccuccugggcugcuggauugucucguuuuccugccaaauaaacaggaucagcgcuuuacagaucuaaaaaaaaaaaaaaaaaaaaaaaaaaaaaaaaaaaaaaaaaaaaaaaaaaaaaaaaaaaaaaaaugcaucccccccccccccccccccccccccccccccaaaggcucuuuucagagccaccagaauu

SEQ ID NO: 17599 - RNA, 1934 nt, Artificial Sequence
  mRNA product Design i-1 comprising derived and/or modified sequence from HRSV(Memphis-37)__AIY60640.1__F-del_DSCav1_mut5 (opt1)
gggagagggcgcuuggcuugcaaggacccugagcugcggcauugaagcacacccaacccaacucgacugaagucagccucacugaaccggaucugagaaucuucucucucugggcuugccagggcucuccgaaccuagcuagcauccucuucaauuccaacuagaaagcuuaccauggagcugcccauccucaagaccaacgccaucaccacgauccuggccgcggugacccugugcuucgccagcucccagaacaucaccgaggaguucuaccagagcacgugcuccgccgucagcaagggcuaccucuccgcccugcgcaccgggugguacaccagcgugaucaccaucgagcuguccaacaucaaggagaacaagugcaacggcaccgacgccaaggugaagcucaucaagcaggagcuggacaaguacaagaacgcggucacggagcugcagcuccugaugcagagcaccccggccgccggguccggcagcgccaucgcguccgggaucgccgugugcaaggugcugcaccucgagggcgaggucaacaagaucaagaacgcccugcugagcaccaacaaggccguggugucccucagcggcugcggggucuccgugcugaccuucaaggugcuggaccucaagaacuacaucgacaagcagcugcugcccauccucaacaagcagagcugcuccaucagcaacaucgagacggucaucgaguuccagcagaagaacaaccggcugcuggagaucacccgcgaguucuccgugaacgccggcgugaccacccccgucagcacguacaugcucaccaacagcgagcugcugucccucaucaacgacaugcccaucaccaacgaccagaagaagcugaugagcaacaacgugcagaucgugcggcagcaguccuacagcaucaugugcaucaucaaggaggagguccuggcguacguggugcagcucccgcuguacggggucaucgacacccccugcuggaagcugcacacgagcccccucugcaccaccaacaccaaggagggcuccaacaucugccugacgcgcaccgaccgggggugguacugcgacaacgccggcuccgugagcuucuucccccaggccgagaccugcaaggugcaguccaaccgcgucuucugcgacaccaugaacagccggacgcucccguccgaggugaaccugugcaacaucgacaucuucaaccccaaguacgacugcaagaucaugaccagcaagaccgacgucuccagcuccgugaucaccagccugggcgccaucguguccugcuacgggaagacgaagugcaccgccagcaacaagugccggggcaucaucaagaccuucuccaacgggugcgacuacgucagcaacaagggcguggacaccgugagcgucggcaacacgcucuacuacgugaacaagcaggaggggaagucccuguacgugaagggcgagcccaucaucaacuucuacgacccccuggucuucccgagcgacgaguucgacgcguccaucagccaggugaacgagaagaucaaccagucccucgccuucauccgcaagagcgacgagcugcugcacaacgugaacgucgggaaguccaccaccaacaucaugaucaccaccaucaucaucgugaucaucgugauccuccugcugcucaucgccgucggccuguuccuguacugcaaggcccggugaggacuaguguccaccugucccuccugggcugcuggauugucucguuuuccugccaaauaaacaggaucagcgcuuuacagaucuaaaaaaaaaaaaaaaaaaaaaaaaaaaaaaaaaaaaaaaaaaaaaaaaaaaaaaaaaaaaaaaaugcaucccccccccccccccccccccccccccccccaaaggcucuuuucagagccaccagaauu

SEQ ID NO: 17600 - RNA, 1934 nt, Artificial Sequence
  mRNA product Design i-1 comprising derived and/or modified sequence from HRSV(Memphis-37)__AIY60640.1__F-del_DSCav1_mut5 (opt2)
gggagagggcgcuuggcuugcaaggacccugagcugcggcauugaagcacacccaacccaacucgacugaagucagccucacugaaccggaucugagaaucuucucucucugggcuugccagggcucuccgaaccuagcuagcauccucuucaauuccaacuagaaagcuuaccauggagcuccccauccucaagaccaacgccaucaccaccauccucgccgccgucacccucugcuucgccuccucccagaacaucaccgaggaguucuaccaguccaccugcuccgccgucuccaagggcuaccucuccgcccuccgcaccggcugguacaccuccgucaucaccaucgagcucuccaacaucaaggagaacaagugcaacggcaccgacgccaaggucaagcucaucaagcaggagcucgacaaguacaagaacgccgucaccgagcuccagcuccucaugcaguccacccccgccgccggcuccggcuccgccaucgccuccggcaucgccgucugcaagguccuccaccucgagggcgaggucaacaagaucaagaacgcccuccucuccaccaacaaggccgucgucucccucuccggcugcggcgucuccguccucaccuucaagguccucgaccucaagaacuacaucgacaagcagcuccuccccauccucaacaagcaguccugcuccaucuccaacaucgagaccgucaucgaguuccagcagaagaacaaccgccuccucgagaucacccgcgaguucuccgucaacgccggcgucaccacccccgucuccaccuacaugcucaccaacuccgagcuccucucccucaucaacgacaugcccaucaccaacgaccagaagaagcucauguccaacaacguccagaucguccgccagcaguccuacuccaucaugugcaucaucaaggaggagguccucgccuacgucguccagcucccccucuacggcgucaucgacacccccugcuggaagcuccacaccuccccccucugcaccaccaacaccaaggagggcuccaacaucugccucacccgcaccgaccgcggcugguacugcgacaacgccggcuccgucuccuucuucccccaggccgagaccugcaagguccaguccaaccgcgucuucugcgacaccaugaacucccgcacccuccccuccgaggucaaccucugcaacaucgacaucuucaaccccaaguacgacugcaagaucaugaccuccaagaccgacgucuccuccuccgucaucaccucccucggcgccaucgucuccugcuacggcaagaccaagugcaccgccuccaacaagugccgcggcaucaucaagaccuucuccaacggcugcgacuacgucuccaacaagggcgucgacaccgucuccgucggcaacacccucuacuacgucaacaagcaggagggcaagucccucuacgucaagggcgagcccaucaucaacuucuacgacccccucgucuuccccuccgacgaguucgacgccuccaucucccaggucaacgagaagaucaaccagucccucgccuucauccgcaaguccgacgagcuccuccacaacgucaacgucggcaaguccaccaccaacaucaugaucaccaccaucaucaucgucaucaucgucauccuccuccuccucaucgccgucggccucuuccucuacugcaaggcccgcugaggacuaguguccaccugucccuccugggcugcuggauugucucguuuuccugccaaauaaacaggaucagcgcuuuacagaucuaaaaaaaaaaaaaaaaaaaaaaaaaaaaaaaaaaaaaaaaaaaaaaaaaaaaaaaaaaaaaaaaugcaucccccccccccccccccccccccccccccccaaaggcucuuuucagagccaccagaauu

SEQ ID NO: 17601 - RNA, 1934 nt, Artificial Sequence
  mRNA product Design i-1 comprising derived and/or modified sequence from HRSV(Memphis-37)__AIY60640.1__F-del_DSCav1_mut5 (opt3)
gggagagggcgcuuggcuugcaaggacccugagcugcggcauugaagcacacccaacccaacucgacugaagucagccucacugaaccggaucugagaaucuucucucucugggcuugccagggcucuccgaaccuagcuagcauccucuucaauuccaacuagaaagcuuaccauggagcugcccauccucaagaccaacgccauuacaacuauacuugcugcagugacgcugugcuucgccagcucccagaauaucaccgaagaguuuuaccaaucuacauguucagcggucaguaaaggcuauuugagcgcuuuaagaacugggugguacaccuccguuauuacaaucgaacugucuaacauuaaggagaauaaaugcaacggaaccgacgccaaggugaaacuaaucaagcaggaacucgauaaguauaaaaaugcaguaacugagcugcagcuucugaugcagucgaccccugccgcugguucaggcagcgcaauagccagugggaucgcuguguguaaggucuugcaccucgagggagaagugaacaaaauuaagaaugcccugcuguccacaaacaaagcgguugugucucucagcggcugcggugucuccguguuaacguucaagguacuggaccuuaagaauuacaucgauaaacaauugcugccaauucuaaacaagcagucauguaguaucagcaauauagagacuguuauugaauuucagcagaaaaacaauaggcuccuggagaucacccgggaguucucugugaacgcaggggucacaacuccgguguccaccuauaugcuuacaaauucagaacuguugagccucauuaacgacaugcccaucaccaacgaucaaaagaaacugaugaguaauaacgugcagaucguccgccagcagucuuacuccauuaugugcauaaucaaggaggaaguuuuagccuaugugguacaacugccucucuacggagugauugacacgccauguuggaaacuucauacuagcccccugugcacaaccaauacuaaggagggcucgaacaucuguuugacacgaaccgaucguggcugguacugcgacaaugcugggucugucuccuuuuucccucaggccgaaacguguaaggugcagucaaacagaguguuuugcgauaccaugaauaguagaacacugccaagcgaggugaaccucugcaauauagacauuuucaaccccaaauaugauuguaagaucaugacuuccaaaaccgacgucucuagcucagugaucacaagucugggagcaauuguauccugcuacgguaagacuaaauguaccgcuagcaauaagugcaggggcaucauuaagacauuuucuaacgggugugauuauguuucaaauaaaggaguggacaccgucagugugggcaacacucuuuacuaugucaauaagcaagaggguaaaagccuguacgugaagggggaaccuauaaucaacuucuaugacccauugguuuuuccguccgaugaguucgacgccucuauuucgcagguuaacgagaaaaucaaucagagccucgcguuuauccggaaguccgaugaacuguuacacaacguaaaugucggaaagucaacgacaaacauuaugauaaccacuaucauuaucgugauuaucguuauacugcuacuccugaucgccgugggccuuuucuuguacugcaaagcacgcugaggacuaguguccaccugucccuccugggcugcuggauugucucguuuuccugccaaauaaacaggaucagcgcuuuacagaucuaaaaaaaaaaaaaaaaaaaaaaaaaaaaaaaaaaaaaaaaaaaaaaaaaaaaaaaaaaaaaaaaugcaucccccccccccccccccccccccccccccccaaaggcucuuuucagagccaccagaauu

SEQ ID NO: 17602 - RNA, 1934 nt, Artificial Sequence
  mRNA product Design i-1 comprising derived and/or modified sequence from HRSV(Memphis-37)__AIY60640.1__F-del_DSCav1_mut5 (opt4)
gggagagggcgcuuggcuugcaaggacccugagcugcggcauugaagcacacccaacccaacucgacugaagucagccucacugaaccggaucugagaaucuucucucucugggcuugccagggcucuccgaaccuagcuagcauccucuucaauuccaacuagaaagcuuaccauggagcugcccauccugaagaccaacgccaucaccaccauccuggccgccgugacccugugcuucgccagcagccagaacaucaccgaggaguucuaccagagcaccugcagcgccgugagcaagggcuaccugagcgcccugagaaccggcugguacaccagcgugaucaccaucgagcugagcaacaucaaggagaacaagugcaacggcaccgacgccaaggugaagcugaucaagcaggagcuggacaaguacaagaacgccgugaccgagcugcagcugcugaugcagagcacccccgccgccggcagcggcagcgccaucgccagcggcaucgccgugugcaaggugcugcaccuggagggcgaggugaacaagaucaagaacgcccugcugagcaccaacaaggccguggugagccugagcggcugcggcgugagcgugcugaccuucaaggugcuggaccugaagaacuacaucgacaagcagcugcugcccauccugaacaagcagagcugcagcaucagcaacaucgagaccgugaucgaguuccagcagaagaacaacagacugcuggagaucaccagagaguucagcgugaacgccggcgugaccacccccgugagcaccuacaugcugaccaacagcgagcugcugagccugaucaacgacaugcccaucaccaacgaccagaagaagcugaugagcaacaacgugcagaucgugagacagcagagcuacagcaucaugugcaucaucaaggaggaggugcuggccuacguggugcagcugccccuguacggcgugaucgacacccccugcuggaagcugcacaccagcccccugugcaccaccaacaccaaggagggcagcaacaucugccugaccagaaccgacagaggcugguacugcgacaacgccggcagcgugagcuucuucccccaggccgagaccugcaaggugcagagcaacagaguguucugcgacaccaugaacagcagaacccugcccagcgaggugaaccugugcaacaucgacaucuucaaccccaaguacgacugcaagaucaugaccagcaagaccgacgugagcagcagcgugaucaccagccugggcgccaucgugagcugcuacggcaagaccaagugcaccgccagcaacaagugcagaggcaucaucaagaccuucagcaacggcugcgacuacgugagcaacaagggcguggacaccgugagcgugggcaacacccuguacuacgugaacaagcaggagggcaagagccuguacgugaagggcgagcccaucaucaacuucuacgacccccugguguuccccagcgacgaguucgacgccagcaucagccaggugaacgagaagaucaaccagagccuggccuucaucagaaagagcgacgagcugcugcacaacgugaacgugggcaagagcaccaccaacaucaugaucaccaccaucaucaucgugaucaucgugauccugcugcugcugaucgccgugggccuguuccuguacugcaaggccagaugaggacuaguguccaccugucccuccugggcugcuggauugucucguuuuccugccaaauaaacaggaucagcgcuuuacagaucuaaaaaaaaaaaaaaaaaaaaaaaaaaaaaaaaaaaaaaaaaaaaaaaaaaaaaaaaaaaaaaaaugcaucccccccccccccccccccccccccccccccaaaggcucuuuucagagccaccagaauu

SEQ ID NO: 17603 - RNA, 1934 nt, Artificial Sequence
  mRNA product Design i-1 comprising derived and/or modified sequence from HRSV(Memphis-37)__AIY60640.1__F-del_DSCav1_mut5 (opt5)
gggagagggcgcuuggcuugcaaggacccugagcugcggcauugaagcacacccaacccaacucgacugaagucagccucacugaaccggaucugagaaucuucucucucugggcuugccagggcucuccgaaccuagcuagcauccucuucaauuccaacuagaaagcuuaccauggagcugcccauccucaagaccaacgccauuacaacgauccuggcugccgugacccuuugcuucgcgagcucccagaauauuacagaagaguuuuaccaaucuaccuguagcgcugucuccaaaggcuaucugucugcccucagaacagggugguacaccagcguuaucacaauugaacuguccaacaucaaggagaauaaaugcaacggaaccgacgccaaggugaaacuuaucaagcaggaacuggauaaguauaaaaaugcugugacggagcuccagcugcugaugcagucuaccccugccgcuggcagcggguccgccauugcgagcggaaucgccgucuguaaggugcuccaccuggagggcgaaguuaacaaaauuaagaaugcccuucugucuacaaacaaagcuguggucucccucagcgggugcggagugucuguucugaccuucaaggugcuugaccugaagaauuacaucgauaaacaacuccugccgauucugaacaagcaguccuguagcaucucuaauauugagacagucaucgaauuucagcagaaaaacaaucggcuccuggagaucacccgcgaguucuccgugaacgcuggcgugacgacacccgucagcaccuauaugcuuacaaauuccgaacugcucucucugauuaacgacaugccuaucaccaacgaucaaaagaaacuuaugagcaauaacguucagauugugagacagcaguccuacagcaucaugugcauuaucaaggaggaagugcuggccuaugucgugcaacucccccuguacggcguuaucgacaccccuuguuggaaacugcauacaucuccccucugcacgaccaauacaaaggagggguccaacauuugucugacccggacagaucgcggaugguacugcgacaaugcgggcagcgugagcuuuuucccucaggccgaaaccuguaagguccagucuaacagaguguuuugcgauacgaugaacuccagaacacugccgucugagguuaaucucugcaauaucgacauuuucaaccccaaauaugauuguaagaucaugaccagcaaaaccgacguguccagcucugucauuacaucccugggggcuaucgugagcugcuacggaaagaccaaauguacagccucuaauaagugccggggcaucauuaagacguuuuccaacgggugugauuaugucagcaauaaaggaguggacaccguuuccgugggcaacacacuuuacuaugucaauaagcaagagggcaaaucucuguacgugaagggggaaccuaucauuaacuucuaugacccccucguuuuuccuagcgaugaguucgacgcuuccaucucucaggugaacgagaaaauuaaucagagccuggccuuuauccgcaaguccgaugaacugcuccacaacgucaaugugggaaagagcaccacaaacauuaugaucaccacgaucauuaucgugauuaucguuauucugcuucugcucaucgccgucggccuguuccuguacugcaaagcuagaugaggacuaguguccaccugucccuccugggcugcuggauugucucguuuuccugccaaauaaacaggaucagcgcuuuacagaucuaaaaaaaaaaaaaaaaaaaaaaaaaaaaaaaaaaaaaaaaaaaaaaaaaaaaaaaaaaaaaaaaugcaucccccccccccccccccccccccccccccccaaaggcucuuuucagagccaccagaauu

SEQ ID NO: 17604 - RNA, 1934 nt, Artificial Sequence
  mRNA product Design i-1 comprising derived and/or modified sequence from HRSV(Memphis-37)__AIY60640.1__F-del_DSCav1_mut5 (opt6)
gggagagggcgcuuggcuugcaaggacccugagcugcggcauugaagcacacccaacccaacucgacugaagucagccucacugaaccggaucugagaaucuucucucucugggcuugccagggcucuccgaaccuagcuagcauccucuucaauuccaacuagaaagcuuaccauggaauuacccaucuuaaaaacaaaugcaauaacaacaauacuagcagccguaacauuaugcuucgccucaagccaaaacauaacagaagaauuuuaccaaagcacauguuccgccguaucaaaaggauaucucucagcacuacguacuggaugguauacauccguaaucacaauugaacuaucaaacauuaaagaaaacaaaugcaauggaacagaugcgaaaguaaaacuaauaaaacaagaauuagauaaauauaaaaaugcaguaaccgaacuacaacuacuaaugcaaucaacucccgcugccgguagcggauccgccauagcaagcggaauugcuguauguaaaguccuacaucuugaaggcgaagucaacaaaaucaaaaaugcauuacucucgaccaacaaagcagucguaucacuaucaggaugcggagucucaguauuaacuuuuaaaguccuugaccuaaaaaacuacauagacaaacaacuacuaccaauucuaaauaaacaaaguugcagcauauccaauaucgaaacaguuauagaauuucaacaaaaaaacaaccgccuacuagaaaucacuagagaauuuucaguaaaugcaggcguaaccacaccagucucuaccuauaugcuuaccaacucugaauuauuaucacuuauaaacgacaugcccauaacaaaugaucaaaaaaaacuaaugagcaacaacguacaaauaguaagacaacaaagcuacagcauuauguguauaauaaaagaagaaguguuagcuuauguaguccaacuaccccucuauggcguuaucgauacaccaugcuggaaauuacacacaagcccucuaugcacaacuaacaccaaagaaggcucuaacauaugcuuaacaagaacagauagaggaugguauugcgauaacgcaggaucaguaucauucuuuccacaagcagaaacauguaaaguacaaucuaaccgaguauucugcgacacaaugaacucuagaacacuacccucagaaguuaaucucuguaauauugacauuuucaauccaaaauacgauugcaaaauaaugaccucuaaaaccgacguaucauccucaguuauaacguccuuaggagcaaucguaagcugcuauggcaaaacaaaauguaccgcaucaaacaaaugcagaggaauaauaaaaacauucucaaacggcugugacuacguaagcaauaaagguguugacacaguuucaguaggaaauacacuauacuauguaaauaaacaagaaggaaaaucucucuauguaaaaggagaacccauaauaaacuucuacgacccacucguauuuccaagcgaugaauuugaugcgagcauuucccagguaaaugaaaaaauaaaucaaucacuagcauucaucagaaaaagugaugaauuacuacacaauguuaacguaggaaaaucaacaacaaauaucaugauaacaacaaucauaauagucauaaucguaauauuacuauuacuaauagcaguagguuuauuucuauacuguaaagcaagguaaggacuaguguccaccugucccuccugggcugcuggauugucucguuuuccugccaaauaaacaggaucagcgcuuuacagaucuaaaaaaaaaaaaaaaaaaaaaaaaaaaaaaaaaaaaaaaaaaaaaaaaaaaaaaaaaaaaaaaaugcaucccccccccccccccccccccccccccccccaaaggcucuuuucagagccaccagaauu

SEQ ID NO: 17605 - RNA, 1934 nt, Artificial Sequence
  mRNA product Design i-1 comprising derived and/or modified sequence from HRSV(Memphis-37)__AIY60640.1__F-del_DSCav1_mut5 (opt11)
gggagagggcgcuuggcuugcaaggacccugagcugcggcauugaagcacacccaacccaacucgacugaagucagccucacugaaccggaucugagaaucuucucucucugggcuugccagggcucuccgaaccuagcuagcauccucuucaauuccaacuagaaagcuuaccauggaacuucccauccuaaaaaccaacgccauaacaacaauccucgcagcagucacccucugcuucgccucuucacaaaacaucaccgaagaauuuuaccaaucaaccugcuccgccguguccaaaggcuaccucucagcacugcgcacaggaugguauaccagcguaaucaccaucgaacucuccaacaucaaggaaaacaaaugcaacggcaccgaugccaaagucaaacucaucaagcaagaacuugacaaauacaaaaacgccgugaccgagcuacaacuccucaugcaguccacuccagccgccggcuccggcagcgccaucgccuccggcaucgccguaugcaaaguccuccaccucgaaggcgaaguaaacaaaaucaagaacgcacuccuaagcaccaacaaagccgucgucucacucuccgguugcggcgucagcguccuaacauucaaaguucucgaccucaaaaacuacauagacaaacaacuccuccccauccucaacaaacaauccugcuccauaucaaacaucgaaaccguuaucgaauuucaacaaaaaaacaaccgccuccuagaaaucacccgcgaauuuuccgucaacgcaggcgucaccacccccguuuccaccuauaugcucaccaacuccgaacuccucucccucaucaacgacaugcccauuaccaacgaccaaaagaaacuuaugagcaacaacguucaaaucguccgacaacaaucauacuccaucaugugcauuaucaaagaagaaguacucgccuacguaguacaauuaccccucuacggcguaaucgacaccccaugcuggaaacuacacaccuccccccucuguaccaccaacaccaaagaaggcucuaacaucugccucacccgcacagaccguggcugguauugcgauaacgcagggucugucuccuucuucccccaagccgaaacaugcaaaguccaauccaacagagucuucugcgacaccaugaacucgagaacccuccccuccgaagucaaccuaugcaacaucgacaucuucaacccaaaauacgacugcaaaaucaugacuucaaaaacagacgugagcucguccgucaucacaagccuaggagcuaucguauccugcuacggaaaaacaaaaugcacugcuuccaacaaaugccgcggaaucauaaaaaccuucuccaacggcugcgacuacgucagcaacaaaggcgucgacacagucuccguaggcaacacccuauacuacgucaauaaacaagaaggcaagucccuauaugucaaaggcgagcccaucaucaauuucuaugauccccucguuuucccauccgacgaauuugacgcauccaucucccaagucaacgaaaaaauaaaccaaagccucgcauucauccgcaaauccgacgaacuccuccacaacguaaacguaggaaaauccacaacuaacaucaugaucaccaccaucaucaucgucauuaucgucauccuacuccuccucauagcagucggccucuuccucuacugcaaagcacgcuagggacuaguguccaccugucccuccugggcugcuggauugucucguuuuccugccaaauaaacaggaucagcgcuuuacagaucuaaaaaaaaaaaaaaaaaaaaaaaaaaaaaaaaaaaaaaaaaaaaaaaaaaaaaaaaaaaaaaaaugcaucccccccccccccccccccccccccccccccaaaggcucuuuucagagccaccagaauu

SEQ ID NO: 17606 - RNA, 1934 nt, Artificial Sequence
  mRNA product Design i-2 comprising derived and/or modified sequence from HRSV(Memphis-37)__AIY60640.1__F-del_DSCav1_mut5 (opt1)
gggagaggcgcugccuacggagguggcagccaucuccuucucggcaucaagcuuaccauggagcugcccauccucaagaccaacgccaucaccacgauccuggccgcggugacccugugcuucgccagcucccagaacaucaccgaggaguucuaccagagcacgugcuccgccgucagcaagggcuaccucuccgcccugcgcaccgggugguacaccagcgugaucaccaucgagcuguccaacaucaaggagaacaagugcaacggcaccgacgccaaggugaagcucaucaagcaggagcuggacaaguacaagaacgcggucacggagcugcagcuccugaugcagagcaccccggccgccggcuccgggagcgcgaucgccuccggcaucgccgucugcaaggugcugcaccucgagggcgaggugaacaagaucaagaacgcccugcuguccaccaacaaggccgucgugagccucuccggcugcggggugagcguccugaccuucaaggugcuggaccucaagaacuacaucgacaagcagcugcugcccauccugaacaagcagagcugcuccaucagcaacaucgagaccgucaucgaguuccagcagaagaacaaccgccuccuggagaucacgcgggaguucagcgugaacgcgggcgugaccacccccgucuccaccuacaugcugacgaacagcgagcuccugucccugaucaacgacaugccgaucaccaacgaccagaagaagcucaugagcaacaacgugcagaucgugcgccagcaguccuacagcaucaugugcaucaucaaggaggagguccuggccuacguggugcagcugccccucuacggggucaucgacacccccugcuggaagcugcacaccagcccccugugcacgaccaacaccaaggagggcuccaacaucugccucacccggacggaccgcgggugguacugcgacaacgccggcagcguguccuucuucccgcaggccgagaccugcaagguccagagcaaccggguguucugcgacaccaugaacucccggacccugcccagcgaggugaaccucugcaacaucgacaucuucaaccccaaguacgacugcaagaucaugacguccaagaccgacgucagcuccagcgugaucaccucccugggcgccaucgugagcugcuacgggaagaccaagugcacggcgagcaacaagugccgcggcaucaucaagaccuucuccaacgggugcgacuacgucagcaacaagggcguggacaccguguccgucggcaacacccuguacuacgugaacaagcaggagggcaagagccucuacgugaagggggagcccaucaucaacuucuacgacccgcuggucuuccccuccgacgaguucgacgccagcaucucccaggugaacgagaagaucaaccagagccuggccuucauccggaaguccgacgagcuccugcacaacgugaacgucggcaagagcaccacgaacaucaugaucaccaccaucaucaucgugaucaucgugauccugcugcuccugaucgccgucgggcuguuccucuacugcaaggcccgcugaggacuagugcaucacauuuaaaagcaucucagccuaccaugagaauaagagaaagaaaaugaagaucaauagcuuauucaucucuuuuucuuuuucguugguguaaagccaacacccugucuaaaaaacauaaauuucuuuaaucauuuugccucuuuucucugugcuucaauuaauaaaaaauggaaagaaccuagaucuaaaaaaaaaaaaaaaaaaaaaaaaaaaaaaaaaaaaaaaaaaaaaaaaaaaaaaaaaaaaaaaaugcaucccccccccccccccccccccccccccccccaaaggcucuuuucagagccaccagaauu

SEQ ID NO: 17607 - RNA, 1934 nt, Artificial Sequence
  mRNA product Design i-2 comprising derived and/or modified sequence from HRSV(Memphis-37)__AIY60640.1__F-del_DSCav1_mut5 (opt1)
gggagaggcgcugccuacggagguggcagccaucuccuucucggcaucaagcuuaccauggagcugcccauccucaagaccaacgccaucaccacgauccuggccgcggugacccugugcuucgccagcucccagaacaucaccgaggaguucuaccagagcacgugcuccgccgucagcaagggcuaccucuccgcccugcgcaccgggugguacaccagcgugaucaccaucgagcuguccaacaucaaggagaacaagugcaacggcaccgacgccaaggugaagcucaucaagcaggagcuggacaaguacaagaacgcggucacggagcugcagcuccugaugcagagcaccccggccgccggguccggcagcgccaucgcguccgggaucgccgugugcaaggugcugcaccucgagggcgaggucaacaagaucaagaacgcccugcugagcaccaacaaggccguggugucccucagcggcugcggggucuccgugcugaccuucaaggugcuggaccucaagaacuacaucgacaagcagcugcugcccauccucaacaagcagagcugcuccaucagcaacaucgagacggucaucgaguuccagcagaagaacaaccggcugcuggagaucacccgcgaguucuccgugaacgccggcgugaccacccccgucagcacguacaugcucaccaacagcgagcugcugucccucaucaacgacaugcccaucaccaacgaccagaagaagcugaugagcaacaacgugcagaucgugcggcagcaguccuacagcaucaugugcaucaucaaggaggagguccuggcguacguggugcagcucccgcuguacggggucaucgacacccccugcuggaagcugcacacgagcccccucugcaccaccaacaccaaggagggcuccaacaucugccugacgcgcaccgaccgggggugguacugcgacaacgccggcuccgugagcuucuucccccaggccgagaccugcaaggugcaguccaaccgcgucuucugcgacaccaugaacagccggacgcucccguccgaggugaaccugugcaacaucgacaucuucaaccccaaguacgacugcaagaucaugaccagcaagaccgacgucuccagcuccgugaucaccagccugggcgccaucguguccugcuacgggaagacgaagugcaccgccagcaacaagugccggggcaucaucaagaccuucuccaacgggugcgacuacgucagcaacaagggcguggacaccgugagcgucggcaacacgcucuacuacgugaacaagcaggaggggaagucccuguacgugaagggcgagcccaucaucaacuucuacgacccccuggucuucccgagcgacgaguucgacgcguccaucagccaggugaacgagaagaucaaccagucccucgccuucauccgcaagagcgacgagcugcugcacaacgugaacgucgggaaguccaccaccaacaucaugaucaccaccaucaucaucgugaucaucgugauccuccugcugcucaucgccgucggccuguuccuguacugcaaggcccggugaggacuagugcaucacauuuaaaagcaucucagccuaccaugagaauaagagaaagaaaaugaagaucaauagcuuauucaucucuuuuucuuuuucguugguguaaagccaacacccugucuaaaaaacauaaauuucuuuaaucauuuugccucuuuucucugugcuucaauuaauaaaaaauggaaagaaccuagaucuaaaaaaaaaaaaaaaaaaaaaaaaaaaaaaaaaaaaaaaaaaaaaaaaaaaaaaaaaaaaaaaaugcaucccccccccccccccccccccccccccccccaaaggcucuuuucagagccaccagaauu

SEQ ID NO: 17608 - RNA, 1934 nt, Artificial Sequence
  mRNA product Design i-2 comprising derived and/or modified sequence from HRSV(Memphis-37)__AIY60640.1__F-del_DSCav1_mut5 (opt2)
gggagaggcgcugccuacggagguggcagccaucuccuucucggcaucaagcuuaccauggagcuccccauccucaagaccaacgccaucaccaccauccucgccgccgucacccucugcuucgccuccucccagaacaucaccgaggaguucuaccaguccaccugcuccgccgucuccaagggcuaccucuccgcccuccgcaccggcugguacaccuccgucaucaccaucgagcucuccaacaucaaggagaacaagugcaacggcaccgacgccaaggucaagcucaucaagcaggagcucgacaaguacaagaacgccgucaccgagcuccagcuccucaugcaguccacccccgccgccggcuccggcuccgccaucgccuccggcaucgccgucugcaagguccuccaccucgagggcgaggucaacaagaucaagaacgcccuccucuccaccaacaaggccgucgucucccucuccggcugcggcgucuccguccucaccuucaagguccucgaccucaagaacuacaucgacaagcagcuccuccccauccucaacaagcaguccugcuccaucuccaacaucgagaccgucaucgaguuccagcagaagaacaaccgccuccucgagaucacccgcgaguucuccgucaacgccggcgucaccacccccgucuccaccuacaugcucaccaacuccgagcuccucucccucaucaacgacaugcccaucaccaacgaccagaagaagcucauguccaacaacguccagaucguccgccagcaguccuacuccaucaugugcaucaucaaggaggagguccucgccuacgucguccagcucccccucuacggcgucaucgacacccccugcuggaagcuccacaccuccccccucugcaccaccaacaccaaggagggcuccaacaucugccucacccgcaccgaccgcggcugguacugcgacaacgccggcuccgucuccuucuucccccaggccgagaccugcaagguccaguccaaccgcgucuucugcgacaccaugaacucccgcacccuccccuccgaggucaaccucugcaacaucgacaucuucaaccccaaguacgacugcaagaucaugaccuccaagaccgacgucuccuccuccgucaucaccucccucggcgccaucgucuccugcuacggcaagaccaagugcaccgccuccaacaagugccgcggcaucaucaagaccuucuccaacggcugcgacuacgucuccaacaagggcgucgacaccgucuccgucggcaacacccucuacuacgucaacaagcaggagggcaagucccucuacgucaagggcgagcccaucaucaacuucuacgacccccucgucuuccccuccgacgaguucgacgccuccaucucccaggucaacgagaagaucaaccagucccucgccuucauccgcaaguccgacgagcuccuccacaacgucaacgucggcaaguccaccaccaacaucaugaucaccaccaucaucaucgucaucaucgucauccuccuccuccucaucgccgucggccucuuccucuacugcaaggcccgcugaggacuagugcaucacauuuaaaagcaucucagccuaccaugagaauaagagaaagaaaaugaagaucaauagcuuauucaucucuuuuucuuuuucguugguguaaagccaacacccugucuaaaaaacauaaauuucuuuaaucauuuugccucuuuucucugugcuucaauuaauaaaaaauggaaagaaccuagaucuaaaaaaaaaaaaaaaaaaaaaaaaaaaaaaaaaaaaaaaaaaaaaaaaaaaaaaaaaaaaaaaaugcaucccccccccccccccccccccccccccccccaaaggcucuuuucagagccaccagaauu

SEQ ID NO: 17609 - RNA, 1934 nt, Artificial Sequence
  mRNA product Design i-2 comprising derived and/or modified sequence from HRSV(Memphis-37)__AIY60640.1__F-del_DSCav1_mut5 (opt3)
gggagaggcgcugccuacggagguggcagccaucuccuucucggcaucaagcuuaccauggagcugcccauccucaagaccaacgccauuacaacuauacuugcugcagugacgcugugcuucgccagcucccagaauaucaccgaagaguuuuaccaaucuacauguucagcggucaguaaaggcuauuugagcgcuuuaagaacugggugguacaccuccguuauuacaaucgaacugucuaacauuaaggagaauaaaugcaacggaaccgacgccaaggugaaacuaaucaagcaggaacucgauaaguauaaaaaugcaguaacugagcugcagcuucugaugcagucgaccccugccgcugguucaggcagcgcaauagccagugggaucgcuguguguaaggucuugcaccucgagggagaagugaacaaaauuaagaaugcccugcuguccacaaacaaagcgguugugucucucagcggcugcggugucuccguguuaacguucaagguacuggaccuuaagaauuacaucgauaaacaauugcugccaauucuaaacaagcagucauguaguaucagcaauauagagacuguuauugaauuucagcagaaaaacaauaggcuccuggagaucacccgggaguucucugugaacgcaggggucacaacuccgguguccaccuauaugcuuacaaauucagaacuguugagccucauuaacgacaugcccaucaccaacgaucaaaagaaacugaugaguaauaacgugcagaucguccgccagcagucuuacuccauuaugugcauaaucaaggaggaaguuuuagccuaugugguacaacugccucucuacggagugauugacacgccauguuggaaacuucauacuagcccccugugcacaaccaauacuaaggagggcucgaacaucuguuugacacgaaccgaucguggcugguacugcgacaaugcugggucugucuccuuuuucccucaggccgaaacguguaaggugcagucaaacagaguguuuugcgauaccaugaauaguagaacacugccaagcgaggugaaccucugcaauauagacauuuucaaccccaaauaugauuguaagaucaugacuuccaaaaccgacgucucuagcucagugaucacaagucugggagcaauuguauccugcuacgguaagacuaaauguaccgcuagcaauaagugcaggggcaucauuaagacauuuucuaacgggugugauuauguuucaaauaaaggaguggacaccgucagugugggcaacacucuuuacuaugucaauaagcaagaggguaaaagccuguacgugaagggggaaccuauaaucaacuucuaugacccauugguuuuuccguccgaugaguucgacgccucuauuucgcagguuaacgagaaaaucaaucagagccucgcguuuauccggaaguccgaugaacuguuacacaacguaaaugucggaaagucaacgacaaacauuaugauaaccacuaucauuaucgugauuaucguuauacugcuacuccugaucgccgugggccuuuucuuguacugcaaagcacgcugaggacuagugcaucacauuuaaaagcaucucagccuaccaugagaauaagagaaagaaaaugaagaucaauagcuuauucaucucuuuuucuuuuucguugguguaaagccaacacccugucuaaaaaacauaaauuucuuuaaucauuuugccucuuuucucugugcuucaauuaauaaaaaauggaaagaaccuagaucuaaaaaaaaaaaaaaaaaaaaaaaaaaaaaaaaaaaaaaaaaaaaaaaaaaaaaaaaaaaaaaaaugcaucccccccccccccccccccccccccccccccaaaggcucuuuucagagccaccagaauu

SEQ ID NO: 17610 - RNA, 1934 nt, Artificial Sequence
  mRNA product Design i-2 comprising derived and/or modified sequence from HRSV(Memphis-37)__AIY60640.1__F-del_DSCav1_mut5 (opt4)
gggagaggcgcugccuacggagguggcagccaucuccuucucggcaucaagcuuaccauggagcugcccauccugaagaccaacgccaucaccaccauccuggccgccgugacccugugcuucgccagcagccagaacaucaccgaggaguucuaccagagcaccugcagcgccgugagcaagggcuaccugagcgcccugagaaccggcugguacaccagcgugaucaccaucgagcugagcaacaucaaggagaacaagugcaacggcaccgacgccaaggugaagcugaucaagcaggagcuggacaaguacaagaacgccgugaccgagcugcagcugcugaugcagagcacccccgccgccggcagcggcagcgccaucgccagcggcaucgccgugugcaaggugcugcaccuggagggcgaggugaacaagaucaagaacgcccugcugagcaccaacaaggccguggugagccugagcggcugcggcgugagcgugcugaccuucaaggugcuggaccugaagaacuacaucgacaagcagcugcugcccauccugaacaagcagagcugcagcaucagcaacaucgagaccgugaucgaguuccagcagaagaacaacagacugcuggagaucaccagagaguucagcgugaacgccggcgugaccacccccgugagcaccuacaugcugaccaacagcgagcugcugagccugaucaacgacaugcccaucaccaacgaccagaagaagcugaugagcaacaacgugcagaucgugagacagcagagcuacagcaucaugugcaucaucaaggaggaggugcuggccuacguggugcagcugccccuguacggcgugaucgacacccccugcuggaagcugcacaccagcccccugugcaccaccaacaccaaggagggcagcaacaucugccugaccagaaccgacagaggcugguacugcgacaacgccggcagcgugagcuucuucccccaggccgagaccugcaaggugcagagcaacagaguguucugcgacaccaugaacagcagaacccugcccagcgaggugaaccugugcaacaucgacaucuucaaccccaaguacgacugcaagaucaugaccagcaagaccgacgugagcagcagcgugaucaccagccugggcgccaucgugagcugcuacggcaagaccaagugcaccgccagcaacaagugcagaggcaucaucaagaccuucagcaacggcugcgacuacgugagcaacaagggcguggacaccgugagcgugggcaacacccuguacuacgugaacaagcaggagggcaagagccuguacgugaagggcgagcccaucaucaacuucuacgacccccugguguuccccagcgacgaguucgacgccagcaucagccaggugaacgagaagaucaaccagagccuggccuucaucagaaagagcgacgagcugcugcacaacgugaacgugggcaagagcaccaccaacaucaugaucaccaccaucaucaucgugaucaucgugauccugcugcugcugaucgccgugggccuguuccuguacugcaaggccagaugaggacuagugcaucacauuuaaaagcaucucagccuaccaugagaauaagagaaagaaaaugaagaucaauagcuuauucaucucuuuuucuuuuucguugguguaaagccaacacccugucuaaaaaacauaaauuucuuuaaucauuuugccucuuuucucugugcuucaauuaauaaaaaauggaaagaaccuagaucuaaaaaaaaaaaaaaaaaaaaaaaaaaaaaaaaaaaaaaaaaaaaaaaaaaaaaaaaaaaaaaaaugcaucccccccccccccccccccccccccccccccaaaggcucuuuucagagccaccagaauu

SEQ ID NO: 17611 - RNA, 1934 nt, Artificial Sequence
  mRNA product Design i-2 comprising derived and/or modified sequence from HRSV(Memphis-37)__AIY60640.1__F-del_DSCav1_mut5 (opt5)
gggagaggcgcugccuacggagguggcagccaucuccuucucggcaucaagcuuaccauggagcugcccauccucaagaccaacgccauuacaacgauccuggcugccgugacccuuugcuucgcgagcucccagaauauuacagaagaguuuuaccaaucuaccuguagcgcugucuccaaaggcuaucugucugcccucagaacagggugguacaccagcguuaucacaauugaacuguccaacaucaaggagaauaaaugcaacggaaccgacgccaaggugaaacuuaucaagcaggaacuggauaaguauaaaaaugcugugacggagcuccagcugcugaugcagucuaccccugccgcuggcagcggguccgccauugcgagcggaaucgccgucuguaaggugcuccaccuggagggcgaaguuaacaaaauuaagaaugcccuucugucuacaaacaaagcuguggucucccucagcgggugcggagugucuguucugaccuucaaggugcuugaccugaagaauuacaucgauaaacaacuccugccgauucugaacaagcaguccuguagcaucucuaauauugagacagucaucgaauuucagcagaaaaacaaucggcuccuggagaucacccgcgaguucuccgugaacgcuggcgugacgacacccgucagcaccuauaugcuuacaaauuccgaacugcucucucugauuaacgacaugccuaucaccaacgaucaaaagaaacuuaugagcaauaacguucagauugugagacagcaguccuacagcaucaugugcauuaucaaggaggaagugcuggccuaugucgugcaacucccccuguacggcguuaucgacaccccuuguuggaaacugcauacaucuccccucugcacgaccaauacaaaggagggguccaacauuugucugacccggacagaucgcggaugguacugcgacaaugcgggcagcgugagcuuuuucccucaggccgaaaccuguaagguccagucuaacagaguguuuugcgauacgaugaacuccagaacacugccgucugagguuaaucucugcaauaucgacauuuucaaccccaaauaugauuguaagaucaugaccagcaaaaccgacguguccagcucugucauuacaucccugggggcuaucgugagcugcuacggaaagaccaaauguacagccucuaauaagugccggggcaucauuaagacguuuuccaacgggugugauuaugucagcaauaaaggaguggacaccguuuccgugggcaacacacuuuacuaugucaauaagcaagagggcaaaucucuguacgugaagggggaaccuaucauuaacuucuaugacccccucguuuuuccuagcgaugaguucgacgcuuccaucucucaggugaacgagaaaauuaaucagagccuggccuuuauccgcaaguccgaugaacugcuccacaacgucaaugugggaaagagcaccacaaacauuaugaucaccacgaucauuaucgugauuaucguuauucugcuucugcucaucgccgucggccuguuccuguacugcaaagcuagaugaggacuagugcaucacauuuaaaagcaucucagccuaccaugagaauaagagaaagaaaaugaagaucaauagcuuauucaucucuuuuucuuuuucguugguguaaagccaacacccugucuaaaaaacauaaauuucuuuaaucauuuugccucuuuucucugugcuucaauuaauaaaaaauggaaagaaccuagaucuaaaaaaaaaaaaaaaaaaaaaaaaaaaaaaaaaaaaaaaaaaaaaaaaaaaaaaaaaaaaaaaaugcaucccccccccccccccccccccccccccccccaaaggcucuuuucagagccaccagaauu

SEQ ID NO: 17612 - RNA, 1934 nt, Artificial Sequence
  mRNA product Design i-2 comprising derived and/or modified sequence from HRSV(Memphis-37)__AIY60640.1__F-del_DSCav1_mut5 (opt6)
gggagaggcgcugccuacggagguggcagccaucuccuucucggcaucaagcuuaccauggaauuacccaucuuaaaaacaaaugcaauaacaacaauacuagcagccguaacauuaugcuucgccucaagccaaaacauaacagaagaauuuuaccaaagcacauguuccgccguaucaaaaggauaucucucagcacuacguacuggaugguauacauccguaaucacaauugaacuaucaaacauuaaagaaaacaaaugcaauggaacagaugcgaaaguaaaacuaauaaaacaagaauuagauaaauauaaaaaugcaguaaccgaacuacaacuacuaaugcaaucaacucccgcugccgguagcggauccgccauagcaagcggaauugcuguauguaaaguccuacaucuugaaggcgaagucaacaaaaucaaaaaugcauuacucucgaccaacaaagcagucguaucacuaucaggaugcggagucucaguauuaacuuuuaaaguccuugaccuaaaaaacuacauagacaaacaacuacuaccaauucuaaauaaacaaaguugcagcauauccaauaucgaaacaguuauagaauuucaacaaaaaaacaaccgccuacuagaaaucacuagagaauuuucaguaaaugcaggcguaaccacaccagucucuaccuauaugcuuaccaacucugaauuauuaucacuuauaaacgacaugcccauaacaaaugaucaaaaaaaacuaaugagcaacaacguacaaauaguaagacaacaaagcuacagcauuauguguauaauaaaagaagaaguguuagcuuauguaguccaacuaccccucuauggcguuaucgauacaccaugcuggaaauuacacacaagcccucuaugcacaacuaacaccaaagaaggcucuaacauaugcuuaacaagaacagauagaggaugguauugcgauaacgcaggaucaguaucauucuuuccacaagcagaaacauguaaaguacaaucuaaccgaguauucugcgacacaaugaacucuagaacacuacccucagaaguuaaucucuguaauauugacauuuucaauccaaaauacgauugcaaaauaaugaccucuaaaaccgacguaucauccucaguuauaacguccuuaggagcaaucguaagcugcuauggcaaaacaaaauguaccgcaucaaacaaaugcagaggaauaauaaaaacauucucaaacggcugugacuacguaagcaauaaagguguugacacaguuucaguaggaaauacacuauacuauguaaauaaacaagaaggaaaaucucucuauguaaaaggagaacccauaauaaacuucuacgacccacucguauuuccaagcgaugaauuugaugcgagcauuucccagguaaaugaaaaaauaaaucaaucacuagcauucaucagaaaaagugaugaauuacuacacaauguuaacguaggaaaaucaacaacaaauaucaugauaacaacaaucauaauagucauaaucguaauauuacuauuacuaauagcaguagguuuauuucuauacuguaaagcaagguaaggacuagugcaucacauuuaaaagcaucucagccuaccaugagaauaagagaaagaaaaugaagaucaauagcuuauucaucucuuuuucuuuuucguugguguaaagccaacacccugucuaaaaaacauaaauuucuuuaaucauuuugccucuuuucucugugcuucaauuaauaaaaaauggaaagaaccuagaucuaaaaaaaaaaaaaaaaaaaaaaaaaaaaaaaaaaaaaaaaaaaaaaaaaaaaaaaaaaaaaaaaugcaucccccccccccccccccccccccccccccccaaaggcucuuuucagagccaccagaauu

SEQ ID NO: 17613 - RNA, 1934 nt, Artificial Sequence
  mRNA product Design i-2 comprising derived and/or modified sequence from HRSV(Memphis-37)__AIY60640.1__F-del_DSCav1_mut5 (opt11)
gggagaggcgcugccuacggagguggcagccaucuccuucucggcaucaagcuuaccauggaacuucccauccuaaaaaccaacgccauaacaacaauccucgcagcagucacccucugcuucgccucuucacaaaacaucaccgaagaauuuuaccaaucaaccugcuccgccguguccaaaggcuaccucucagcacugcgcacaggaugguauaccagcguaaucaccaucgaacucuccaacaucaaggaaaacaaaugcaacggcaccgaugccaaagucaaacucaucaagcaagaacuugacaaauacaaaaacgccgugaccgagcuacaacuccucaugcaguccacuccagccgccggcuccggcagcgccaucgccuccggcaucgccguaugcaaaguccuccaccucgaaggcgaaguaaacaaaaucaagaacgcacuccuaagcaccaacaaagccgucgucucacucuccgguugcggcgucagcguccuaacauucaaaguucucgaccucaaaaacuacauagacaaacaacuccuccccauccucaacaaacaauccugcuccauaucaaacaucgaaaccguuaucgaauuucaacaaaaaaacaaccgccuccuagaaaucacccgcgaauuuuccgucaacgcaggcgucaccacccccguuuccaccuauaugcucaccaacuccgaacuccucucccucaucaacgacaugcccauuaccaacgaccaaaagaaacuuaugagcaacaacguucaaaucguccgacaacaaucauacuccaucaugugcauuaucaaagaagaaguacucgccuacguaguacaauuaccccucuacggcguaaucgacaccccaugcuggaaacuacacaccuccccccucuguaccaccaacaccaaagaaggcucuaacaucugccucacccgcacagaccguggcugguauugcgauaacgcagggucugucuccuucuucccccaagccgaaacaugcaaaguccaauccaacagagucuucugcgacaccaugaacucgagaacccuccccuccgaagucaaccuaugcaacaucgacaucuucaacccaaaauacgacugcaaaaucaugacuucaaaaacagacgugagcucguccgucaucacaagccuaggagcuaucguauccugcuacggaaaaacaaaaugcacugcuuccaacaaaugccgcggaaucauaaaaaccuucuccaacggcugcgacuacgucagcaacaaaggcgucgacacagucuccguaggcaacacccuauacuacgucaauaaacaagaaggcaagucccuauaugucaaaggcgagcccaucaucaauuucuaugauccccucguuuucccauccgacgaauuugacgcauccaucucccaagucaacgaaaaaauaaaccaaagccucgcauucauccgcaaauccgacgaacuccuccacaacguaaacguaggaaaauccacaacuaacaucaugaucaccaccaucaucaucgucauuaucgucauccuacuccuccucauagcagucggccucuuccucuacugcaaagcacgcuagggacuagugcaucacauuuaaaagcaucucagccuaccaugagaauaagagaaagaaaaugaagaucaauagcuuauucaucucuuuuucuuuuucguugguguaaagccaacacccugucuaaaaaacauaaauuucuuuaaucauuuugccucuuuucucugugcuucaauuaauaaaaaauggaaagaaccuagaucuaaaaaaaaaaaaaaaaaaaaaaaaaaaaaaaaaaaaaaaaaaaaaaaaaaaaaaaaaaaaaaaaugcaucccccccccccccccccccccccccccccccaaaggcucuuuucagagccaccagaauu

SEQ ID NO: 17614 - RNA, 1930 nt, Artificial Sequence
  mRNA product Design i-2 comprising derived and/or modified sequence from HRSV(Memphis-37)__AIY60640.1__F-del_DSCav1_mut5 (opt1)
ggggcgcugccuacggagguggcagccaucuccuucucggcaucaagcuuaccauggagcugcccauccucaagaccaacgccaucaccacgauccuggccgcggugacccugugcuucgccagcucccagaacaucaccgaggaguucuaccagagcacgugcuccgccgucagcaagggcuaccucuccgcccugcgcaccgggugguacaccagcgugaucaccaucgagcuguccaacaucaaggagaacaagugcaacggcaccgacgccaaggugaagcucaucaagcaggagcuggacaaguacaagaacgcggucacggagcugcagcuccugaugcagagcaccccggccgccggcuccgggagcgcgaucgccuccggcaucgccgucugcaaggugcugcaccucgagggcgaggugaacaagaucaagaacgcccugcuguccaccaacaaggccgucgugagccucuccggcugcggggugagcguccugaccuucaaggugcuggaccucaagaacuacaucgacaagcagcugcugcccauccugaacaagcagagcugcuccaucagcaacaucgagaccgucaucgaguuccagcagaagaacaaccgccuccuggagaucacgcgggaguucagcgugaacgcgggcgugaccacccccgucuccaccuacaugcugacgaacagcgagcuccugucccugaucaacgacaugccgaucaccaacgaccagaagaagcucaugagcaacaacgugcagaucgugcgccagcaguccuacagcaucaugugcaucaucaaggaggagguccuggccuacguggugcagcugccccucuacggggucaucgacacccccugcuggaagcugcacaccagcccccugugcacgaccaacaccaaggagggcuccaacaucugccucacccggacggaccgcgggugguacugcgacaacgccggcagcguguccuucuucccgcaggccgagaccugcaagguccagagcaaccggguguucugcgacaccaugaacucccggacccugcccagcgaggugaaccucugcaacaucgacaucuucaaccccaaguacgacugcaagaucaugacguccaagaccgacgucagcuccagcgugaucaccucccugggcgccaucgugagcugcuacgggaagaccaagugcacggcgagcaacaagugccgcggcaucaucaagaccuucuccaacgggugcgacuacgucagcaacaagggcguggacaccguguccgucggcaacacccuguacuacgugaacaagcaggagggcaagagccucuacgugaagggggagcccaucaucaacuucuacgacccgcuggucuuccccuccgacgaguucgacgccagcaucucccaggugaacgagaagaucaaccagagccuggccuucauccggaaguccgacgagcuccugcacaacgugaacgucggcaagagcaccacgaacaucaugaucaccaccaucaucaucgugaucaucgugauccugcugcuccugaucgccgucgggcuguuccucuacugcaaggcccgcugaggacuagugcaucacauuuaaaagcaucucagccuaccaugagaauaagagaaagaaaaugaagaucaauagcuuauucaucucuuuuucuuuuucguugguguaaagccaacacccugucuaaaaaacauaaauuucuuuaaucauuuugccucuuuucucugugcuucaauuaauaaaaaauggaaagaaccuagaucuaaaaaaaaaaaaaaaaaaaaaaaaaaaaaaaaaaaaaaaaaaaaaaaaaaaaaaaaaaaaaaaaugcaucccccccccccccccccccccccccccccccaaaggcucuuuucagagccaccagaauu

SEQ ID NO: 17615 - RNA, 1930 nt, Artificial Sequence
  mRNA product Design i-2 comprising derived and/or modified sequence from HRSV(Memphis-37)__AIY60640.1__F-del_DSCav1_mut5 (opt1)
ggggcgcugccuacggagguggcagccaucuccuucucggcaucaagcuuaccauggagcugcccauccucaagaccaacgccaucaccacgauccuggccgcggugacccugugcuucgccagcucccagaacaucaccgaggaguucuaccagagcacgugcuccgccgucagcaagggcuaccucuccgcccugcgcaccgggugguacaccagcgugaucaccaucgagcuguccaacaucaaggagaacaagugcaacggcaccgacgccaaggugaagcucaucaagcaggagcuggacaaguacaagaacgcggucacggagcugcagcuccugaugcagagcaccccggccgccggguccggcagcgccaucgcguccgggaucgccgugugcaaggugcugcaccucgagggcgaggucaacaagaucaagaacgcccugcugagcaccaacaaggccguggugucccucagcggcugcggggucuccgugcugaccuucaaggugcuggaccucaagaacuacaucgacaagcagcugcugcccauccucaacaagcagagcugcuccaucagcaacaucgagacggucaucgaguuccagcagaagaacaaccggcugcuggagaucacccgcgaguucuccgugaacgccggcgugaccacccccgucagcacguacaugcucaccaacagcgagcugcugucccucaucaacgacaugcccaucaccaacgaccagaagaagcugaugagcaacaacgugcagaucgugcggcagcaguccuacagcaucaugugcaucaucaaggaggagguccuggcguacguggugcagcucccgcuguacggggucaucgacacccccugcuggaagcugcacacgagcccccucugcaccaccaacaccaaggagggcuccaacaucugccugacgcgcaccgaccgggggugguacugcgacaacgccggcuccgugagcuucuucccccaggccgagaccugcaaggugcaguccaaccgcgucuucugcgacaccaugaacagccggacgcucccguccgaggugaaccugugcaacaucgacaucuucaaccccaaguacgacugcaagaucaugaccagcaagaccgacgucuccagcuccgugaucaccagccugggcgccaucguguccugcuacgggaagacgaagugcaccgccagcaacaagugccggggcaucaucaagaccuucuccaacgggugcgacuacgucagcaacaagggcguggacaccgugagcgucggcaacacgcucuacuacgugaacaagcaggaggggaagucccuguacgugaagggcgagcccaucaucaacuucuacgacccccuggucuucccgagcgacgaguucgacgcguccaucagccaggugaacgagaagaucaaccagucccucgccuucauccgcaagagcgacgagcugcugcacaacgugaacgucgggaaguccaccaccaacaucaugaucaccaccaucaucaucgugaucaucgugauccuccugcugcucaucgccgucggccuguuccuguacugcaaggcccggugaggacuagugcaucacauuuaaaagcaucucagccuaccaugagaauaagagaaagaaaaugaagaucaauagcuuauucaucucuuuuucuuuuucguugguguaaagccaacacccugucuaaaaaacauaaauuucuuuaaucauuuugccucuuuucucugugcuucaauuaauaaaaaauggaaagaaccuagaucuaaaaaaaaaaaaaaaaaaaaaaaaaaaaaaaaaaaaaaaaaaaaaaaaaaaaaaaaaaaaaaaaugcaucccccccccccccccccccccccccccccccaaaggcucuuuucagagccaccagaauu

SEQ ID NO: 17616 - RNA, 1930 nt, Artificial Sequence
  mRNA product Design i-2 comprising derived and/or modified sequence from HRSV(Memphis-37)__AIY60640.1__F-del_DSCav1_mut5 (opt2)
ggggcgcugccuacggagguggcagccaucuccuucucggcaucaagcuuaccauggagcuccccauccucaagaccaacgccaucaccaccauccucgccgccgucacccucugcuucgccuccucccagaacaucaccgaggaguucuaccaguccaccugcuccgccgucuccaagggcuaccucuccgcccuccgcaccggcugguacaccuccgucaucaccaucgagcucuccaacaucaaggagaacaagugcaacggcaccgacgccaaggucaagcucaucaagcaggagcucgacaaguacaagaacgccgucaccgagcuccagcuccucaugcaguccacccccgccgccggcuccggcuccgccaucgccuccggcaucgccgucugcaagguccuccaccucgagggcgaggucaacaagaucaagaacgcccuccucuccaccaacaaggccgucgucucccucuccggcugcggcgucuccguccucaccuucaagguccucgaccucaagaacuacaucgacaagcagcuccuccccauccucaacaagcaguccugcuccaucuccaacaucgagaccgucaucgaguuccagcagaagaacaaccgccuccucgagaucacccgcgaguucuccgucaacgccggcgucaccacccccgucuccaccuacaugcucaccaacuccgagcuccucucccucaucaacgacaugcccaucaccaacgaccagaagaagcucauguccaacaacguccagaucguccgccagcaguccuacuccaucaugugcaucaucaaggaggagguccucgccuacgucguccagcucccccucuacggcgucaucgacacccccugcuggaagcuccacaccuccccccucugcaccaccaacaccaaggagggcuccaacaucugccucacccgcaccgaccgcggcugguacugcgacaacgccggcuccgucuccuucuucccccaggccgagaccugcaagguccaguccaaccgcgucuucugcgacaccaugaacucccgcacccuccccuccgaggucaaccucugcaacaucgacaucuucaaccccaaguacgacugcaagaucaugaccuccaagaccgacgucuccuccuccgucaucaccucccucggcgccaucgucuccugcuacggcaagaccaagugcaccgccuccaacaagugccgcggcaucaucaagaccuucuccaacggcugcgacuacgucuccaacaagggcgucgacaccgucuccgucggcaacacccucuacuacgucaacaagcaggagggcaagucccucuacgucaagggcgagcccaucaucaacuucuacgacccccucgucuuccccuccgacgaguucgacgccuccaucucccaggucaacgagaagaucaaccagucccucgccuucauccgcaaguccgacgagcuccuccacaacgucaacgucggcaaguccaccaccaacaucaugaucaccaccaucaucaucgucaucaucgucauccuccuccuccucaucgccgucggccucuuccucuacugcaaggcccgcugaggacuagugcaucacauuuaaaagcaucucagccuaccaugagaauaagagaaagaaaaugaagaucaauagcuuauucaucucuuuuucuuuuucguugguguaaagccaacacccugucuaaaaaacauaaauuucuuuaaucauuuugccucuuuucucugugcuucaauuaauaaaaaauggaaagaaccuagaucuaaaaaaaaaaaaaaaaaaaaaaaaaaaaaaaaaaaaaaaaaaaaaaaaaaaaaaaaaaaaaaaaugcaucccccccccccccccccccccccccccccccaaaggcucuuuucagagccaccagaauu

SEQ ID NO: 17617 - RNA, 1930 nt, Artificial Sequence
  mRNA product Design i-2 comprising derived and/or modified sequence from HRSV(Memphis-37)__AIY60640.1__F-del_DSCav1_mut5 (opt3)
ggggcgcugccuacggagguggcagccaucuccuucucggcaucaagcuuaccauggagcugcccauccucaagaccaacgccauuacaacuauacuugcugcagugacgcugugcuucgccagcucccagaauaucaccgaagaguuuuaccaaucuacauguucagcggucaguaaaggcuauuugagcgcuuuaagaacugggugguacaccuccguuauuacaaucgaacugucuaacauuaaggagaauaaaugcaacggaaccgacgccaaggugaaacuaaucaagcaggaacucgauaaguauaaaaaugcaguaacugagcugcagcuucugaugcagucgaccccugccgcugguucaggcagcgcaauagccagugggaucgcuguguguaaggucuugcaccucgagggagaagugaacaaaauuaagaaugcccugcuguccacaaacaaagcgguugugucucucagcggcugcggugucuccguguuaacguucaagguacuggaccuuaagaauuacaucgauaaacaauugcugccaauucuaaacaagcagucauguaguaucagcaauauagagacuguuauugaauuucagcagaaaaacaauaggcuccuggagaucacccgggaguucucugugaacgcaggggucacaacuccgguguccaccuauaugcuuacaaauucagaacuguugagccucauuaacgacaugcccaucaccaacgaucaaaagaaacugaugaguaauaacgugcagaucguccgccagcagucuuacuccauuaugugcauaaucaaggaggaaguuuuagccuaugugguacaacugccucucuacggagugauugacacgccauguuggaaacuucauacuagcccccugugcacaaccaauacuaaggagggcucgaacaucuguuugacacgaaccgaucguggcugguacugcgacaaugcugggucugucuccuuuuucccucaggccgaaacguguaaggugcagucaaacagaguguuuugcgauaccaugaauaguagaacacugccaagcgaggugaaccucugcaauauagacauuuucaaccccaaauaugauuguaagaucaugacuuccaaaaccgacgucucuagcucagugaucacaagucugggagcaauuguauccugcuacgguaagacuaaauguaccgcuagcaauaagugcaggggcaucauuaagacauuuucuaacgggugugauuauguuucaaauaaaggaguggacaccgucagugugggcaacacucuuuacuaugucaauaagcaagaggguaaaagccuguacgugaagggggaaccuauaaucaacuucuaugacccauugguuuuuccguccgaugaguucgacgccucuauuucgcagguuaacgagaaaaucaaucagagccucgcguuuauccggaaguccgaugaacuguuacacaacguaaaugucggaaagucaacgacaaacauuaugauaaccacuaucauuaucgugauuaucguuauacugcuacuccugaucgccgugggccuuuucuuguacugcaaagcacgcugaggacuagugcaucacauuuaaaagcaucucagccuaccaugagaauaagagaaagaaaaugaagaucaauagcuuauucaucucuuuuucuuuuucguugguguaaagccaacacccugucuaaaaaacauaaauuucuuuaaucauuuugccucuuuucucugugcuucaauuaauaaaaaauggaaagaaccuagaucuaaaaaaaaaaaaaaaaaaaaaaaaaaaaaaaaaaaaaaaaaaaaaaaaaaaaaaaaaaaaaaaaugcaucccccccccccccccccccccccccccccccaaaggcucuuuucagagccaccagaauu

SEQ ID NO: 17618 - RNA, 1930 nt, Artificial Sequence
  mRNA product Design i-2 comprising derived and/or modified sequence from HRSV(Memphis-37)__AIY60640.1__F-del_DSCav1_mut5 (opt4)
ggggcgcugccuacggagguggcagccaucuccuucucggcaucaagcuuaccauggagcugcccauccugaagaccaacgccaucaccaccauccuggccgccgugacccugugcuucgccagcagccagaacaucaccgaggaguucuaccagagcaccugcagcgccgugagcaagggcuaccugagcgcccugagaaccggcugguacaccagcgugaucaccaucgagcugagcaacaucaaggagaacaagugcaacggcaccgacgccaaggugaagcugaucaagcaggagcuggacaaguacaagaacgccgugaccgagcugcagcugcugaugcagagcacccccgccgccggcagcggcagcgccaucgccagcggcaucgccgugugcaaggugcugcaccuggagggcgaggugaacaagaucaagaacgcccugcugagcaccaacaaggccguggugagccugagcggcugcggcgugagcgugcugaccuucaaggugcuggaccugaagaacuacaucgacaagcagcugcugcccauccugaacaagcagagcugcagcaucagcaacaucgagaccgugaucgaguuccagcagaagaacaacagacugcuggagaucaccagagaguucagcgugaacgccggcgugaccacccccgugagcaccuacaugcugaccaacagcgagcugcugagccugaucaacgacaugcccaucaccaacgaccagaagaagcugaugagcaacaacgugcagaucgugagacagcagagcuacagcaucaugugcaucaucaaggaggaggugcuggccuacguggugcagcugccccuguacggcgugaucgacacccccugcuggaagcugcacaccagcccccugugcaccaccaacaccaaggagggcagcaacaucugccugaccagaaccgacagaggcugguacugcgacaacgccggcagcgugagcuucuucccccaggccgagaccugcaaggugcagagcaacagaguguucugcgacaccaugaacagcagaacccugcccagcgaggugaaccugugcaacaucgacaucuucaaccccaaguacgacugcaagaucaugaccagcaagaccgacgugagcagcagcgugaucaccagccugggcgccaucgugagcugcuacggcaagaccaagugcaccgccagcaacaagugcagaggcaucaucaagaccuucagcaacggcugcgacuacgugagcaacaagggcguggacaccgugagcgugggcaacacccuguacuacgugaacaagcaggagggcaagagccuguacgugaagggcgagcccaucaucaacuucuacgacccccugguguuccccagcgacgaguucgacgccagcaucagccaggugaacgagaagaucaaccagagccuggccuucaucagaaagagcgacgagcugcugcacaacgugaacgugggcaagagcaccaccaacaucaugaucaccaccaucaucaucgugaucaucgugauccugcugcugcugaucgccgugggccuguuccuguacugcaaggccagaugaggacuagugcaucacauuuaaaagcaucucagccuaccaugagaauaagagaaagaaaaugaagaucaauagcuuauucaucucuuuuucuuuuucguugguguaaagccaacacccugucuaaaaaacauaaauuucuuuaaucauuuugccucuuuucucugugcuucaauuaauaaaaaauggaaagaaccuagaucuaaaaaaaaaaaaaaaaaaaaaaaaaaaaaaaaaaaaaaaaaaaaaaaaaaaaaaaaaaaaaaaaugcaucccccccccccccccccccccccccccccccaaaggcucuuuucagagccaccagaauu

SEQ ID NO: 17619 - RNA, 1930 nt, Artificial Sequence
  mRNA product Design i-2 comprising derived and/or modified sequence from HRSV(Memphis-37)__AIY60640.1__F-del_DSCav1_mut5 (opt5)
ggggcgcugccuacggagguggcagccaucuccuucucggcaucaagcuuaccauggagcugcccauccucaagaccaacgccauuacaacgauccuggcugccgugacccuuugcuucgcgagcucccagaauauuacagaagaguuuuaccaaucuaccuguagcgcugucuccaaaggcuaucugucugcccucagaacagggugguacaccagcguuaucacaauugaacuguccaacaucaaggagaauaaaugcaacggaaccgacgccaaggugaaacuuaucaagcaggaacuggauaaguauaaaaaugcugugacggagcuccagcugcugaugcagucuaccccugccgcuggcagcggguccgccauugcgagcggaaucgccgucuguaaggugcuccaccuggagggcgaaguuaacaaaauuaagaaugcccuucugucuacaaacaaagcuguggucucccucagcgggugcggagugucuguucugaccuucaaggugcuugaccugaagaauuacaucgauaaacaacuccugccgauucugaacaagcaguccuguagcaucucuaauauugagacagucaucgaauuucagcagaaaaacaaucggcuccuggagaucacccgcgaguucuccgugaacgcuggcgugacgacacccgucagcaccuauaugcuuacaaauuccgaacugcucucucugauuaacgacaugccuaucaccaacgaucaaaagaaacuuaugagcaauaacguucagauugugagacagcaguccuacagcaucaugugcauuaucaaggaggaagugcuggccuaugucgugcaacucccccuguacggcguuaucgacaccccuuguuggaaacugcauacaucuccccucugcacgaccaauacaaaggagggguccaacauuugucugacccggacagaucgcggaugguacugcgacaaugcgggcagcgugagcuuuuucccucaggccgaaaccuguaagguccagucuaacagaguguuuugcgauacgaugaacuccagaacacugccgucugagguuaaucucugcaauaucgacauuuucaaccccaaauaugauuguaagaucaugaccagcaaaaccgacguguccagcucugucauuacaucccugggggcuaucgugagcugcuacggaaagaccaaauguacagccucuaauaagugccggggcaucauuaagacguuuuccaacgggugugauuaugucagcaauaaaggaguggacaccguuuccgugggcaacacacuuuacuaugucaauaagcaagagggcaaaucucuguacgugaagggggaaccuaucauuaacuucuaugacccccucguuuuuccuagcgaugaguucgacgcuuccaucucucaggugaacgagaaaauuaaucagagccuggccuuuauccgcaaguccgaugaacugcuccacaacgucaaugugggaaagagcaccacaaacauuaugaucaccacgaucauuaucgugauuaucguuauucugcuucugcucaucgccgucggccuguuccuguacugcaaagcuagaugaggacuagugcaucacauuuaaaagcaucucagccuaccaugagaauaagagaaagaaaaugaagaucaauagcuuauucaucucuuuuucuuuuucguugguguaaagccaacacccugucuaaaaaacauaaauuucuuuaaucauuuugccucuuuucucugugcuucaauuaauaaaaaauggaaagaaccuagaucuaaaaaaaaaaaaaaaaaaaaaaaaaaaaaaaaaaaaaaaaaaaaaaaaaaaaaaaaaaaaaaaaugcaucccccccccccccccccccccccccccccccaaaggcucuuuucagagccaccagaauu

SEQ ID NO: 17620 - RNA, 1930 nt, Artificial Sequence
  mRNA product Design i-2 comprising derived and/or modified sequence from HRSV(Memphis-37)__AIY60640.1__F-del_DSCav1_mut5 (opt6)
ggggcgcugccuacggagguggcagccaucuccuucucggcaucaagcuuaccauggaauuacccaucuuaaaaacaaaugcaauaacaacaauacuagcagccguaacauuaugcuucgccucaagccaaaacauaacagaagaauuuuaccaaagcacauguuccgccguaucaaaaggauaucucucagcacuacguacuggaugguauacauccguaaucacaauugaacuaucaaacauuaaagaaaacaaaugcaauggaacagaugcgaaaguaaaacuaauaaaacaagaauuagauaaauauaaaaaugcaguaaccgaacuacaacuacuaaugcaaucaacucccgcugccgguagcggauccgccauagcaagcggaauugcuguauguaaaguccuacaucuugaaggcgaagucaacaaaaucaaaaaugcauuacucucgaccaacaaagcagucguaucacuaucaggaugcggagucucaguauuaacuuuuaaaguccuugaccuaaaaaacuacauagacaaacaacuacuaccaauucuaaauaaacaaaguugcagcauauccaauaucgaaacaguuauagaauuucaacaaaaaaacaaccgccuacuagaaaucacuagagaauuuucaguaaaugcaggcguaaccacaccagucucuaccuauaugcuuaccaacucugaauuauuaucacuuauaaacgacaugcccauaacaaaugaucaaaaaaaacuaaugagcaacaacguacaaauaguaagacaacaaagcuacagcauuauguguauaauaaaagaagaaguguuagcuuauguaguccaacuaccccucuauggcguuaucgauacaccaugcuggaaauuacacacaagcccucuaugcacaacuaacaccaaagaaggcucuaacauaugcuuaacaagaacagauagaggaugguauugcgauaacgcaggaucaguaucauucuuuccacaagcagaaacauguaaaguacaaucuaaccgaguauucugcgacacaaugaacucuagaacacuacccucagaaguuaaucucuguaauauugacauuuucaauccaaaauacgauugcaaaauaaugaccucuaaaaccgacguaucauccucaguuauaacguccuuaggagcaaucguaagcugcuauggcaaaacaaaauguaccgcaucaaacaaaugcagaggaauaauaaaaacauucucaaacggcugugacuacguaagcaauaaagguguugacacaguuucaguaggaaauacacuauacuauguaaauaaacaagaaggaaaaucucucuauguaaaaggagaacccauaauaaacuucuacgacccacucguauuuccaagcgaugaauuugaugcgagcauuucccagguaaaugaaaaaauaaaucaaucacuagcauucaucagaaaaagugaugaauuacuacacaauguuaacguaggaaaaucaacaacaaauaucaugauaacaacaaucauaauagucauaaucguaauauuacuauuacuaauagcaguagguuuauuucuauacuguaaagcaagguaaggacuagugcaucacauuuaaaagcaucucagccuaccaugagaauaagagaaagaaaaugaagaucaauagcuuauucaucucuuuuucuuuuucguugguguaaagccaacacccugucuaaaaaacauaaauuucuuuaaucauuuugccucuuuucucugugcuucaauuaauaaaaaauggaaagaaccuagaucuaaaaaaaaaaaaaaaaaaaaaaaaaaaaaaaaaaaaaaaaaaaaaaaaaaaaaaaaaaaaaaaaugcaucccccccccccccccccccccccccccccccaaaggcucuuuucagagccaccagaauu

SEQ ID NO: 17621 - RNA, 1930 nt, Artificial Sequence
  mRNA product Design i-2 comprising derived and/or modified sequence from HRSV(Memphis-37)__AIY60640.1__F-del_DSCav1_mut5 (opt11)
ggggcgcugccuacggagguggcagccaucuccuucucggcaucaagcuuaccauggaacuucccauccuaaaaaccaacgccauaacaacaauccucgcagcagucacccucugcuucgccucuucacaaaacaucaccgaagaauuuuaccaaucaaccugcuccgccguguccaaaggcuaccucucagcacugcgcacaggaugguauaccagcguaaucaccaucgaacucuccaacaucaaggaaaacaaaugcaacggcaccgaugccaaagucaaacucaucaagcaagaacuugacaaauacaaaaacgccgugaccgagcuacaacuccucaugcaguccacuccagccgccggcuccggcagcgccaucgccuccggcaucgccguaugcaaaguccuccaccucgaaggcgaaguaaacaaaaucaagaacgcacuccuaagcaccaacaaagccgucgucucacucuccgguugcggcgucagcguccuaacauucaaaguucucgaccucaaaaacuacauagacaaacaacuccuccccauccucaacaaacaauccugcuccauaucaaacaucgaaaccguuaucgaauuucaacaaaaaaacaaccgccuccuagaaaucacccgcgaauuuuccgucaacgcaggcgucaccacccccguuuccaccuauaugcucaccaacuccgaacuccucucccucaucaacgacaugcccauuaccaacgaccaaaagaaacuuaugagcaacaacguucaaaucguccgacaacaaucauacuccaucaugugcauuaucaaagaagaaguacucgccuacguaguacaauuaccccucuacggcguaaucgacaccccaugcuggaaacuacacaccuccccccucuguaccaccaacaccaaagaaggcucuaacaucugccucacccgcacagaccguggcugguauugcgauaacgcagggucugucuccuucuucccccaagccgaaacaugcaaaguccaauccaacagagucuucugcgacaccaugaacucgagaacccuccccuccgaagucaaccuaugcaacaucgacaucuucaacccaaaauacgacugcaaaaucaugacuucaaaaacagacgugagcucguccgucaucacaagccuaggagcuaucguauccugcuacggaaaaacaaaaugcacugcuuccaacaaaugccgcggaaucauaaaaaccuucuccaacggcugcgacuacgucagcaacaaaggcgucgacacagucuccguaggcaacacccuauacuacgucaauaaacaagaaggcaagucccuauaugucaaaggcgagcccaucaucaauuucuaugauccccucguuuucccauccgacgaauuugacgcauccaucucccaagucaacgaaaaaauaaaccaaagccucgcauucauccgcaaauccgacgaacuccuccacaacguaaacguaggaaaauccacaacuaacaucaugaucaccaccaucaucaucgucauuaucgucauccuacuccuccucauagcagucggccucuuccucuacugcaaagcacgcuagggacuagugcaucacauuuaaaagcaucucagccuaccaugagaauaagagaaagaaaaugaagaucaauagcuuauucaucucuuuuucuuuuucguugguguaaagccaacacccugucuaaaaaacauaaauuucuuuaaucauuuugccucuuuucucugugcuucaauuaauaaaaaauggaaagaaccuagaucuaaaaaaaaaaaaaaaaaaaaaaaaaaaaaaaaaaaaaaaaaaaaaaaaaaaaaaaaaaaaaaaaugcaucccccccccccccccccccccccccccccccaaaggcucuuuucagagccaccagaauu

SEQ ID NO: 17622 - RNA, 1765 nt, Artificial Sequence
  mRNA product Design i-3 comprising derived and/or modified sequence from HRSV(Memphis-37)__AIY60640.1__F-del_DSCav1_mut5 (opt1)
gggagaaagcuuaccauggagcugcccauccucaagaccaacgccaucaccacgauccuggccgcggugacccugugcuucgccagcucccagaacaucaccgaggaguucuaccagagcacgugcuccgccgucagcaagggcuaccucuccgcccugcgcaccgggugguacaccagcgugaucaccaucgagcuguccaacaucaaggagaacaagugcaacggcaccgacgccaaggugaagcucaucaagcaggagcuggacaaguacaagaacgcggucacggagcugcagcuccugaugcagagcaccccggccgccggcuccgggagcgcgaucgccuccggcaucgccgucugcaaggugcugcaccucgagggcgaggugaacaagaucaagaacgcccugcuguccaccaacaaggccgucgugagccucuccggcugcggggugagcguccugaccuucaaggugcuggaccucaagaacuacaucgacaagcagcugcugcccauccugaacaagcagagcugcuccaucagcaacaucgagaccgucaucgaguuccagcagaagaacaaccgccuccuggagaucacgcgggaguucagcgugaacgcgggcgugaccacccccgucuccaccuacaugcugacgaacagcgagcuccugucccugaucaacgacaugccgaucaccaacgaccagaagaagcucaugagcaacaacgugcagaucgugcgccagcaguccuacagcaucaugugcaucaucaaggaggagguccuggccuacguggugcagcugccccucuacggggucaucgacacccccugcuggaagcugcacaccagcccccugugcacgaccaacaccaaggagggcuccaacaucugccucacccggacggaccgcgggugguacugcgacaacgccggcagcguguccuucuucccgcaggccgagaccugcaagguccagagcaaccggguguucugcgacaccaugaacucccggacccugcccagcgaggugaaccucugcaacaucgacaucuucaaccccaaguacgacugcaagaucaugacguccaagaccgacgucagcuccagcgugaucaccucccugggcgccaucgugagcugcuacgggaagaccaagugcacggcgagcaacaagugccgcggcaucaucaagaccuucuccaacgggugcgacuacgucagcaacaagggcguggacaccguguccgucggcaacacccuguacuacgugaacaagcaggagggcaagagccucuacgugaagggggagcccaucaucaacuucuacgacccgcuggucuuccccuccgacgaguucgacgccagcaucucccaggugaacgagaagaucaaccagagccuggccuucauccggaaguccgacgagcuccugcacaacgugaacgucggcaagagcaccacgaacaucaugaucaccaccaucaucaucgugaucaucgugauccugcugcuccugaucgccgucgggcuguuccucuacugcaaggcccgcugaggacuaguuauaagacugacuagcccgaugggccucccaacgggcccuccuccccuccuugcaccgagauuaauaaaaaaaaaaaaaaaaaaaaaaaaaaaaaaaaaaaaaaaaaaaaaaaaaaaaaaaaaaaaaaaaugcaucccccccccccccccccccccccccccccccaaaggcucuuuucagagccaccagaauu

SEQ ID NO: 17623 - RNA, 1765 nt, Artificial Sequence
  mRNA product Design i-3 comprising derived and/or modified sequence from HRSV(Memphis-37)__AIY60640.1__F-del_DSCav1_mut5 (opt1)
gggagaaagcuuaccauggagcugcccauccucaagaccaacgccaucaccacgauccuggccgcggugacccugugcuucgccagcucccagaacaucaccgaggaguucuaccagagcacgugcuccgccgucagcaagggcuaccucuccgcccugcgcaccgggugguacaccagcgugaucaccaucgagcuguccaacaucaaggagaacaagugcaacggcaccgacgccaaggugaagcucaucaagcaggagcuggacaaguacaagaacgcggucacggagcugcagcuccugaugcagagcaccccggccgccggguccggcagcgccaucgcguccgggaucgccgugugcaaggugcugcaccucgagggcgaggucaacaagaucaagaacgcccugcugagcaccaacaaggccguggugucccucagcggcugcggggucuccgugcugaccuucaaggugcuggaccucaagaacuacaucgacaagcagcugcugcccauccucaacaagcagagcugcuccaucagcaacaucgagacggucaucgaguuccagcagaagaacaaccggcugcuggagaucacccgcgaguucuccgugaacgccggcgugaccacccccgucagcacguacaugcucaccaacagcgagcugcugucccucaucaacgacaugcccaucaccaacgaccagaagaagcugaugagcaacaacgugcagaucgugcggcagcaguccuacagcaucaugugcaucaucaaggaggagguccuggcguacguggugcagcucccgcuguacggggucaucgacacccccugcuggaagcugcacacgagcccccucugcaccaccaacaccaaggagggcuccaacaucugccugacgcgcaccgaccgggggugguacugcgacaacgccggcuccgugagcuucuucccccaggccgagaccugcaaggugcaguccaaccgcgucuucugcgacaccaugaacagccggacgcucccguccgaggugaaccugugcaacaucgacaucuucaaccccaaguacgacugcaagaucaugaccagcaagaccgacgucuccagcuccgugaucaccagccugggcgccaucguguccugcuacgggaagacgaagugcaccgccagcaacaagugccggggcaucaucaagaccuucuccaacgggugcgacuacgucagcaacaagggcguggacaccgugagcgucggcaacacgcucuacuacgugaacaagcaggaggggaagucccuguacgugaagggcgagcccaucaucaacuucuacgacccccuggucuucccgagcgacgaguucgacgcguccaucagccaggugaacgagaagaucaaccagucccucgccuucauccgcaagagcgacgagcugcugcacaacgugaacgucgggaaguccaccaccaacaucaugaucaccaccaucaucaucgugaucaucgugauccuccugcugcucaucgccgucggccuguuccuguacugcaaggcccggugaggacuaguuauaagacugacuagcccgaugggccucccaacgggcccuccuccccuccuugcaccgagauuaauaaaaaaaaaaaaaaaaaaaaaaaaaaaaaaaaaaaaaaaaaaaaaaaaaaaaaaaaaaaaaaaaugcaucccccccccccccccccccccccccccccccaaaggcucuuuucagagccaccagaauu

SEQ ID NO: 17624 - RNA, 1765 nt, Artificial Sequence
  mRNA product Design i-3 comprising derived and/or modified sequence from HRSV(Memphis-37)__AIY60640.1__F-del_DSCav1_mut5 (opt2)
gggagaaagcuuaccauggagcuccccauccucaagaccaacgccaucaccaccauccucgccgccgucacccucugcuucgccuccucccagaacaucaccgaggaguucuaccaguccaccugcuccgccgucuccaagggcuaccucuccgcccuccgcaccggcugguacaccuccgucaucaccaucgagcucuccaacaucaaggagaacaagugcaacggcaccgacgccaaggucaagcucaucaagcaggagcucgacaaguacaagaacgccgucaccgagcuccagcuccucaugcaguccacccccgccgccggcuccggcuccgccaucgccuccggcaucgccgucugcaagguccuccaccucgagggcgaggucaacaagaucaagaacgcccuccucuccaccaacaaggccgucgucucccucuccggcugcggcgucuccguccucaccuucaagguccucgaccucaagaacuacaucgacaagcagcuccuccccauccucaacaagcaguccugcuccaucuccaacaucgagaccgucaucgaguuccagcagaagaacaaccgccuccucgagaucacccgcgaguucuccgucaacgccggcgucaccacccccgucuccaccuacaugcucaccaacuccgagcuccucucccucaucaacgacaugcccaucaccaacgaccagaagaagcucauguccaacaacguccagaucguccgccagcaguccuacuccaucaugugcaucaucaaggaggagguccucgccuacgucguccagcucccccucuacggcgucaucgacacccccugcuggaagcuccacaccuccccccucugcaccaccaacaccaaggagggcuccaacaucugccucacccgcaccgaccgcggcugguacugcgacaacgccggcuccgucuccuucuucccccaggccgagaccugcaagguccaguccaaccgcgucuucugcgacaccaugaacucccgcacccuccccuccgaggucaaccucugcaacaucgacaucuucaaccccaaguacgacugcaagaucaugaccuccaagaccgacgucuccuccuccgucaucaccucccucggcgccaucgucuccugcuacggcaagaccaagugcaccgccuccaacaagugccgcggcaucaucaagaccuucuccaacggcugcgacuacgucuccaacaagggcgucgacaccgucuccgucggcaacacccucuacuacgucaacaagcaggagggcaagucccucuacgucaagggcgagcccaucaucaacuucuacgacccccucgucuuccccuccgacgaguucgacgccuccaucucccaggucaacgagaagaucaaccagucccucgccuucauccgcaaguccgacgagcuccuccacaacgucaacgucggcaaguccaccaccaacaucaugaucaccaccaucaucaucgucaucaucgucauccuccuccuccucaucgccgucggccucuuccucuacugcaaggcccgcugaggacuaguuauaagacugacuagcccgaugggccucccaacgggcccuccuccccuccuugcaccgagauuaauaaaaaaaaaaaaaaaaaaaaaaaaaaaaaaaaaaaaaaaaaaaaaaaaaaaaaaaaaaaaaaaaugcaucccccccccccccccccccccccccccccccaaaggcucuuuucagagccaccagaauu

SEQ ID NO: 17625 - RNA, 1765 nt, Artificial Sequence
  mRNA product Design i-3 comprising derived and/or modified sequence from HRSV(Memphis-37)__AIY60640.1__F-del_DSCav1_mut5 (opt3)
gggagaaagcuuaccauggagcugcccauccucaagaccaacgccauuacaacuauacuugcugcagugacgcugugcuucgccagcucccagaauaucaccgaagaguuuuaccaaucuacauguucagcggucaguaaaggcuauuugagcgcuuuaagaacugggugguacaccuccguuauuacaaucgaacugucuaacauuaaggagaauaaaugcaacggaaccgacgccaaggugaaacuaaucaagcaggaacucgauaaguauaaaaaugcaguaacugagcugcagcuucugaugcagucgaccccugccgcugguucaggcagcgcaauagccagugggaucgcuguguguaaggucuugcaccucgagggagaagugaacaaaauuaagaaugcccugcuguccacaaacaaagcgguugugucucucagcggcugcggugucuccguguuaacguucaagguacuggaccuuaagaauuacaucgauaaacaauugcugccaauucuaaacaagcagucauguaguaucagcaauauagagacuguuauugaauuucagcagaaaaacaauaggcuccuggagaucacccgggaguucucugugaacgcaggggucacaacuccgguguccaccuauaugcuuacaaauucagaacuguugagccucauuaacgacaugcccaucaccaacgaucaaaagaaacugaugaguaauaacgugcagaucguccgccagcagucuuacuccauuaugugcauaaucaaggaggaaguuuuagccuaugugguacaacugccucucuacggagugauugacacgccauguuggaaacuucauacuagcccccugugcacaaccaauacuaaggagggcucgaacaucuguuugacacgaaccgaucguggcugguacugcgacaaugcugggucugucuccuuuuucccucaggccgaaacguguaaggugcagucaaacagaguguuuugcgauaccaugaauaguagaacacugccaagcgaggugaaccucugcaauauagacauuuucaaccccaaauaugauuguaagaucaugacuuccaaaaccgacgucucuagcucagugaucacaagucugggagcaauuguauccugcuacgguaagacuaaauguaccgcuagcaauaagugcaggggcaucauuaagacauuuucuaacgggugugauuauguuucaaauaaaggaguggacaccgucagugugggcaacacucuuuacuaugucaauaagcaagaggguaaaagccuguacgugaagggggaaccuauaaucaacuucuaugacccauugguuuuuccguccgaugaguucgacgccucuauuucgcagguuaacgagaaaaucaaucagagccucgcguuuauccggaaguccgaugaacuguuacacaacguaaaugucggaaagucaacgacaaacauuaugauaaccacuaucauuaucgugauuaucguuauacugcuacuccugaucgccgugggccuuuucuuguacugcaaagcacgcugaggacuaguuauaagacugacuagcccgaugggccucccaacgggcccuccuccccuccuugcaccgagauuaauaaaaaaaaaaaaaaaaaaaaaaaaaaaaaaaaaaaaaaaaaaaaaaaaaaaaaaaaaaaaaaaaugcaucccccccccccccccccccccccccccccccaaaggcucuuuucagagccaccagaauu

SEQ ID NO: 17626 - RNA, 1765 nt, Artificial Sequence
  mRNA product Design i-3 comprising derived and/or modified sequence from HRSV(Memphis-37)__AIY60640.1__F-del_DSCav1_mut5 (opt4)
gggagaaagcuuaccauggagcugcccauccugaagaccaacgccaucaccaccauccuggccgccgugacccugugcuucgccagcagccagaacaucaccgaggaguucuaccagagcaccugcagcgccgugagcaagggcuaccugagcgcccugagaaccggcugguacaccagcgugaucaccaucgagcugagcaacaucaaggagaacaagugcaacggcaccgacgccaaggugaagcugaucaagcaggagcuggacaaguacaagaacgccgugaccgagcugcagcugcugaugcagagcacccccgccgccggcagcggcagcgccaucgccagcggcaucgccgugugcaaggugcugcaccuggagggcgaggugaacaagaucaagaacgcccugcugagcaccaacaaggccguggugagccugagcggcugcggcgugagcgugcugaccuucaaggugcuggaccugaagaacuacaucgacaagcagcugcugcccauccugaacaagcagagcugcagcaucagcaacaucgagaccgugaucgaguuccagcagaagaacaacagacugcuggagaucaccagagaguucagcgugaacgccggcgugaccacccccgugagcaccuacaugcugaccaacagcgagcugcugagccugaucaacgacaugcccaucaccaacgaccagaagaagcugaugagcaacaacgugcagaucgugagacagcagagcuacagcaucaugugcaucaucaaggaggaggugcuggccuacguggugcagcugccccuguacggcgugaucgacacccccugcuggaagcugcacaccagcccccugugcaccaccaacaccaaggagggcagcaacaucugccugaccagaaccgacagaggcugguacugcgacaacgccggcagcgugagcuucuucccccaggccgagaccugcaaggugcagagcaacagaguguucugcgacaccaugaacagcagaacccugcccagcgaggugaaccugugcaacaucgacaucuucaaccccaaguacgacugcaagaucaugaccagcaagaccgacgugagcagcagcgugaucaccagccugggcgccaucgugagcugcuacggcaagaccaagugcaccgccagcaacaagugcagaggcaucaucaagaccuucagcaacggcugcgacuacgugagcaacaagggcguggacaccgugagcgugggcaacacccuguacuacgugaacaagcaggagggcaagagccuguacgugaagggcgagcccaucaucaacuucuacgacccccugguguuccccagcgacgaguucgacgccagcaucagccaggugaacgagaagaucaaccagagccuggccuucaucagaaagagcgacgagcugcugcacaacgugaacgugggcaagagcaccaccaacaucaugaucaccaccaucaucaucgugaucaucgugauccugcugcugcugaucgccgugggccuguuccuguacugcaaggccagaugaggacuaguuauaagacugacuagcccgaugggccucccaacgggcccuccuccccuccuugcaccgagauuaauaaaaaaaaaaaaaaaaaaaaaaaaaaaaaaaaaaaaaaaaaaaaaaaaaaaaaaaaaaaaaaaaugcaucccccccccccccccccccccccccccccccaaaggcucuuuucagagccaccagaauu

SEQ ID NO: 17627 - RNA, 1765 nt, Artificial Sequence
  mRNA product Design i-3 comprising derived and/or modified sequence from HRSV(Memphis-37)__AIY60640.1__F-del_DSCav1_mut5 (opt5)
gggagaaagcuuaccauggagcugcccauccucaagaccaacgccauuacaacgauccuggcugccgugacccuuugcuucgcgagcucccagaauauuacagaagaguuuuaccaaucuaccuguagcgcugucuccaaaggcuaucugucugcccucagaacagggugguacaccagcguuaucacaauugaacuguccaacaucaaggagaauaaaugcaacggaaccgacgccaaggugaaacuuaucaagcaggaacuggauaaguauaaaaaugcugugacggagcuccagcugcugaugcagucuaccccugccgcuggcagcggguccgccauugcgagcggaaucgccgucuguaaggugcuccaccuggagggcgaaguuaacaaaauuaagaaugcccuucugucuacaaacaaagcuguggucucccucagcgggugcggagugucuguucugaccuucaaggugcuugaccugaagaauuacaucgauaaacaacuccugccgauucugaacaagcaguccuguagcaucucuaauauugagacagucaucgaauuucagcagaaaaacaaucggcuccuggagaucacccgcgaguucuccgugaacgcuggcgugacgacacccgucagcaccuauaugcuuacaaauuccgaacugcucucucugauuaacgacaugccuaucaccaacgaucaaaagaaacuuaugagcaauaacguucagauugugagacagcaguccuacagcaucaugugcauuaucaaggaggaagugcuggccuaugucgugcaacucccccuguacggcguuaucgacaccccuuguuggaaacugcauacaucuccccucugcacgaccaauacaaaggagggguccaacauuugucugacccggacagaucgcggaugguacugcgacaaugcgggcagcgugagcuuuuucccucaggccgaaaccuguaagguccagucuaacagaguguuuugcgauacgaugaacuccagaacacugccgucugagguuaaucucugcaauaucgacauuuucaaccccaaauaugauuguaagaucaugaccagcaaaaccgacguguccagcucugucauuacaucccugggggcuaucgugagcugcuacggaaagaccaaauguacagccucuaauaagugccggggcaucauuaagacguuuuccaacgggugugauuaugucagcaauaaaggaguggacaccguuuccgugggcaacacacuuuacuaugucaauaagcaagagggcaaaucucuguacgugaagggggaaccuaucauuaacuucuaugacccccucguuuuuccuagcgaugaguucgacgcuuccaucucucaggugaacgagaaaauuaaucagagccuggccuuuauccgcaaguccgaugaacugcuccacaacgucaaugugggaaagagcaccacaaacauuaugaucaccacgaucauuaucgugauuaucguuauucugcuucugcucaucgccgucggccuguuccuguacugcaaagcuagaugaggacuaguuauaagacugacuagcccgaugggccucccaacgggcccuccuccccuccuugcaccgagauuaauaaaaaaaaaaaaaaaaaaaaaaaaaaaaaaaaaaaaaaaaaaaaaaaaaaaaaaaaaaaaaaaaugcaucccccccccccccccccccccccccccccccaaaggcucuuuucagagccaccagaauu

SEQ ID NO: 17628 - RNA, 1765 nt, Artificial Sequence
  mRNA product Design i-3 comprising derived and/or modified sequence from HRSV(Memphis-37)__AIY60640.1__F-del_DSCav1_mut5 (opt6)
gggagaaagcuuaccauggaauuacccaucuuaaaaacaaaugcaauaacaacaauacuagcagccguaacauuaugcuucgccucaagccaaaacauaacagaagaauuuuaccaaagcacauguuccgccguaucaaaaggauaucucucagcacuacguacuggaugguauacauccguaaucacaauugaacuaucaaacauuaaagaaaacaaaugcaauggaacagaugcgaaaguaaaacuaauaaaacaagaauuagauaaauauaaaaaugcaguaaccgaacuacaacuacuaaugcaaucaacucccgcugccgguagcggauccgccauagcaagcggaauugcuguauguaaaguccuacaucuugaaggcgaagucaacaaaaucaaaaaugcauuacucucgaccaacaaagcagucguaucacuaucaggaugcggagucucaguauuaacuuuuaaaguccuugaccuaaaaaacuacauagacaaacaacuacuaccaauucuaaauaaacaaaguugcagcauauccaauaucgaaacaguuauagaauuucaacaaaaaaacaaccgccuacuagaaaucacuagagaauuuucaguaaaugcaggcguaaccacaccagucucuaccuauaugcuuaccaacucugaauuauuaucacuuauaaacgacaugcccauaacaaaugaucaaaaaaaacuaaugagcaacaacguacaaauaguaagacaacaaagcuacagcauuauguguauaauaaaagaagaaguguuagcuuauguaguccaacuaccccucuauggcguuaucgauacaccaugcuggaaauuacacacaagcccucuaugcacaacuaacaccaaagaaggcucuaacauaugcuuaacaagaacagauagaggaugguauugcgauaacgcaggaucaguaucauucuuuccacaagcagaaacauguaaaguacaaucuaaccgaguauucugcgacacaaugaacucuagaacacuacccucagaaguuaaucucuguaauauugacauuuucaauccaaaauacgauugcaaaauaaugaccucuaaaaccgacguaucauccucaguuauaacguccuuaggagcaaucguaagcugcuauggcaaaacaaaauguaccgcaucaaacaaaugcagaggaauaauaaaaacauucucaaacggcugugacuacguaagcaauaaagguguugacacaguuucaguaggaaauacacuauacuauguaaauaaacaagaaggaaaaucucucuauguaaaaggagaacccauaauaaacuucuacgacccacucguauuuccaagcgaugaauuugaugcgagcauuucccagguaaaugaaaaaauaaaucaaucacuagcauucaucagaaaaagugaugaauuacuacacaauguuaacguaggaaaaucaacaacaaauaucaugauaacaacaaucauaauagucauaaucguaauauuacuauuacuaauagcaguagguuuauuucuauacuguaaagcaagguaaggacuaguuauaagacugacuagcccgaugggccucccaacgggcccuccuccccuccuugcaccgagauuaauaaaaaaaaaaaaaaaaaaaaaaaaaaaaaaaaaaaaaaaaaaaaaaaaaaaaaaaaaaaaaaaaugcaucccccccccccccccccccccccccccccccaaaggcucuuuucagagccaccagaauu

SEQ ID NO: 17629 - RNA, 1765 nt, Artificial Sequence
  mRNA product Design i-3 comprising derived and/or modified sequence from HRSV(Memphis-37)__AIY60640.1__F-del_DSCav1_mut5 (opt11)
gggagaaagcuuaccauggaacuucccauccuaaaaaccaacgccauaacaacaauccucgcagcagucacccucugcuucgccucuucacaaaacaucaccgaagaauuuuaccaaucaaccugcuccgccguguccaaaggcuaccucucagcacugcgcacaggaugguauaccagcguaaucaccaucgaacucuccaacaucaaggaaaacaaaugcaacggcaccgaugccaaagucaaacucaucaagcaagaacuugacaaauacaaaaacgccgugaccgagcuacaacuccucaugcaguccacuccagccgccggcuccggcagcgccaucgccuccggcaucgccguaugcaaaguccuccaccucgaaggcgaaguaaacaaaaucaagaacgcacuccuaagcaccaacaaagccgucgucucacucuccgguugcggcgucagcguccuaacauucaaaguucucgaccucaaaaacuacauagacaaacaacuccuccccauccucaacaaacaauccugcuccauaucaaacaucgaaaccguuaucgaauuucaacaaaaaaacaaccgccuccuagaaaucacccgcgaauuuuccgucaacgcaggcgucaccacccccguuuccaccuauaugcucaccaacuccgaacuccucucccucaucaacgacaugcccauuaccaacgaccaaaagaaacuuaugagcaacaacguucaaaucguccgacaacaaucauacuccaucaugugcauuaucaaagaagaaguacucgccuacguaguacaauuaccccucuacggcguaaucgacaccccaugcuggaaacuacacaccuccccccucuguaccaccaacaccaaagaaggcucuaacaucugccucacccgcacagaccguggcugguauugcgauaacgcagggucugucuccuucuucccccaagccgaaacaugcaaaguccaauccaacagagucuucugcgacaccaugaacucgagaacccuccccuccgaagucaaccuaugcaacaucgacaucuucaacccaaaauacgacugcaaaaucaugacuucaaaaacagacgugagcucguccgucaucacaagccuaggagcuaucguauccugcuacggaaaaacaaaaugcacugcuuccaacaaaugccgcggaaucauaaaaaccuucuccaacggcugcgacuacgucagcaacaaaggcgucgacacagucuccguaggcaacacccuauacuacgucaauaaacaagaaggcaagucccuauaugucaaaggcgagcccaucaucaauuucuaugauccccucguuuucccauccgacgaauuugacgcauccaucucccaagucaacgaaaaaauaaaccaaagccucgcauucauccgcaaauccgacgaacuccuccacaacguaaacguaggaaaauccacaacuaacaucaugaucaccaccaucaucaucgucauuaucgucauccuacuccuccucauagcagucggccucuuccucuacugcaaagcacgcuagggacuaguuauaagacugacuagcccgaugggccucccaacgggcccuccuccccuccuugcaccgagauuaauaaaaaaaaaaaaaaaaaaaaaaaaaaaaaaaaaaaaaaaaaaaaaaaaaaaaaaaaaaaaaaaaugcaucccccccccccccccccccccccccccccccaaaggcucuuuucagagccaccagaauu

SEQ ID NO: 17630 - protein, 535 aa, Artificial Sequence
  derived and/or modified protein sequence (artificial) from HRSV(Memphis-37)__AIY60640.1__F_DSCav1_mut6
MELPILKTNAITTILAAVTLCFASSQNITEEFYQSTCSAVSKGYLGALRTGWYTSVITIELSNIKENKCNGTDAKVKLIKQELDKYKNAVTDLQMLMCSTPAAGSGSAIASGIAVCKVLHLEGEVNKIKNALLSTNKAVVSLSNGVSVLTFKVLDLKNYIDKQLLPILNKQSCSIPNPETVMEFQQKNNRLLEITREFSVNAGVTTPVSTYMLTNSELLSLINDMPITNDQKKLMSNNVQIVRQQSYSIMCIIKEEVLAYVVQLPLYGVIDTPCWKLHTSPLCTTNTKEGSNICLTRTDRGWYCDNAGSVSFFPQAETCKVCSNRVFCDTMNSLTLPSEVNLCNIDIFNPKYDCKIMTSKTDVSSSVITSLGAIVSCYGKTKCTASNKNKGIIKTFSNGCDYVSNKGVDTVSVGNTLYYVNKQEGQSLYVKGEPIINFYDPLVFPSDEFDASISQVNEKINQSLAFIRKSDELLHNVNVGKSTTNIMITTIIIVIIVILLLLIAVGLFLYCKARSTPVTLSKDQLSGINNIAFSN

SEQ ID NO: 17631 - RNA, 1608 nt, Artificial Sequence
  derived and/or modified CDS sequence (opt1) from HRSV(Memphis-37)__AIY60640.1__F_DSCav1_mut6
auggagcugcccauccucaagaccaacgccaucaccacgauccuggccgcggugacccugugcuucgccagcucccagaacaucaccgaggaguucuaccagagcacgugcuccgccgucagcaagggcuaccucggcgcccugcgcaccgggugguacaccagcgugaucaccaucgagcuguccaacaucaaggagaacaagugcaacggcaccgacgccaaggugaagcucaucaagcaggagcuggacaaguacaagaacgcggucacggaccugcagaugcugaugugcagcaccccggccgccggcuccgggagcgcgaucgccuccggcaucgccgucugcaaggugcugcaccucgagggcgaggugaacaagaucaagaacgcccugcuguccaccaacaaggccgucgugagccucuccaacggggugagcguccugaccuucaaggugcuggaccucaagaacuacaucgacaagcagcugcugcccauccugaacaagcagagcugcuccauccccaaccccgagaccgucauggaguuccagcagaagaacaaccgccuccuggagaucacgcgggaguucagcgugaacgcgggcgugaccacccccgucuccaccuacaugcugacgaacagcgagcuccugucccugaucaacgacaugccgaucaccaacgaccagaagaagcucaugagcaacaacgugcagaucgugcgccagcaguccuacagcaucaugugcaucaucaaggaggagguccuggccuacguggugcagcugccccucuacggggucaucgacacccccugcuggaagcugcacaccagcccccugugcacgaccaacaccaaggagggcuccaacaucugccucacccggacggaccgcgggugguacugcgacaacgccggcagcguguccuucuucccgcaggccgagaccugcaaggucugcagcaaccggguguucugcgacaccaugaacucccugacccugcccagcgaggugaaccucugcaacaucgacaucuucaaccccaaguacgacugcaagaucaugacguccaagaccgacgucagcuccagcgugaucaccucccugggcgccaucgugagcugcuacgggaagaccaagugcacggcgagcaacaagaacaagggcaucaucaagaccuucuccaacgggugcgacuacgucagcaacaagggcguggacaccguguccgucggcaacacccuguacuacgugaacaagcaggagggccagagccucuacgugaagggggagcccaucaucaacuucuacgacccgcuggucuuccccuccgacgaguucgacgccagcaucucccaggugaacgagaagaucaaccagagccuggccuucauccggaaguccgacgagcuccugcacaacgugaacgucggcaagagcaccacgaacaucaugaucaccaccaucaucaucgugaucaucgugauccugcugcuccugaucgccgucgggcuguuccucuacugcaaggcccgcuccacccccgugacgcugagcaaggaccagcuguccgggaucaacaacaucgcguucagcaacuga

SEQ ID NO: 17632 - RNA, 1608 nt, Artificial Sequence
  derived and/or modified CDS sequence (opt1) from HRSV(Memphis-37)__AIY60640.1__F_DSCav1_mut6
auggagcugcccauccucaagaccaacgccaucaccacgauccuggccgcggugacccugugcuucgccagcucccagaacaucaccgaggaguucuaccagagcacgugcuccgccgucagcaagggcuaccucggggcccugcgcaccggcugguacaccuccgugaucaccaucgagcugagcaacaucaaggagaacaagugcaacgggaccgacgccaaggugaagcucaucaagcaggagcuggacaaguacaagaacgcggucacggaccugcagaugcucaugugcuccaccccggccgccggcagcggguccgccaucgcgagcggcaucgccgugugcaaggugcugcaccuggagggcgaggucaacaagaucaagaacgcccuccuguccaccaacaaggccguggugagccuguccaacggggucagcgugcucaccuucaaggugcuggaccugaagaacuacaucgacaagcagcuccugcccauccugaacaagcaguccugcagcauccccaaccccgagacggucauggaguuccagcagaagaacaaccggcuccuggagaucacccgcgaguucuccgugaacgccggcgugaccaccccggucagcacguacaugcugaccaacuccgagcuccugagccugaucaacgacaugcccaucaccaacgaccagaagaagcucaugagcaacaacgugcagaucgugcggcagcaguccuacagcaucaugugcaucaucaaggaggagguccuggcguacguggugcagcugccccucuacggggucaucgacacccccugcuggaagcugcacacguccccgcugugcaccaccaacaccaaggagggcagcaacaucugccucacgcgcaccgaccgggggugguacugcgacaacgccggcuccgugagcuucuucccccaggccgagaccugcaaggugugcuccaaccgcgucuucugcgacaccaugaacagccugacgcugcccuccgaggugaaccucugcaacaucgacaucuucaaccccaaguacgacugcaagaucaugaccagcaagaccgacgucuccagcuccgugaucaccagccugggcgccaucguguccugcuacgggaagacgaagugcaccgccagcaacaagaacaagggcaucaucaagaccuucuccaacgggugcgacuacgucagcaacaagggcguggacaccguguccgucggcaacacgcuguacuacgugaacaagcaggaggggcagagccucuacgugaagggcgagccgaucaucaacuucuacgacccccuggucuuccccagcgacgaguucgacgcguccaucagccaggugaacgagaagaucaaccagucccuggccuucauccgcaagagcgacgagcuccugcacaacgugaacgucgggaaguccaccaccaacaucaugaucaccaccaucaucaucgugaucaucgugauccugcuccugcugaucgccgucggccucuuccuguacugcaaggcccggagcacgcccgugacccuguccaaggaccagcugagcgggaucaacaacaucgccuucuccaacuga

SEQ ID NO: 17633 - RNA, 1608 nt, Artificial Sequence
  derived and/or modified CDS sequence (opt2) from HRSV(Memphis-37)__AIY60640.1__F_DSCav1_mut6
auggagcuccccauccucaagaccaacgccaucaccaccauccucgccgccgucacccucugcuucgccuccucccagaacaucaccgaggaguucuaccaguccaccugcuccgccgucuccaagggcuaccucggcgcccuccgcaccggcugguacaccuccgucaucaccaucgagcucuccaacaucaaggagaacaagugcaacggcaccgacgccaaggucaagcucaucaagcaggagcucgacaaguacaagaacgccgucaccgaccuccagaugcucaugugcuccacccccgccgccggcuccggcuccgccaucgccuccggcaucgccgucugcaagguccuccaccucgagggcgaggucaacaagaucaagaacgcccuccucuccaccaacaaggccgucgucucccucuccaacggcgucuccguccucaccuucaagguccucgaccucaagaacuacaucgacaagcagcuccuccccauccucaacaagcaguccugcuccauccccaaccccgagaccgucauggaguuccagcagaagaacaaccgccuccucgagaucacccgcgaguucuccgucaacgccggcgucaccacccccgucuccaccuacaugcucaccaacuccgagcuccucucccucaucaacgacaugcccaucaccaacgaccagaagaagcucauguccaacaacguccagaucguccgccagcaguccuacuccaucaugugcaucaucaaggaggagguccucgccuacgucguccagcucccccucuacggcgucaucgacacccccugcuggaagcuccacaccuccccccucugcaccaccaacaccaaggagggcuccaacaucugccucacccgcaccgaccgcggcugguacugcgacaacgccggcuccgucuccuucuucccccaggccgagaccugcaaggucugcuccaaccgcgucuucugcgacaccaugaacucccucacccuccccuccgaggucaaccucugcaacaucgacaucuucaaccccaaguacgacugcaagaucaugaccuccaagaccgacgucuccuccuccgucaucaccucccucggcgccaucgucuccugcuacggcaagaccaagugcaccgccuccaacaagaacaagggcaucaucaagaccuucuccaacggcugcgacuacgucuccaacaagggcgucgacaccgucuccgucggcaacacccucuacuacgucaacaagcaggagggccagucccucuacgucaagggcgagcccaucaucaacuucuacgacccccucgucuuccccuccgacgaguucgacgccuccaucucccaggucaacgagaagaucaaccagucccucgccuucauccgcaaguccgacgagcuccuccacaacgucaacgucggcaaguccaccaccaacaucaugaucaccaccaucaucaucgucaucaucgucauccuccuccuccucaucgccgucggccucuuccucuacugcaaggcccgcuccacccccgucacccucuccaaggaccagcucuccggcaucaacaacaucgccuucuccaacuga

SEQ ID NO: 17634 - RNA, 1608 nt, Artificial Sequence
  derived and/or modified CDS sequence (opt3) from HRSV(Memphis-37)__AIY60640.1__F_DSCav1_mut6
auggagcugcccauccucaagaccaacgccauuacaacuauacuugcugcagugacgcugugcuucgccagcucccagaauaucaccgaagaguuuuaccaaucuacauguucagcggucaguaaaggcuauuugggggcuuuaagaacuggaugguacaccagcguuauuacaaucgaacuguccaacauuaaggagaauaaaugcaacgguaccgacgccaaggugaaacuaaucaagcaggaacucgauaaguauaaaaaugcaguaacugaccugcagaugcuuauguguucuacuccugccgcuggcucggggucagcaauagccagcggaaucgcugugugcaagguccugcacuuggagggcgaggugaacaaaauuaagaaugcccuccugaguaccaacaaagcgguugugucccugucuaauggugucagcgugcucacguucaagguauuagaucugaagaacuacaucgacaaacagcuuuugccaauucugaauaagcaauccuguucaaucccgaaccccgaaacuguuauggaguuucagcagaaaaauaacaggcuacucgaaauaacccgggaguucagugugaaugcaggggucacaacuccugugagcaccuauaugcugacaaacucugagcuucuguccuugauuaacgauaugccaaucaccaaugaccagaagaaacucaugucaaacaaugugcaaauuguccgccagcagagcuacaguaucaugugcaucauuaaggaagagguucuggccuaugugguacaguuaccccuguacggagugauagauacgccuuguuggaaacuccauacuucuccacuuugcacaaccaacacuaaggaaggcuccaauaucugucugacacgaaccgaccguggcugguacugcgauaacgcugggagcgucucguuuuucccccaagccgagacguguaaggugugcucuaauagaguuuucugcgacaccaugaacuccuugacacuaccuucagaagugaaucuguguaacauugauaucuucaauccaaaauaugacugcaagauaaugacaaguaaaaccgaugucagcuccucugugauuacaagccucggagcaaucguaucauguuacgguaagacuaaaugcaccgcuaguaacaagaauaagggcaucauuaaaacauuuuccaacgggugugacuauguuagcaauaagggaguggacaccgucucugugggcaacacucuguacuaugucaacaaacaggagggucagucacuuuacgugaagggggagccgaucauuaauuucuaugauccccugguuuuuccuagugacgaauuugaugccagcauaucccaagugaacgagaaaaucaaucagucuuuggcguuuauuaggaagucggacgaacuccugcacaacguaaaugucggaaagagcacgacaaacaucaugaucaccacuauuauaaucgugauuaucguuauuuuacugcuacucaucgccgugggccuguuccuuuacugcaaagcacgguccaccccagucacauugucaaaggaucagcugaguggcauaaauaacaucgcuuucucuaauuga

SEQ ID NO: 17635 - RNA, 1608 nt, Artificial Sequence
  derived and/or modified CDS sequence (opt4) from HRSV(Memphis-37)__AIY60640.1__F_DSCav1_mut6
auggagcugcccauccugaagaccaacgccaucaccaccauccuggccgccgugacccugugcuucgccagcagccagaacaucaccgaggaguucuaccagagcaccugcagcgccgugagcaagggcuaccugggcgcccugagaaccggcugguacaccagcgugaucaccaucgagcugagcaacaucaaggagaacaagugcaacggcaccgacgccaaggugaagcugaucaagcaggagcuggacaaguacaagaacgccgugaccgaccugcagaugcugaugugcagcacccccgccgccggcagcggcagcgccaucgccagcggcaucgccgugugcaaggugcugcaccuggagggcgaggugaacaagaucaagaacgcccugcugagcaccaacaaggccguggugagccugagcaacggcgugagcgugcugaccuucaaggugcuggaccugaagaacuacaucgacaagcagcugcugcccauccugaacaagcagagcugcagcauccccaaccccgagaccgugauggaguuccagcagaagaacaacagacugcuggagaucaccagagaguucagcgugaacgccggcgugaccacccccgugagcaccuacaugcugaccaacagcgagcugcugagccugaucaacgacaugcccaucaccaacgaccagaagaagcugaugagcaacaacgugcagaucgugagacagcagagcuacagcaucaugugcaucaucaaggaggaggugcuggccuacguggugcagcugccccuguacggcgugaucgacacccccugcuggaagcugcacaccagcccccugugcaccaccaacaccaaggagggcagcaacaucugccugaccagaaccgacagaggcugguacugcgacaacgccggcagcgugagcuucuucccccaggccgagaccugcaaggugugcagcaacagaguguucugcgacaccaugaacagccugacccugcccagcgaggugaaccugugcaacaucgacaucuucaaccccaaguacgacugcaagaucaugaccagcaagaccgacgugagcagcagcgugaucaccagccugggcgccaucgugagcugcuacggcaagaccaagugcaccgccagcaacaagaacaagggcaucaucaagaccuucagcaacggcugcgacuacgugagcaacaagggcguggacaccgugagcgugggcaacacccuguacuacgugaacaagcaggagggccagagccuguacgugaagggcgagcccaucaucaacuucuacgacccccugguguuccccagcgacgaguucgacgccagcaucagccaggugaacgagaagaucaaccagagccuggccuucaucagaaagagcgacgagcugcugcacaacgugaacgugggcaagagcaccaccaacaucaugaucaccaccaucaucaucgugaucaucgugauccugcugcugcugaucgccgugggccuguuccuguacugcaaggccagaagcacccccgugacccugagcaaggaccagcugagcggcaucaacaacaucgccuucagcaacuga

SEQ ID NO: 17636 - RNA, 1608 nt, Artificial Sequence
  derived and/or modified CDS sequence (opt5) from HRSV(Memphis-37)__AIY60640.1__F_DSCav1_mut6
auggagcugcccauccucaagaccaacgccauuacaacgauccuggcugccgugacccuuugcuucgcgagcucccagaauauuacagaagaguuuuaccaaucuaccuguagcgcugucuccaaaggcuaucugggggcccucagaacaggaugguacaccucuguuaucacaauugaacugagcaacaucaaggagaauaaaugcaacggcaccgacgccaaggugaaacuuaucaagcaggaacuggauaaguauaaaaaugcugugacggaccuccagaugcugauguguuccaccccugccgcugggucuggaagcgccauugcguccggcaucgccgucugcaaggugcugcaccucgagggggagguuaacaaaauuaagaaugcucugcuuagcacaaacaaagccguggucucucuguccaauggagugagcguucucaccuucaaggugcuggaucuuaagaacuacaucgacaaacagcugcucccgauucugaauaagcaaucuuguuccauccccaacccugaaacagucauggaguuucagcagaaaaauaaccggcugcucgaaauuacccgcgaguucagcgugaaugcuggcgugacgacacccgucucuaccuauaugcugacaaacuccgagcuucugagccucaucaacgauaugccuaucaccaaugaccagaagaaacugauguccaacaauguucaaauugugagacagcagucuuacagcaucaugugcauuaucaaggaagaggugcuugccuaugucgugcagcugccccucuacggcguuauugauaccccuuguuggaaacugcauacauccccgcugugcacgaccaacacaaaggaagggagcaauaucugucucacccggacagaccgcggaugguacugcgauaacgcgggcucuguguccuuuuucccccaagccgagaccuguaaggucugcagcaauagaguguuuugcgacacgaugaacucucugacacuuccuagcgaaguuaaucuguguaacaucgauauuuucaaucccaaauaugacugcaagaucaugaccuccaaaaccgaugugucuagcuccgucauuacaagccucggggcuaucgugucuuguuacggaaagaccaaaugcacagccuccaacaagaauaagggcauuaucaaaacguuuagcaacgggugugacuaugucucuaauaagggaguggacaccguuuccgugggcaacacacuguacuaugucaacaaacaggagggccagagccuuuacgugaagggggagccuaucauuaauuucuaugauccccugguuuuuccguccgacgaauuugaugcuucuaucagccaagugaacgagaaaauuaaucagucccucgccuucauccggaagucugacgaacugcugcacaacgucaaugugggaaagagcaccacaaacauuaugaucaccacgauuaucaucgugauuaucguuauucuccugcuucugaucgccgucggccucuuccuguacugcaaagcucgcuccaccccugugacacugagcaaggaucagcuuucugggauuaauaacaucgcguucuccaauuga

SEQ ID NO: 17637 - RNA, 1608 nt, Artificial Sequence
  derived and/or modified CDS sequence (opt6) from HRSV(Memphis-37)__AIY60640.1__F_DSCav1_mut6
auggaacuaccaauuuuaaaaacaaacgcaauuacaacuauacucgcagcaguaacauuauguuucgccucaucccaaaacauaacagaagaauuuuaccaaucaacaugcagcgcaguaucaaaaggauaucucggagcauuacgaacagguugguacacaucuguaaucacuauagaacuaucaaacauaaaagaaaacaaaugcaauggaaccgacgcaaaaguaaaauuaauaaaacaagaacucgauaaauacaaaaaugcaguaacagaccuccaaaugcucauguguucaacaccagccgcaggaucagguuccgccauagcaucuggcauagcaguaugcaaaguacuccacuuagaaggagaaguuaacaaaauaaaaaacgcacuauuaucaacaaacaaagcaguaguaucccucucaaacggagucucaguauuaacauucaaaguauuagaccuaaaaaacuacauagacaaacaacuacuuccaauacucaacaaacaaucaugcucaauaccaaacccagaaaccguaauggaauuucaacaaaaaaacaaccgacuacuagaaaucacacgagaauuuucaguaaacgccggugucacaacuccaguaucaacuuauauguuaaccaacucagaacuauuaucauuaauaaacgauaugcccauaacuaacgaccaaaaaaaauuaaugucaaacaacguacaaauaguacgccaacaaaguuacucaauaaugugcaucauaaaagaagaaguauuagcguacguuguacaacuaccucuauacggagucauagacacaccaugcuggaaacuucacacaucaccacuauguacaacaaacacaaaagaaggcaguaacauaugccuaacaagaacagaccguggaugguauugugacaacgcuggaucuguaucauucuucccucaagcagaaaccuguaaaguuugcucaaacagagucuucugugacacaaugaacucucuaacacuaccuuccgaagugaaccucuguaacauagacauauucaauccaaaauaugauugcaaaauaaugacuucaaaaacagauguaucauccucuguuauaacaucauuaggcgccauaguuucaugcuacggaaaaacuaaaugcacagcaucaaacaaaaacaaaggaauaauaaaaaccuucucaaauggaugcgacuacguaagcaacaaaggcguagacacaguaucaguagguaauacauuauacuacguaaacaaacaagaaggacaaucacuuuauguuaaaggagaaccuauaauaaacuucuacgacccacuuguauuuccauccgaugaauuugacgcaucuauaucacaagucaacgaaaaaauaaaccaaucauuagcauucauucgaaaauccgaugaacuacuccauaacguaaaugucggaaaaucaacaaccaacauaaugaucacaacaauaaucauagugauaauaguaauacuccuacuacuaaucgcaguaggucuauuccuauauuguaaagcaagaucuacuccaguuacacucucuaaagaccaauuaagcgguaucaacaacaucgccuucagcaauuaa

SEQ ID NO: 17638 - RNA, 1608 nt, Artificial Sequence
  derived and/or modified CDS sequence (opt11) from HRSV(Memphis-37)__AIY60640.1__F_DSCav1_mut6
auggagcugcccauccucaagaccaacgccaucaccacgauccuggccgcggugacccugugcuucgcgagcucccaaaacaucaccgaggaguucuaccagagcacgugcuccgccgucagcaagggcuaccucggggcccugcgcaccggcugguacaccuccgugaucaccaucgagcugagcaacaucaaggaaaacaagugcaacgggacggacgcaaaggugaagcucaucaagcaggagcuggauaaguacaagaacgcggucacggaccugcagaugcucaugugcuccaccccggccgccggcagcggguccgccaucgcguccggcaucgccgugugcaagguguugcaccuggagggcgaggucaacaagaucaagaacgcccuccuuuccaccaauaaggcuguugugagccuguccaacggggucagcgugcucaccuucaaggugcuggaccugaagaacuacaucgacaagcagcuccugcccauccugaacaagcaguccugcagcauccccaaccccgagacagucauggaguuccagcagaagaacaaccggcuccuggagaucacccgcgaguucuccguuaacgccggggugaccaccccgguaagcacauacaugcugaccaacagcgagcuccugagccugaucaacgacaugcccaucaccaacgaccagaagaagcucaugagcaacaacgugcagaucgugcggcagcaguccuacagcaucaugugcaucaucaaggaggagguccuggcguacguggugcaacugccccucuacggggucaucgacacccccugcuggaagcugcacacguccccgcugugcaccaccaacaccaaggagggcagcaacaucugccucacgcgcaccgaccgggggugguacugcgacaacgcaggcuccgugagcuucuucccccaggccgagaccugcaaggugugcuccaaccgcgucuucugcgacaccaugaacagccugacgcugcccuccgaggugaaccucugcaacaucgacaucuucaaccccaaguacgacuguaagaucaugaccagcaagaccgaugucuccagcuccgugaucaccagccugggcgccauaguguccuguuaugggaagacgaagugcaccgccagcaacaagaacaaaggcaucaucaagaccuucuccaacgggugcgacuacgucagcaacaagggcguggacacaguguccgucggcaacacgcuguacuacgugaacaagcaggaggggcagagccucuacgugaagggcgagccgaucaucaacuucuacgauccccuggucuuccccagcgacgaguucgacgcguccaucagccaagugaacgagaagaucaaccagucccuggccuucauccgcaagagcgacgagcuccugcacaacgugaacgucgggaaguccaccaccaacaucaugaucaccaccaucaucaucgugaucaucgucauccugcuccugcugaucgccgucggccucuuccuguacugcaaggcccggagcacgcccgugacccuguccaaggaccagcugucgggcaucaacaacaucgccuucuccaacuga

SEQ ID NO: 17639 - RNA, 1884 nt, Artificial Sequence
  mRNA product Design a-1 comprising derived and/or modified sequence from HRSV(Memphis-37)__AIY60640.1__F_DSCav1_mut6 (opt1)
gggagagucccgcagucggcguccagcggcucugcuuguucgugugugugucguugcaggccuuauucaagcuuaccauggagcugcccauccucaagaccaacgccaucaccacgauccuggccgcggugacccugugcuucgccagcucccagaacaucaccgaggaguucuaccagagcacgugcuccgccgucagcaagggcuaccucggcgcccugcgcaccgggugguacaccagcgugaucaccaucgagcuguccaacaucaaggagaacaagugcaacggcaccgacgccaaggugaagcucaucaagcaggagcuggacaaguacaagaacgcggucacggaccugcagaugcugaugugcagcaccccggccgccggcuccgggagcgcgaucgccuccggcaucgccgucugcaaggugcugcaccucgagggcgaggugaacaagaucaagaacgcccugcuguccaccaacaaggccgucgugagccucuccaacggggugagcguccugaccuucaaggugcuggaccucaagaacuacaucgacaagcagcugcugcccauccugaacaagcagagcugcuccauccccaaccccgagaccgucauggaguuccagcagaagaacaaccgccuccuggagaucacgcgggaguucagcgugaacgcgggcgugaccacccccgucuccaccuacaugcugacgaacagcgagcuccugucccugaucaacgacaugccgaucaccaacgaccagaagaagcucaugagcaacaacgugcagaucgugcgccagcaguccuacagcaucaugugcaucaucaaggaggagguccuggccuacguggugcagcugccccucuacggggucaucgacacccccugcuggaagcugcacaccagcccccugugcacgaccaacaccaaggagggcuccaacaucugccucacccggacggaccgcgggugguacugcgacaacgccggcagcguguccuucuucccgcaggccgagaccugcaaggucugcagcaaccggguguucugcgacaccaugaacucccugacccugcccagcgaggugaaccucugcaacaucgacaucuucaaccccaaguacgacugcaagaucaugacguccaagaccgacgucagcuccagcgugaucaccucccugggcgccaucgugagcugcuacgggaagaccaagugcacggcgagcaacaagaacaagggcaucaucaagaccuucuccaacgggugcgacuacgucagcaacaagggcguggacaccguguccgucggcaacacccuguacuacgugaacaagcaggagggccagagccucuacgugaagggggagcccaucaucaacuucuacgacccgcuggucuuccccuccgacgaguucgacgccagcaucucccaggugaacgagaagaucaaccagagccuggccuucauccggaaguccgacgagcuccugcacaacgugaacgucggcaagagcaccacgaacaucaugaucaccaccaucaucaucgugaucaucgugauccugcugcuccugaucgccgucgggcuguuccucuacugcaaggcccgcuccacccccgugacgcugagcaaggaccagcuguccgggaucaacaacaucgcguucagcaacugaggacuagucccuguucccagagcccacuuuuuuuucuuuuuuugaaauaaaauagccugucuuucagaucuaaaaaaaaaaaaaaaaaaaaaaaaaaaaaaaaaaaaaaaaaaaaaaaaaaaaaaaaaaaaaaaaugcaucccccccccccccccccccccccccccccccaaaggcucuuuucagagccaccagaauu

SEQ ID NO: 17640 - RNA, 1884 nt, Artificial Sequence
  mRNA product Design a-1 comprising derived and/or modified sequence from HRSV(Memphis-37)__AIY60640.1__F_DSCav1_mut6 (opt1)
gggagagucccgcagucggcguccagcggcucugcuuguucgugugugugucguugcaggccuuauucaagcuuaccauggagcugcccauccucaagaccaacgccaucaccacgauccuggccgcggugacccugugcuucgccagcucccagaacaucaccgaggaguucuaccagagcacgugcuccgccgucagcaagggcuaccucggggcccugcgcaccggcugguacaccuccgugaucaccaucgagcugagcaacaucaaggagaacaagugcaacgggaccgacgccaaggugaagcucaucaagcaggagcuggacaaguacaagaacgcggucacggaccugcagaugcucaugugcuccaccccggccgccggcagcggguccgccaucgcgagcggcaucgccgugugcaaggugcugcaccuggagggcgaggucaacaagaucaagaacgcccuccuguccaccaacaaggccguggugagccuguccaacggggucagcgugcucaccuucaaggugcuggaccugaagaacuacaucgacaagcagcuccugcccauccugaacaagcaguccugcagcauccccaaccccgagacggucauggaguuccagcagaagaacaaccggcuccuggagaucacccgcgaguucuccgugaacgccggcgugaccaccccggucagcacguacaugcugaccaacuccgagcuccugagccugaucaacgacaugcccaucaccaacgaccagaagaagcucaugagcaacaacgugcagaucgugcggcagcaguccuacagcaucaugugcaucaucaaggaggagguccuggcguacguggugcagcugccccucuacggggucaucgacacccccugcuggaagcugcacacguccccgcugugcaccaccaacaccaaggagggcagcaacaucugccucacgcgcaccgaccgggggugguacugcgacaacgccggcuccgugagcuucuucccccaggccgagaccugcaaggugugcuccaaccgcgucuucugcgacaccaugaacagccugacgcugcccuccgaggugaaccucugcaacaucgacaucuucaaccccaaguacgacugcaagaucaugaccagcaagaccgacgucuccagcuccgugaucaccagccugggcgccaucguguccugcuacgggaagacgaagugcaccgccagcaacaagaacaagggcaucaucaagaccuucuccaacgggugcgacuacgucagcaacaagggcguggacaccguguccgucggcaacacgcuguacuacgugaacaagcaggaggggcagagccucuacgugaagggcgagccgaucaucaacuucuacgacccccuggucuuccccagcgacgaguucgacgcguccaucagccaggugaacgagaagaucaaccagucccuggccuucauccgcaagagcgacgagcuccugcacaacgugaacgucgggaaguccaccaccaacaucaugaucaccaccaucaucaucgugaucaucgugauccugcuccugcugaucgccgucggccucuuccuguacugcaaggcccggagcacgcccgugacccuguccaaggaccagcugagcgggaucaacaacaucgccuucuccaacugaggacuagucccuguucccagagcccacuuuuuuuucuuuuuuugaaauaaaauagccugucuuucagaucuaaaaaaaaaaaaaaaaaaaaaaaaaaaaaaaaaaaaaaaaaaaaaaaaaaaaaaaaaaaaaaaaugcaucccccccccccccccccccccccccccccccaaaggcucuuuucagagccaccagaauu

SEQ ID NO: 17641 - RNA, 1884 nt, Artificial Sequence
  mRNA product Design a-1 comprising derived and/or modified sequence from HRSV(Memphis-37)__AIY60640.1__F_DSCav1_mut6 (opt2)
gggagagucccgcagucggcguccagcggcucugcuuguucgugugugugucguugcaggccuuauucaagcuuaccauggagcuccccauccucaagaccaacgccaucaccaccauccucgccgccgucacccucugcuucgccuccucccagaacaucaccgaggaguucuaccaguccaccugcuccgccgucuccaagggcuaccucggcgcccuccgcaccggcugguacaccuccgucaucaccaucgagcucuccaacaucaaggagaacaagugcaacggcaccgacgccaaggucaagcucaucaagcaggagcucgacaaguacaagaacgccgucaccgaccuccagaugcucaugugcuccacccccgccgccggcuccggcuccgccaucgccuccggcaucgccgucugcaagguccuccaccucgagggcgaggucaacaagaucaagaacgcccuccucuccaccaacaaggccgucgucucccucuccaacggcgucuccguccucaccuucaagguccucgaccucaagaacuacaucgacaagcagcuccuccccauccucaacaagcaguccugcuccauccccaaccccgagaccgucauggaguuccagcagaagaacaaccgccuccucgagaucacccgcgaguucuccgucaacgccggcgucaccacccccgucuccaccuacaugcucaccaacuccgagcuccucucccucaucaacgacaugcccaucaccaacgaccagaagaagcucauguccaacaacguccagaucguccgccagcaguccuacuccaucaugugcaucaucaaggaggagguccucgccuacgucguccagcucccccucuacggcgucaucgacacccccugcuggaagcuccacaccuccccccucugcaccaccaacaccaaggagggcuccaacaucugccucacccgcaccgaccgcggcugguacugcgacaacgccggcuccgucuccuucuucccccaggccgagaccugcaaggucugcuccaaccgcgucuucugcgacaccaugaacucccucacccuccccuccgaggucaaccucugcaacaucgacaucuucaaccccaaguacgacugcaagaucaugaccuccaagaccgacgucuccuccuccgucaucaccucccucggcgccaucgucuccugcuacggcaagaccaagugcaccgccuccaacaagaacaagggcaucaucaagaccuucuccaacggcugcgacuacgucuccaacaagggcgucgacaccgucuccgucggcaacacccucuacuacgucaacaagcaggagggccagucccucuacgucaagggcgagcccaucaucaacuucuacgacccccucgucuuccccuccgacgaguucgacgccuccaucucccaggucaacgagaagaucaaccagucccucgccuucauccgcaaguccgacgagcuccuccacaacgucaacgucggcaaguccaccaccaacaucaugaucaccaccaucaucaucgucaucaucgucauccuccuccuccucaucgccgucggccucuuccucuacugcaaggcccgcuccacccccgucacccucuccaaggaccagcucuccggcaucaacaacaucgccuucuccaacugaggacuagucccuguucccagagcccacuuuuuuuucuuuuuuugaaauaaaauagccugucuuucagaucuaaaaaaaaaaaaaaaaaaaaaaaaaaaaaaaaaaaaaaaaaaaaaaaaaaaaaaaaaaaaaaaaugcaucccccccccccccccccccccccccccccccaaaggcucuuuucagagccaccagaauu

SEQ ID NO: 17642 - RNA, 1884 nt, Artificial Sequence
  mRNA product Design a-1 comprising derived and/or modified sequence from HRSV(Memphis-37)__AIY60640.1__F_DSCav1_mut6 (opt3)
gggagagucccgcagucggcguccagcggcucugcuuguucgugugugugucguugcaggccuuauucaagcuuaccauggagcugcccauccucaagaccaacgccauuacaacuauacuugcugcagugacgcugugcuucgccagcucccagaauaucaccgaagaguuuuaccaaucuacauguucagcggucaguaaaggcuauuugggggcuuuaagaacuggaugguacaccagcguuauuacaaucgaacuguccaacauuaaggagaauaaaugcaacgguaccgacgccaaggugaaacuaaucaagcaggaacucgauaaguauaaaaaugcaguaacugaccugcagaugcuuauguguucuacuccugccgcuggcucggggucagcaauagccagcggaaucgcugugugcaagguccugcacuuggagggcgaggugaacaaaauuaagaaugcccuccugaguaccaacaaagcgguugugucccugucuaauggugucagcgugcucacguucaagguauuagaucugaagaacuacaucgacaaacagcuuuugccaauucugaauaagcaauccuguucaaucccgaaccccgaaacuguuauggaguuucagcagaaaaauaacaggcuacucgaaauaacccgggaguucagugugaaugcaggggucacaacuccugugagcaccuauaugcugacaaacucugagcuucuguccuugauuaacgauaugccaaucaccaaugaccagaagaaacucaugucaaacaaugugcaaauuguccgccagcagagcuacaguaucaugugcaucauuaaggaagagguucuggccuaugugguacaguuaccccuguacggagugauagauacgccuuguuggaaacuccauacuucuccacuuugcacaaccaacacuaaggaaggcuccaauaucugucugacacgaaccgaccguggcugguacugcgauaacgcugggagcgucucguuuuucccccaagccgagacguguaaggugugcucuaauagaguuuucugcgacaccaugaacuccuugacacuaccuucagaagugaaucuguguaacauugauaucuucaauccaaaauaugacugcaagauaaugacaaguaaaaccgaugucagcuccucugugauuacaagccucggagcaaucguaucauguuacgguaagacuaaaugcaccgcuaguaacaagaauaagggcaucauuaaaacauuuuccaacgggugugacuauguuagcaauaagggaguggacaccgucucugugggcaacacucuguacuaugucaacaaacaggagggucagucacuuuacgugaagggggagccgaucauuaauuucuaugauccccugguuuuuccuagugacgaauuugaugccagcauaucccaagugaacgagaaaaucaaucagucuuuggcguuuauuaggaagucggacgaacuccugcacaacguaaaugucggaaagagcacgacaaacaucaugaucaccacuauuauaaucgugauuaucguuauuuuacugcuacucaucgccgugggccuguuccuuuacugcaaagcacgguccaccccagucacauugucaaaggaucagcugaguggcauaaauaacaucgcuuucucuaauugaggacuagucccuguucccagagcccacuuuuuuuucuuuuuuugaaauaaaauagccugucuuucagaucuaaaaaaaaaaaaaaaaaaaaaaaaaaaaaaaaaaaaaaaaaaaaaaaaaaaaaaaaaaaaaaaaugcaucccccccccccccccccccccccccccccccaaaggcucuuuucagagccaccagaauu

SEQ ID NO: 17643 - RNA, 1884 nt, Artificial Sequence
  mRNA product Design a-1 comprising derived and/or modified sequence from HRSV(Memphis-37)__AIY60640.1__F_DSCav1_mut6 (opt4)
gggagagucccgcagucggcguccagcggcucugcuuguucgugugugugucguugcaggccuuauucaagcuuaccauggagcugcccauccugaagaccaacgccaucaccaccauccuggccgccgugacccugugcuucgccagcagccagaacaucaccgaggaguucuaccagagcaccugcagcgccgugagcaagggcuaccugggcgcccugagaaccggcugguacaccagcgugaucaccaucgagcugagcaacaucaaggagaacaagugcaacggcaccgacgccaaggugaagcugaucaagcaggagcuggacaaguacaagaacgccgugaccgaccugcagaugcugaugugcagcacccccgccgccggcagcggcagcgccaucgccagcggcaucgccgugugcaaggugcugcaccuggagggcgaggugaacaagaucaagaacgcccugcugagcaccaacaaggccguggugagccugagcaacggcgugagcgugcugaccuucaaggugcuggaccugaagaacuacaucgacaagcagcugcugcccauccugaacaagcagagcugcagcauccccaaccccgagaccgugauggaguuccagcagaagaacaacagacugcuggagaucaccagagaguucagcgugaacgccggcgugaccacccccgugagcaccuacaugcugaccaacagcgagcugcugagccugaucaacgacaugcccaucaccaacgaccagaagaagcugaugagcaacaacgugcagaucgugagacagcagagcuacagcaucaugugcaucaucaaggaggaggugcuggccuacguggugcagcugccccuguacggcgugaucgacacccccugcuggaagcugcacaccagcccccugugcaccaccaacaccaaggagggcagcaacaucugccugaccagaaccgacagaggcugguacugcgacaacgccggcagcgugagcuucuucccccaggccgagaccugcaaggugugcagcaacagaguguucugcgacaccaugaacagccugacccugcccagcgaggugaaccugugcaacaucgacaucuucaaccccaaguacgacugcaagaucaugaccagcaagaccgacgugagcagcagcgugaucaccagccugggcgccaucgugagcugcuacggcaagaccaagugcaccgccagcaacaagaacaagggcaucaucaagaccuucagcaacggcugcgacuacgugagcaacaagggcguggacaccgugagcgugggcaacacccuguacuacgugaacaagcaggagggccagagccuguacgugaagggcgagcccaucaucaacuucuacgacccccugguguuccccagcgacgaguucgacgccagcaucagccaggugaacgagaagaucaaccagagccuggccuucaucagaaagagcgacgagcugcugcacaacgugaacgugggcaagagcaccaccaacaucaugaucaccaccaucaucaucgugaucaucgugauccugcugcugcugaucgccgugggccuguuccuguacugcaaggccagaagcacccccgugacccugagcaaggaccagcugagcggcaucaacaacaucgccuucagcaacugaggacuagucccuguucccagagcccacuuuuuuuucuuuuuuugaaauaaaauagccugucuuucagaucuaaaaaaaaaaaaaaaaaaaaaaaaaaaaaaaaaaaaaaaaaaaaaaaaaaaaaaaaaaaaaaaaugcaucccccccccccccccccccccccccccccccaaaggcucuuuucagagccaccagaauu

SEQ ID NO: 17644 - RNA, 1884 nt, Artificial Sequence
  mRNA product Design a-1 comprising derived and/or modified sequence from HRSV(Memphis-37)__AIY60640.1__F_DSCav1_mut6 (opt5)
gggagagucccgcagucggcguccagcggcucugcuuguucgugugugugucguugcaggccuuauucaagcuuaccauggagcugcccauccucaagaccaacgccauuacaacgauccuggcugccgugacccuuugcuucgcgagcucccagaauauuacagaagaguuuuaccaaucuaccuguagcgcugucuccaaaggcuaucugggggcccucagaacaggaugguacaccucuguuaucacaauugaacugagcaacaucaaggagaauaaaugcaacggcaccgacgccaaggugaaacuuaucaagcaggaacuggauaaguauaaaaaugcugugacggaccuccagaugcugauguguuccaccccugccgcugggucuggaagcgccauugcguccggcaucgccgucugcaaggugcugcaccucgagggggagguuaacaaaauuaagaaugcucugcuuagcacaaacaaagccguggucucucuguccaauggagugagcguucucaccuucaaggugcuggaucuuaagaacuacaucgacaaacagcugcucccgauucugaauaagcaaucuuguuccauccccaacccugaaacagucauggaguuucagcagaaaaauaaccggcugcucgaaauuacccgcgaguucagcgugaaugcuggcgugacgacacccgucucuaccuauaugcugacaaacuccgagcuucugagccucaucaacgauaugccuaucaccaaugaccagaagaaacugauguccaacaauguucaaauugugagacagcagucuuacagcaucaugugcauuaucaaggaagaggugcuugccuaugucgugcagcugccccucuacggcguuauugauaccccuuguuggaaacugcauacauccccgcugugcacgaccaacacaaaggaagggagcaauaucugucucacccggacagaccgcggaugguacugcgauaacgcgggcucuguguccuuuuucccccaagccgagaccuguaaggucugcagcaauagaguguuuugcgacacgaugaacucucugacacuuccuagcgaaguuaaucuguguaacaucgauauuuucaaucccaaauaugacugcaagaucaugaccuccaaaaccgaugugucuagcuccgucauuacaagccucggggcuaucgugucuuguuacggaaagaccaaaugcacagccuccaacaagaauaagggcauuaucaaaacguuuagcaacgggugugacuaugucucuaauaagggaguggacaccguuuccgugggcaacacacuguacuaugucaacaaacaggagggccagagccuuuacgugaagggggagccuaucauuaauuucuaugauccccugguuuuuccguccgacgaauuugaugcuucuaucagccaagugaacgagaaaauuaaucagucccucgccuucauccggaagucugacgaacugcugcacaacgucaaugugggaaagagcaccacaaacauuaugaucaccacgauuaucaucgugauuaucguuauucuccugcuucugaucgccgucggccucuuccuguacugcaaagcucgcuccaccccugugacacugagcaaggaucagcuuucugggauuaauaacaucgcguucuccaauugaggacuagucccuguucccagagcccacuuuuuuuucuuuuuuugaaauaaaauagccugucuuucagaucuaaaaaaaaaaaaaaaaaaaaaaaaaaaaaaaaaaaaaaaaaaaaaaaaaaaaaaaaaaaaaaaaugcaucccccccccccccccccccccccccccccccaaaggcucuuuucagagccaccagaauu

SEQ ID NO: 17645 - RNA, 1884 nt, Artificial Sequence
  mRNA product Design a-1 comprising derived and/or modified sequence from HRSV(Memphis-37)__AIY60640.1__F_DSCav1_mut6 (opt6)
gggagagucccgcagucggcguccagcggcucugcuuguucgugugugugucguugcaggccuuauucaagcuuaccauggaacuaccaauuuuaaaaacaaacgcaauuacaacuauacucgcagcaguaacauuauguuucgccucaucccaaaacauaacagaagaauuuuaccaaucaacaugcagcgcaguaucaaaaggauaucucggagcauuacgaacagguugguacacaucuguaaucacuauagaacuaucaaacauaaaagaaaacaaaugcaauggaaccgacgcaaaaguaaaauuaauaaaacaagaacucgauaaauacaaaaaugcaguaacagaccuccaaaugcucauguguucaacaccagccgcaggaucagguuccgccauagcaucuggcauagcaguaugcaaaguacuccacuuagaaggagaaguuaacaaaauaaaaaacgcacuauuaucaacaaacaaagcaguaguaucccucucaaacggagucucaguauuaacauucaaaguauuagaccuaaaaaacuacauagacaaacaacuacuuccaauacucaacaaacaaucaugcucaauaccaaacccagaaaccguaauggaauuucaacaaaaaaacaaccgacuacuagaaaucacacgagaauuuucaguaaacgccggugucacaacuccaguaucaacuuauauguuaaccaacucagaacuauuaucauuaauaaacgauaugcccauaacuaacgaccaaaaaaaauuaaugucaaacaacguacaaauaguacgccaacaaaguuacucaauaaugugcaucauaaaagaagaaguauuagcguacguuguacaacuaccucuauacggagucauagacacaccaugcuggaaacuucacacaucaccacuauguacaacaaacacaaaagaaggcaguaacauaugccuaacaagaacagaccguggaugguauugugacaacgcuggaucuguaucauucuucccucaagcagaaaccuguaaaguuugcucaaacagagucuucugugacacaaugaacucucuaacacuaccuuccgaagugaaccucuguaacauagacauauucaauccaaaauaugauugcaaaauaaugacuucaaaaacagauguaucauccucuguuauaacaucauuaggcgccauaguuucaugcuacggaaaaacuaaaugcacagcaucaaacaaaaacaaaggaauaauaaaaaccuucucaaauggaugcgacuacguaagcaacaaaggcguagacacaguaucaguagguaauacauuauacuacguaaacaaacaagaaggacaaucacuuuauguuaaaggagaaccuauaauaaacuucuacgacccacuuguauuuccauccgaugaauuugacgcaucuauaucacaagucaacgaaaaaauaaaccaaucauuagcauucauucgaaaauccgaugaacuacuccauaacguaaaugucggaaaaucaacaaccaacauaaugaucacaacaauaaucauagugauaauaguaauacuccuacuacuaaucgcaguaggucuauuccuauauuguaaagcaagaucuacuccaguuacacucucuaaagaccaauuaagcgguaucaacaacaucgccuucagcaauuaaggacuagucccuguucccagagcccacuuuuuuuucuuuuuuugaaauaaaauagccugucuuucagaucuaaaaaaaaaaaaaaaaaaaaaaaaaaaaaaaaaaaaaaaaaaaaaaaaaaaaaaaaaaaaaaaaugcaucccccccccccccccccccccccccccccccaaaggcucuuuucagagccaccagaauu

SEQ ID NO: 17646 - RNA, 1884 nt, Artificial Sequence
  mRNA product Design a-1 comprising derived and/or modified sequence from HRSV(Memphis-37)__AIY60640.1__F_DSCav1_mut6 (opt11)
gggagagucccgcagucggcguccagcggcucugcuuguucgugugugugucguugcaggccuuauucaagcuuaccauggagcugcccauccucaagaccaacgccaucaccacgauccuggccgcggugacccugugcuucgcgagcucccaaaacaucaccgaggaguucuaccagagcacgugcuccgccgucagcaagggcuaccucggggcccugcgcaccggcugguacaccuccgugaucaccaucgagcugagcaacaucaaggaaaacaagugcaacgggacggacgcaaaggugaagcucaucaagcaggagcuggauaaguacaagaacgcggucacggaccugcagaugcucaugugcuccaccccggccgccggcagcggguccgccaucgcguccggcaucgccgugugcaagguguugcaccuggagggcgaggucaacaagaucaagaacgcccuccuuuccaccaauaaggcuguugugagccuguccaacggggucagcgugcucaccuucaaggugcuggaccugaagaacuacaucgacaagcagcuccugcccauccugaacaagcaguccugcagcauccccaaccccgagacagucauggaguuccagcagaagaacaaccggcuccuggagaucacccgcgaguucuccguuaacgccggggugaccaccccgguaagcacauacaugcugaccaacagcgagcuccugagccugaucaacgacaugcccaucaccaacgaccagaagaagcucaugagcaacaacgugcagaucgugcggcagcaguccuacagcaucaugugcaucaucaaggaggagguccuggcguacguggugcaacugccccucuacggggucaucgacacccccugcuggaagcugcacacguccccgcugugcaccaccaacaccaaggagggcagcaacaucugccucacgcgcaccgaccgggggugguacugcgacaacgcaggcuccgugagcuucuucccccaggccgagaccugcaaggugugcuccaaccgcgucuucugcgacaccaugaacagccugacgcugcccuccgaggugaaccucugcaacaucgacaucuucaaccccaaguacgacuguaagaucaugaccagcaagaccgaugucuccagcuccgugaucaccagccugggcgccauaguguccuguuaugggaagacgaagugcaccgccagcaacaagaacaaaggcaucaucaagaccuucuccaacgggugcgacuacgucagcaacaagggcguggacacaguguccgucggcaacacgcuguacuacgugaacaagcaggaggggcagagccucuacgugaagggcgagccgaucaucaacuucuacgauccccuggucuuccccagcgacgaguucgacgcguccaucagccaagugaacgagaagaucaaccagucccuggccuucauccgcaagagcgacgagcuccugcacaacgugaacgucgggaaguccaccaccaacaucaugaucaccaccaucaucaucgugaucaucgucauccugcuccugcugaucgccgucggccucuuccuguacugcaaggcccggagcacgcccgugacccuguccaaggaccagcugucgggcaucaacaacaucgccuucuccaacugaggacuagucccuguucccagagcccacuuuuuuuucuuuuuuugaaauaaaauagccugucuuucagaucuaaaaaaaaaaaaaaaaaaaaaaaaaaaaaaaaaaaaaaaaaaaaaaaaaaaaaaaaaaaaaaaaugcaucccccccccccccccccccccccccccccccaaaggcucuuuucagagccaccagaauu

SEQ ID NO: 17647 - RNA, 1903 nt, Artificial Sequence
  mRNA product Design a-2 comprising derived and/or modified sequence from HRSV(Memphis-37)__AIY60640.1__F_DSCav1_mut6 (opt1)
gggagaguccgcucagccagguugcagaagcggcuuagcguguguccuaaucuucucucugcguguagguaggccugugccgcaaacaagcuuaccauggagcugcccauccucaagaccaacgccaucaccacgauccuggccgcggugacccugugcuucgccagcucccagaacaucaccgaggaguucuaccagagcacgugcuccgccgucagcaagggcuaccucggcgcccugcgcaccgggugguacaccagcgugaucaccaucgagcuguccaacaucaaggagaacaagugcaacggcaccgacgccaaggugaagcucaucaagcaggagcuggacaaguacaagaacgcggucacggaccugcagaugcugaugugcagcaccccggccgccggcuccgggagcgcgaucgccuccggcaucgccgucugcaaggugcugcaccucgagggcgaggugaacaagaucaagaacgcccugcuguccaccaacaaggccgucgugagccucuccaacggggugagcguccugaccuucaaggugcuggaccucaagaacuacaucgacaagcagcugcugcccauccugaacaagcagagcugcuccauccccaaccccgagaccgucauggaguuccagcagaagaacaaccgccuccuggagaucacgcgggaguucagcgugaacgcgggcgugaccacccccgucuccaccuacaugcugacgaacagcgagcuccugucccugaucaacgacaugccgaucaccaacgaccagaagaagcucaugagcaacaacgugcagaucgugcgccagcaguccuacagcaucaugugcaucaucaaggaggagguccuggccuacguggugcagcugccccucuacggggucaucgacacccccugcuggaagcugcacaccagcccccugugcacgaccaacaccaaggagggcuccaacaucugccucacccggacggaccgcgggugguacugcgacaacgccggcagcguguccuucuucccgcaggccgagaccugcaaggucugcagcaaccggguguucugcgacaccaugaacucccugacccugcccagcgaggugaaccucugcaacaucgacaucuucaaccccaaguacgacugcaagaucaugacguccaagaccgacgucagcuccagcgugaucaccucccugggcgccaucgugagcugcuacgggaagaccaagugcacggcgagcaacaagaacaagggcaucaucaagaccuucuccaacgggugcgacuacgucagcaacaagggcguggacaccguguccgucggcaacacccuguacuacgugaacaagcaggagggccagagccucuacgugaagggggagcccaucaucaacuucuacgacccgcuggucuuccccuccgacgaguucgacgccagcaucucccaggugaacgagaagaucaaccagagccuggccuucauccggaaguccgacgagcuccugcacaacgugaacgucggcaagagcaccacgaacaucaugaucaccaccaucaucaucgugaucaucgugauccugcugcuccugaucgccgucgggcuguuccucuacugcaaggcccgcuccacccccgugacgcugagcaaggaccagcuguccgggaucaacaacaucgcguucagcaacugaggacuagucccuguucccagagcccacuuuuuuuucuuuuuuugaaauaaaauagccugucuuucagaucuaaaaaaaaaaaaaaaaaaaaaaaaaaaaaaaaaaaaaaaaaaaaaaaaaaaaaaaaaaaaaaaaugcaucccccccccccccccccccccccccccccccaaaggcucuuuucagagccaccagaauu

SEQ ID NO: 17648 - RNA, 1903 nt, Artificial Sequence
  mRNA product Design a-2 comprising derived and/or modified sequence from HRSV(Memphis-37)__AIY60640.1__F_DSCav1_mut6 (opt1)
gggagaguccgcucagccagguugcagaagcggcuuagcguguguccuaaucuucucucugcguguagguaggccugugccgcaaacaagcuuaccauggagcugcccauccucaagaccaacgccaucaccacgauccuggccgcggugacccugugcuucgccagcucccagaacaucaccgaggaguucuaccagagcacgugcuccgccgucagcaagggcuaccucggggcccugcgcaccggcugguacaccuccgugaucaccaucgagcugagcaacaucaaggagaacaagugcaacgggaccgacgccaaggugaagcucaucaagcaggagcuggacaaguacaagaacgcggucacggaccugcagaugcucaugugcuccaccccggccgccggcagcggguccgccaucgcgagcggcaucgccgugugcaaggugcugcaccuggagggcgaggucaacaagaucaagaacgcccuccuguccaccaacaaggccguggugagccuguccaacggggucagcgugcucaccuucaaggugcuggaccugaagaacuacaucgacaagcagcuccugcccauccugaacaagcaguccugcagcauccccaaccccgagacggucauggaguuccagcagaagaacaaccggcuccuggagaucacccgcgaguucuccgugaacgccggcgugaccaccccggucagcacguacaugcugaccaacuccgagcuccugagccugaucaacgacaugcccaucaccaacgaccagaagaagcucaugagcaacaacgugcagaucgugcggcagcaguccuacagcaucaugugcaucaucaaggaggagguccuggcguacguggugcagcugccccucuacggggucaucgacacccccugcuggaagcugcacacguccccgcugugcaccaccaacaccaaggagggcagcaacaucugccucacgcgcaccgaccgggggugguacugcgacaacgccggcuccgugagcuucuucccccaggccgagaccugcaaggugugcuccaaccgcgucuucugcgacaccaugaacagccugacgcugcccuccgaggugaaccucugcaacaucgacaucuucaaccccaaguacgacugcaagaucaugaccagcaagaccgacgucuccagcuccgugaucaccagccugggcgccaucguguccugcuacgggaagacgaagugcaccgccagcaacaagaacaagggcaucaucaagaccuucuccaacgggugcgacuacgucagcaacaagggcguggacaccguguccgucggcaacacgcuguacuacgugaacaagcaggaggggcagagccucuacgugaagggcgagccgaucaucaacuucuacgacccccuggucuuccccagcgacgaguucgacgcguccaucagccaggugaacgagaagaucaaccagucccuggccuucauccgcaagagcgacgagcuccugcacaacgugaacgucgggaaguccaccaccaacaucaugaucaccaccaucaucaucgugaucaucgugauccugcuccugcugaucgccgucggccucuuccuguacugcaaggcccggagcacgcccgugacccuguccaaggaccagcugagcgggaucaacaacaucgccuucuccaacugaggacuagucccuguucccagagcccacuuuuuuuucuuuuuuugaaauaaaauagccugucuuucagaucuaaaaaaaaaaaaaaaaaaaaaaaaaaaaaaaaaaaaaaaaaaaaaaaaaaaaaaaaaaaaaaaaugcaucccccccccccccccccccccccccccccccaaaggcucuuuucagagccaccagaauu

SEQ ID NO: 17649 - RNA, 1903 nt, Artificial Sequence
  mRNA product Design a-2 comprising derived and/or modified sequence from HRSV(Memphis-37)__AIY60640.1__F_DSCav1_mut6 (opt2)
gggagaguccgcucagccagguugcagaagcggcuuagcguguguccuaaucuucucucugcguguagguaggccugugccgcaaacaagcuuaccauggagcuccccauccucaagaccaacgccaucaccaccauccucgccgccgucacccucugcuucgccuccucccagaacaucaccgaggaguucuaccaguccaccugcuccgccgucuccaagggcuaccucggcgcccuccgcaccggcugguacaccuccgucaucaccaucgagcucuccaacaucaaggagaacaagugcaacggcaccgacgccaaggucaagcucaucaagcaggagcucgacaaguacaagaacgccgucaccgaccuccagaugcucaugugcuccacccccgccgccggcuccggcuccgccaucgccuccggcaucgccgucugcaagguccuccaccucgagggcgaggucaacaagaucaagaacgcccuccucuccaccaacaaggccgucgucucccucuccaacggcgucuccguccucaccuucaagguccucgaccucaagaacuacaucgacaagcagcuccuccccauccucaacaagcaguccugcuccauccccaaccccgagaccgucauggaguuccagcagaagaacaaccgccuccucgagaucacccgcgaguucuccgucaacgccggcgucaccacccccgucuccaccuacaugcucaccaacuccgagcuccucucccucaucaacgacaugcccaucaccaacgaccagaagaagcucauguccaacaacguccagaucguccgccagcaguccuacuccaucaugugcaucaucaaggaggagguccucgccuacgucguccagcucccccucuacggcgucaucgacacccccugcuggaagcuccacaccuccccccucugcaccaccaacaccaaggagggcuccaacaucugccucacccgcaccgaccgcggcugguacugcgacaacgccggcuccgucuccuucuucccccaggccgagaccugcaaggucugcuccaaccgcgucuucugcgacaccaugaacucccucacccuccccuccgaggucaaccucugcaacaucgacaucuucaaccccaaguacgacugcaagaucaugaccuccaagaccgacgucuccuccuccgucaucaccucccucggcgccaucgucuccugcuacggcaagaccaagugcaccgccuccaacaagaacaagggcaucaucaagaccuucuccaacggcugcgacuacgucuccaacaagggcgucgacaccgucuccgucggcaacacccucuacuacgucaacaagcaggagggccagucccucuacgucaagggcgagcccaucaucaacuucuacgacccccucgucuuccccuccgacgaguucgacgccuccaucucccaggucaacgagaagaucaaccagucccucgccuucauccgcaaguccgacgagcuccuccacaacgucaacgucggcaaguccaccaccaacaucaugaucaccaccaucaucaucgucaucaucgucauccuccuccuccucaucgccgucggccucuuccucuacugcaaggcccgcuccacccccgucacccucuccaaggaccagcucuccggcaucaacaacaucgccuucuccaacugaggacuagucccuguucccagagcccacuuuuuuuucuuuuuuugaaauaaaauagccugucuuucagaucuaaaaaaaaaaaaaaaaaaaaaaaaaaaaaaaaaaaaaaaaaaaaaaaaaaaaaaaaaaaaaaaaugcaucccccccccccccccccccccccccccccccaaaggcucuuuucagagccaccagaauu

SEQ ID NO: 17650 - RNA, 1903 nt, Artificial Sequence
  mRNA product Design a-2 comprising derived and/or modified sequence from HRSV(Memphis-37)__AIY60640.1__F_DSCav1_mut6 (opt3)
gggagaguccgcucagccagguugcagaagcggcuuagcguguguccuaaucuucucucugcguguagguaggccugugccgcaaacaagcuuaccauggagcugcccauccucaagaccaacgccauuacaacuauacuugcugcagugacgcugugcuucgccagcucccagaauaucaccgaagaguuuuaccaaucuacauguucagcggucaguaaaggcuauuugggggcuuuaagaacuggaugguacaccagcguuauuacaaucgaacuguccaacauuaaggagaauaaaugcaacgguaccgacgccaaggugaaacuaaucaagcaggaacucgauaaguauaaaaaugcaguaacugaccugcagaugcuuauguguucuacuccugccgcuggcucggggucagcaauagccagcggaaucgcugugugcaagguccugcacuuggagggcgaggugaacaaaauuaagaaugcccuccugaguaccaacaaagcgguugugucccugucuaauggugucagcgugcucacguucaagguauuagaucugaagaacuacaucgacaaacagcuuuugccaauucugaauaagcaauccuguucaaucccgaaccccgaaacuguuauggaguuucagcagaaaaauaacaggcuacucgaaauaacccgggaguucagugugaaugcaggggucacaacuccugugagcaccuauaugcugacaaacucugagcuucuguccuugauuaacgauaugccaaucaccaaugaccagaagaaacucaugucaaacaaugugcaaauuguccgccagcagagcuacaguaucaugugcaucauuaaggaagagguucuggccuaugugguacaguuaccccuguacggagugauagauacgccuuguuggaaacuccauacuucuccacuuugcacaaccaacacuaaggaaggcuccaauaucugucugacacgaaccgaccguggcugguacugcgauaacgcugggagcgucucguuuuucccccaagccgagacguguaaggugugcucuaauagaguuuucugcgacaccaugaacuccuugacacuaccuucagaagugaaucuguguaacauugauaucuucaauccaaaauaugacugcaagauaaugacaaguaaaaccgaugucagcuccucugugauuacaagccucggagcaaucguaucauguuacgguaagacuaaaugcaccgcuaguaacaagaauaagggcaucauuaaaacauuuuccaacgggugugacuauguuagcaauaagggaguggacaccgucucugugggcaacacucuguacuaugucaacaaacaggagggucagucacuuuacgugaagggggagccgaucauuaauuucuaugauccccugguuuuuccuagugacgaauuugaugccagcauaucccaagugaacgagaaaaucaaucagucuuuggcguuuauuaggaagucggacgaacuccugcacaacguaaaugucggaaagagcacgacaaacaucaugaucaccacuauuauaaucgugauuaucguuauuuuacugcuacucaucgccgugggccuguuccuuuacugcaaagcacgguccaccccagucacauugucaaaggaucagcugaguggcauaaauaacaucgcuuucucuaauugaggacuagucccuguucccagagcccacuuuuuuuucuuuuuuugaaauaaaauagccugucuuucagaucuaaaaaaaaaaaaaaaaaaaaaaaaaaaaaaaaaaaaaaaaaaaaaaaaaaaaaaaaaaaaaaaaugcaucccccccccccccccccccccccccccccccaaaggcucuuuucagagccaccagaauu

SEQ ID NO: 17651 - RNA, 1903 nt, Artificial Sequence
  mRNA product Design a-2 comprising derived and/or modified sequence from HRSV(Memphis-37)__AIY60640.1__F_DSCav1_mut6 (opt4)
gggagaguccgcucagccagguugcagaagcggcuuagcguguguccuaaucuucucucugcguguagguaggccugugccgcaaacaagcuuaccauggagcugcccauccugaagaccaacgccaucaccaccauccuggccgccgugacccugugcuucgccagcagccagaacaucaccgaggaguucuaccagagcaccugcagcgccgugagcaagggcuaccugggcgcccugagaaccggcugguacaccagcgugaucaccaucgagcugagcaacaucaaggagaacaagugcaacggcaccgacgccaaggugaagcugaucaagcaggagcuggacaaguacaagaacgccgugaccgaccugcagaugcugaugugcagcacccccgccgccggcagcggcagcgccaucgccagcggcaucgccgugugcaaggugcugcaccuggagggcgaggugaacaagaucaagaacgcccugcugagcaccaacaaggccguggugagccugagcaacggcgugagcgugcugaccuucaaggugcuggaccugaagaacuacaucgacaagcagcugcugcccauccugaacaagcagagcugcagcauccccaaccccgagaccgugauggaguuccagcagaagaacaacagacugcuggagaucaccagagaguucagcgugaacgccggcgugaccacccccgugagcaccuacaugcugaccaacagcgagcugcugagccugaucaacgacaugcccaucaccaacgaccagaagaagcugaugagcaacaacgugcagaucgugagacagcagagcuacagcaucaugugcaucaucaaggaggaggugcuggccuacguggugcagcugccccuguacggcgugaucgacacccccugcuggaagcugcacaccagcccccugugcaccaccaacaccaaggagggcagcaacaucugccugaccagaaccgacagaggcugguacugcgacaacgccggcagcgugagcuucuucccccaggccgagaccugcaaggugugcagcaacagaguguucugcgacaccaugaacagccugacccugcccagcgaggugaaccugugcaacaucgacaucuucaaccccaaguacgacugcaagaucaugaccagcaagaccgacgugagcagcagcgugaucaccagccugggcgccaucgugagcugcuacggcaagaccaagugcaccgccagcaacaagaacaagggcaucaucaagaccuucagcaacggcugcgacuacgugagcaacaagggcguggacaccgugagcgugggcaacacccuguacuacgugaacaagcaggagggccagagccuguacgugaagggcgagcccaucaucaacuucuacgacccccugguguuccccagcgacgaguucgacgccagcaucagccaggugaacgagaagaucaaccagagccuggccuucaucagaaagagcgacgagcugcugcacaacgugaacgugggcaagagcaccaccaacaucaugaucaccaccaucaucaucgugaucaucgugauccugcugcugcugaucgccgugggccuguuccuguacugcaaggccagaagcacccccgugacccugagcaaggaccagcugagcggcaucaacaacaucgccuucagcaacugaggacuagucccuguucccagagcccacuuuuuuuucuuuuuuugaaauaaaauagccugucuuucagaucuaaaaaaaaaaaaaaaaaaaaaaaaaaaaaaaaaaaaaaaaaaaaaaaaaaaaaaaaaaaaaaaaugcaucccccccccccccccccccccccccccccccaaaggcucuuuucagagccaccagaauu

SEQ ID NO: 17652 - RNA, 1903 nt, Artificial Sequence
  mRNA product Design a-2 comprising derived and/or modified sequence from HRSV(Memphis-37)__AIY60640.1__F_DSCav1_mut6 (opt5)
gggagaguccgcucagccagguugcagaagcggcuuagcguguguccuaaucuucucucugcguguagguaggccugugccgcaaacaagcuuaccauggagcugcccauccucaagaccaacgccauuacaacgauccuggcugccgugacccuuugcuucgcgagcucccagaauauuacagaagaguuuuaccaaucuaccuguagcgcugucuccaaaggcuaucugggggcccucagaacaggaugguacaccucuguuaucacaauugaacugagcaacaucaaggagaauaaaugcaacggcaccgacgccaaggugaaacuuaucaagcaggaacuggauaaguauaaaaaugcugugacggaccuccagaugcugauguguuccaccccugccgcugggucuggaagcgccauugcguccggcaucgccgucugcaaggugcugcaccucgagggggagguuaacaaaauuaagaaugcucugcuuagcacaaacaaagccguggucucucuguccaauggagugagcguucucaccuucaaggugcuggaucuuaagaacuacaucgacaaacagcugcucccgauucugaauaagcaaucuuguuccauccccaacccugaaacagucauggaguuucagcagaaaaauaaccggcugcucgaaauuacccgcgaguucagcgugaaugcuggcgugacgacacccgucucuaccuauaugcugacaaacuccgagcuucugagccucaucaacgauaugccuaucaccaaugaccagaagaaacugauguccaacaauguucaaauugugagacagcagucuuacagcaucaugugcauuaucaaggaagaggugcuugccuaugucgugcagcugccccucuacggcguuauugauaccccuuguuggaaacugcauacauccccgcugugcacgaccaacacaaaggaagggagcaauaucugucucacccggacagaccgcggaugguacugcgauaacgcgggcucuguguccuuuuucccccaagccgagaccuguaaggucugcagcaauagaguguuuugcgacacgaugaacucucugacacuuccuagcgaaguuaaucuguguaacaucgauauuuucaaucccaaauaugacugcaagaucaugaccuccaaaaccgaugugucuagcuccgucauuacaagccucggggcuaucgugucuuguuacggaaagaccaaaugcacagccuccaacaagaauaagggcauuaucaaaacguuuagcaacgggugugacuaugucucuaauaagggaguggacaccguuuccgugggcaacacacuguacuaugucaacaaacaggagggccagagccuuuacgugaagggggagccuaucauuaauuucuaugauccccugguuuuuccguccgacgaauuugaugcuucuaucagccaagugaacgagaaaauuaaucagucccucgccuucauccggaagucugacgaacugcugcacaacgucaaugugggaaagagcaccacaaacauuaugaucaccacgauuaucaucgugauuaucguuauucuccugcuucugaucgccgucggccucuuccuguacugcaaagcucgcuccaccccugugacacugagcaaggaucagcuuucugggauuaauaacaucgcguucuccaauugaggacuagucccuguucccagagcccacuuuuuuuucuuuuuuugaaauaaaauagccugucuuucagaucuaaaaaaaaaaaaaaaaaaaaaaaaaaaaaaaaaaaaaaaaaaaaaaaaaaaaaaaaaaaaaaaaugcaucccccccccccccccccccccccccccccccaaaggcucuuuucagagccaccagaauu

SEQ ID NO: 17653 - RNA, 1903 nt, Artificial Sequence
  mRNA product Design a-2 comprising derived and/or modified sequence from HRSV(Memphis-37)__AIY60640.1__F_DSCav1_mut6 (opt6)
gggagaguccgcucagccagguugcagaagcggcuuagcguguguccuaaucuucucucugcguguagguaggccugugccgcaaacaagcuuaccauggaacuaccaauuuuaaaaacaaacgcaauuacaacuauacucgcagcaguaacauuauguuucgccucaucccaaaacauaacagaagaauuuuaccaaucaacaugcagcgcaguaucaaaaggauaucucggagcauuacgaacagguugguacacaucuguaaucacuauagaacuaucaaacauaaaagaaaacaaaugcaauggaaccgacgcaaaaguaaaauuaauaaaacaagaacucgauaaauacaaaaaugcaguaacagaccuccaaaugcucauguguucaacaccagccgcaggaucagguuccgccauagcaucuggcauagcaguaugcaaaguacuccacuuagaaggagaaguuaacaaaauaaaaaacgcacuauuaucaacaaacaaagcaguaguaucccucucaaacggagucucaguauuaacauucaaaguauuagaccuaaaaaacuacauagacaaacaacuacuuccaauacucaacaaacaaucaugcucaauaccaaacccagaaaccguaauggaauuucaacaaaaaaacaaccgacuacuagaaaucacacgagaauuuucaguaaacgccggugucacaacuccaguaucaacuuauauguuaaccaacucagaacuauuaucauuaauaaacgauaugcccauaacuaacgaccaaaaaaaauuaaugucaaacaacguacaaauaguacgccaacaaaguuacucaauaaugugcaucauaaaagaagaaguauuagcguacguuguacaacuaccucuauacggagucauagacacaccaugcuggaaacuucacacaucaccacuauguacaacaaacacaaaagaaggcaguaacauaugccuaacaagaacagaccguggaugguauugugacaacgcuggaucuguaucauucuucccucaagcagaaaccuguaaaguuugcucaaacagagucuucugugacacaaugaacucucuaacacuaccuuccgaagugaaccucuguaacauagacauauucaauccaaaauaugauugcaaaauaaugacuucaaaaacagauguaucauccucuguuauaacaucauuaggcgccauaguuucaugcuacggaaaaacuaaaugcacagcaucaaacaaaaacaaaggaauaauaaaaaccuucucaaauggaugcgacuacguaagcaacaaaggcguagacacaguaucaguagguaauacauuauacuacguaaacaaacaagaaggacaaucacuuuauguuaaaggagaaccuauaauaaacuucuacgacccacuuguauuuccauccgaugaauuugacgcaucuauaucacaagucaacgaaaaaauaaaccaaucauuagcauucauucgaaaauccgaugaacuacuccauaacguaaaugucggaaaaucaacaaccaacauaaugaucacaacaauaaucauagugauaauaguaauacuccuacuacuaaucgcaguaggucuauuccuauauuguaaagcaagaucuacuccaguuacacucucuaaagaccaauuaagcgguaucaacaacaucgccuucagcaauuaaggacuagucccuguucccagagcccacuuuuuuuucuuuuuuugaaauaaaauagccugucuuucagaucuaaaaaaaaaaaaaaaaaaaaaaaaaaaaaaaaaaaaaaaaaaaaaaaaaaaaaaaaaaaaaaaaugcaucccccccccccccccccccccccccccccccaaaggcucuuuucagagccaccagaauu

SEQ ID NO: 17654 - RNA, 1903 nt, Artificial Sequence
  mRNA product Design a-2 comprising derived and/or modified sequence from HRSV(Memphis-37)__AIY60640.1__F_DSCav1_mut6 (opt11)
gggagaguccgcucagccagguugcagaagcggcuuagcguguguccuaaucuucucucugcguguagguaggccugugccgcaaacaagcuuaccauggagcugcccauccucaagaccaacgccaucaccacgauccuggccgcggugacccugugcuucgcgagcucccaaaacaucaccgaggaguucuaccagagcacgugcuccgccgucagcaagggcuaccucggggcccugcgcaccggcugguacaccuccgugaucaccaucgagcugagcaacaucaaggaaaacaagugcaacgggacggacgcaaaggugaagcucaucaagcaggagcuggauaaguacaagaacgcggucacggaccugcagaugcucaugugcuccaccccggccgccggcagcggguccgccaucgcguccggcaucgccgugugcaagguguugcaccuggagggcgaggucaacaagaucaagaacgcccuccuuuccaccaauaaggcuguugugagccuguccaacggggucagcgugcucaccuucaaggugcuggaccugaagaacuacaucgacaagcagcuccugcccauccugaacaagcaguccugcagcauccccaaccccgagacagucauggaguuccagcagaagaacaaccggcuccuggagaucacccgcgaguucuccguuaacgccggggugaccaccccgguaagcacauacaugcugaccaacagcgagcuccugagccugaucaacgacaugcccaucaccaacgaccagaagaagcucaugagcaacaacgugcagaucgugcggcagcaguccuacagcaucaugugcaucaucaaggaggagguccuggcguacguggugcaacugccccucuacggggucaucgacacccccugcuggaagcugcacacguccccgcugugcaccaccaacaccaaggagggcagcaacaucugccucacgcgcaccgaccgggggugguacugcgacaacgcaggcuccgugagcuucuucccccaggccgagaccugcaaggugugcuccaaccgcgucuucugcgacaccaugaacagccugacgcugcccuccgaggugaaccucugcaacaucgacaucuucaaccccaaguacgacuguaagaucaugaccagcaagaccgaugucuccagcuccgugaucaccagccugggcgccauaguguccuguuaugggaagacgaagugcaccgccagcaacaagaacaaaggcaucaucaagaccuucuccaacgggugcgacuacgucagcaacaagggcguggacacaguguccgucggcaacacgcuguacuacgugaacaagcaggaggggcagagccucuacgugaagggcgagccgaucaucaacuucuacgauccccuggucuuccccagcgacgaguucgacgcguccaucagccaagugaacgagaagaucaaccagucccuggccuucauccgcaagagcgacgagcuccugcacaacgugaacgucgggaaguccaccaccaacaucaugaucaccaccaucaucaucgugaucaucgucauccugcuccugcugaucgccgucggccucuuccuguacugcaaggcccggagcacgcccgugacccuguccaaggaccagcugucgggcaucaacaacaucgccuucuccaacugaggacuagucccuguucccagagcccacuuuuuuuucuuuuuuugaaauaaaauagccugucuuucagaucuaaaaaaaaaaaaaaaaaaaaaaaaaaaaaaaaaaaaaaaaaaaaaaaaaaaaaaaaaaaaaaaaugcaucccccccccccccccccccccccccccccccaaaggcucuuuucagagccaccagaauu

SEQ ID NO: 17655 - RNA, 1981 nt, Artificial Sequence
  mRNA product Design a-3 comprising derived and/or modified sequence from HRSV(Memphis-37)__AIY60640.1__F_DSCav1_mut6 (opt1)
gggagagggcgcuuggcuugcaaggacccugagcugcggcauugaagcacacccaacccaacucgacugaagucagccucacugaaccggaucugagaaucuucucucucugggcuugccagggcucuccgaaccuagcuagcauccucuucaauuccaacuagaaagcuuaccauggagcugcccauccucaagaccaacgccaucaccacgauccuggccgcggugacccugugcuucgccagcucccagaacaucaccgaggaguucuaccagagcacgugcuccgccgucagcaagggcuaccucggcgcccugcgcaccgggugguacaccagcgugaucaccaucgagcuguccaacaucaaggagaacaagugcaacggcaccgacgccaaggugaagcucaucaagcaggagcuggacaaguacaagaacgcggucacggaccugcagaugcugaugugcagcaccccggccgccggcuccgggagcgcgaucgccuccggcaucgccgucugcaaggugcugcaccucgagggcgaggugaacaagaucaagaacgcccugcuguccaccaacaaggccgucgugagccucuccaacggggugagcguccugaccuucaaggugcuggaccucaagaacuacaucgacaagcagcugcugcccauccugaacaagcagagcugcuccauccccaaccccgagaccgucauggaguuccagcagaagaacaaccgccuccuggagaucacgcgggaguucagcgugaacgcgggcgugaccacccccgucuccaccuacaugcugacgaacagcgagcuccugucccugaucaacgacaugccgaucaccaacgaccagaagaagcucaugagcaacaacgugcagaucgugcgccagcaguccuacagcaucaugugcaucaucaaggaggagguccuggccuacguggugcagcugccccucuacggggucaucgacacccccugcuggaagcugcacaccagcccccugugcacgaccaacaccaaggagggcuccaacaucugccucacccggacggaccgcgggugguacugcgacaacgccggcagcguguccuucuucccgcaggccgagaccugcaaggucugcagcaaccggguguucugcgacaccaugaacucccugacccugcccagcgaggugaaccucugcaacaucgacaucuucaaccccaaguacgacugcaagaucaugacguccaagaccgacgucagcuccagcgugaucaccucccugggcgccaucgugagcugcuacgggaagaccaagugcacggcgagcaacaagaacaagggcaucaucaagaccuucuccaacgggugcgacuacgucagcaacaagggcguggacaccguguccgucggcaacacccuguacuacgugaacaagcaggagggccagagccucuacgugaagggggagcccaucaucaacuucuacgacccgcuggucuuccccuccgacgaguucgacgccagcaucucccaggugaacgagaagaucaaccagagccuggccuucauccggaaguccgacgagcuccugcacaacgugaacgucggcaagagcaccacgaacaucaugaucaccaccaucaucaucgugaucaucgugauccugcugcuccugaucgccgucgggcuguuccucuacugcaaggcccgcuccacccccgugacgcugagcaaggaccagcuguccgggaucaacaacaucgcguucagcaacugaggacuagucccuguucccagagcccacuuuuuuuucuuuuuuugaaauaaaauagccugucuuucagaucuaaaaaaaaaaaaaaaaaaaaaaaaaaaaaaaaaaaaaaaaaaaaaaaaaaaaaaaaaaaaaaaaugcaucccccccccccccccccccccccccccccccaaaggcucuuuucagagccaccagaauu

SEQ ID NO: 17656 - RNA, 1981 nt, Artificial Sequence
  mRNA product Design a-3 comprising derived and/or modified sequence from HRSV(Memphis-37)__AIY60640.1__F_DSCav1_mut6 (opt1)
gggagagggcgcuuggcuugcaaggacccugagcugcggcauugaagcacacccaacccaacucgacugaagucagccucacugaaccggaucugagaaucuucucucucugggcuugccagggcucuccgaaccuagcuagcauccucuucaauuccaacuagaaagcuuaccauggagcugcccauccucaagaccaacgccaucaccacgauccuggccgcggugacccugugcuucgccagcucccagaacaucaccgaggaguucuaccagagcacgugcuccgccgucagcaagggcuaccucggggcccugcgcaccggcugguacaccuccgugaucaccaucgagcugagcaacaucaaggagaacaagugcaacgggaccgacgccaaggugaagcucaucaagcaggagcuggacaaguacaagaacgcggucacggaccugcagaugcucaugugcuccaccccggccgccggcagcggguccgccaucgcgagcggcaucgccgugugcaaggugcugcaccuggagggcgaggucaacaagaucaagaacgcccuccuguccaccaacaaggccguggugagccuguccaacggggucagcgugcucaccuucaaggugcuggaccugaagaacuacaucgacaagcagcuccugcccauccugaacaagcaguccugcagcauccccaaccccgagacggucauggaguuccagcagaagaacaaccggcuccuggagaucacccgcgaguucuccgugaacgccggcgugaccaccccggucagcacguacaugcugaccaacuccgagcuccugagccugaucaacgacaugcccaucaccaacgaccagaagaagcucaugagcaacaacgugcagaucgugcggcagcaguccuacagcaucaugugcaucaucaaggaggagguccuggcguacguggugcagcugccccucuacggggucaucgacacccccugcuggaagcugcacacguccccgcugugcaccaccaacaccaaggagggcagcaacaucugccucacgcgcaccgaccgggggugguacugcgacaacgccggcuccgugagcuucuucccccaggccgagaccugcaaggugugcuccaaccgcgucuucugcgacaccaugaacagccugacgcugcccuccgaggugaaccucugcaacaucgacaucuucaaccccaaguacgacugcaagaucaugaccagcaagaccgacgucuccagcuccgugaucaccagccugggcgccaucguguccugcuacgggaagacgaagugcaccgccagcaacaagaacaagggcaucaucaagaccuucuccaacgggugcgacuacgucagcaacaagggcguggacaccguguccgucggcaacacgcuguacuacgugaacaagcaggaggggcagagccucuacgugaagggcgagccgaucaucaacuucuacgacccccuggucuuccccagcgacgaguucgacgcguccaucagccaggugaacgagaagaucaaccagucccuggccuucauccgcaagagcgacgagcuccugcacaacgugaacgucgggaaguccaccaccaacaucaugaucaccaccaucaucaucgugaucaucgugauccugcuccugcugaucgccgucggccucuuccuguacugcaaggcccggagcacgcccgugacccuguccaaggaccagcugagcgggaucaacaacaucgccuucuccaacugaggacuagucccuguucccagagcccacuuuuuuuucuuuuuuugaaauaaaauagccugucuuucagaucuaaaaaaaaaaaaaaaaaaaaaaaaaaaaaaaaaaaaaaaaaaaaaaaaaaaaaaaaaaaaaaaaugcaucccccccccccccccccccccccccccccccaaaggcucuuuucagagccaccagaauu

SEQ ID NO: 17657 - RNA, 1981 nt, Artificial Sequence
  mRNA product Design a-3 comprising derived and/or modified sequence from HRSV(Memphis-37)__AIY60640.1__F_DSCav1_mut6 (opt2)
gggagagggcgcuuggcuugcaaggacccugagcugcggcauugaagcacacccaacccaacucgacugaagucagccucacugaaccggaucugagaaucuucucucucugggcuugccagggcucuccgaaccuagcuagcauccucuucaauuccaacuagaaagcuuaccauggagcuccccauccucaagaccaacgccaucaccaccauccucgccgccgucacccucugcuucgccuccucccagaacaucaccgaggaguucuaccaguccaccugcuccgccgucuccaagggcuaccucggcgcccuccgcaccggcugguacaccuccgucaucaccaucgagcucuccaacaucaaggagaacaagugcaacggcaccgacgccaaggucaagcucaucaagcaggagcucgacaaguacaagaacgccgucaccgaccuccagaugcucaugugcuccacccccgccgccggcuccggcuccgccaucgccuccggcaucgccgucugcaagguccuccaccucgagggcgaggucaacaagaucaagaacgcccuccucuccaccaacaaggccgucgucucccucuccaacggcgucuccguccucaccuucaagguccucgaccucaagaacuacaucgacaagcagcuccuccccauccucaacaagcaguccugcuccauccccaaccccgagaccgucauggaguuccagcagaagaacaaccgccuccucgagaucacccgcgaguucuccgucaacgccggcgucaccacccccgucuccaccuacaugcucaccaacuccgagcuccucucccucaucaacgacaugcccaucaccaacgaccagaagaagcucauguccaacaacguccagaucguccgccagcaguccuacuccaucaugugcaucaucaaggaggagguccucgccuacgucguccagcucccccucuacggcgucaucgacacccccugcuggaagcuccacaccuccccccucugcaccaccaacaccaaggagggcuccaacaucugccucacccgcaccgaccgcggcugguacugcgacaacgccggcuccgucuccuucuucccccaggccgagaccugcaaggucugcuccaaccgcgucuucugcgacaccaugaacucccucacccuccccuccgaggucaaccucugcaacaucgacaucuucaaccccaaguacgacugcaagaucaugaccuccaagaccgacgucuccuccuccgucaucaccucccucggcgccaucgucuccugcuacggcaagaccaagugcaccgccuccaacaagaacaagggcaucaucaagaccuucuccaacggcugcgacuacgucuccaacaagggcgucgacaccgucuccgucggcaacacccucuacuacgucaacaagcaggagggccagucccucuacgucaagggcgagcccaucaucaacuucuacgacccccucgucuuccccuccgacgaguucgacgccuccaucucccaggucaacgagaagaucaaccagucccucgccuucauccgcaaguccgacgagcuccuccacaacgucaacgucggcaaguccaccaccaacaucaugaucaccaccaucaucaucgucaucaucgucauccuccuccuccucaucgccgucggccucuuccucuacugcaaggcccgcuccacccccgucacccucuccaaggaccagcucuccggcaucaacaacaucgccuucuccaacugaggacuagucccuguucccagagcccacuuuuuuuucuuuuuuugaaauaaaauagccugucuuucagaucuaaaaaaaaaaaaaaaaaaaaaaaaaaaaaaaaaaaaaaaaaaaaaaaaaaaaaaaaaaaaaaaaugcaucccccccccccccccccccccccccccccccaaaggcucuuuucagagccaccagaauu

SEQ ID NO: 17658 - RNA, 1981 nt, Artificial Sequence
  mRNA product Design a-3 comprising derived and/or modified sequence from HRSV(Memphis-37)__AIY60640.1__F_DSCav1_mut6 (opt3)
gggagagggcgcuuggcuugcaaggacccugagcugcggcauugaagcacacccaacccaacucgacugaagucagccucacugaaccggaucugagaaucuucucucucugggcuugccagggcucuccgaaccuagcuagcauccucuucaauuccaacuagaaagcuuaccauggagcugcccauccucaagaccaacgccauuacaacuauacuugcugcagugacgcugugcuucgccagcucccagaauaucaccgaagaguuuuaccaaucuacauguucagcggucaguaaaggcuauuugggggcuuuaagaacuggaugguacaccagcguuauuacaaucgaacuguccaacauuaaggagaauaaaugcaacgguaccgacgccaaggugaaacuaaucaagcaggaacucgauaaguauaaaaaugcaguaacugaccugcagaugcuuauguguucuacuccugccgcuggcucggggucagcaauagccagcggaaucgcugugugcaagguccugcacuuggagggcgaggugaacaaaauuaagaaugcccuccugaguaccaacaaagcgguugugucccugucuaauggugucagcgugcucacguucaagguauuagaucugaagaacuacaucgacaaacagcuuuugccaauucugaauaagcaauccuguucaaucccgaaccccgaaacuguuauggaguuucagcagaaaaauaacaggcuacucgaaauaacccgggaguucagugugaaugcaggggucacaacuccugugagcaccuauaugcugacaaacucugagcuucuguccuugauuaacgauaugccaaucaccaaugaccagaagaaacucaugucaaacaaugugcaaauuguccgccagcagagcuacaguaucaugugcaucauuaaggaagagguucuggccuaugugguacaguuaccccuguacggagugauagauacgccuuguuggaaacuccauacuucuccacuuugcacaaccaacacuaaggaaggcuccaauaucugucugacacgaaccgaccguggcugguacugcgauaacgcugggagcgucucguuuuucccccaagccgagacguguaaggugugcucuaauagaguuuucugcgacaccaugaacuccuugacacuaccuucagaagugaaucuguguaacauugauaucuucaauccaaaauaugacugcaagauaaugacaaguaaaaccgaugucagcuccucugugauuacaagccucggagcaaucguaucauguuacgguaagacuaaaugcaccgcuaguaacaagaauaagggcaucauuaaaacauuuuccaacgggugugacuauguuagcaauaagggaguggacaccgucucugugggcaacacucuguacuaugucaacaaacaggagggucagucacuuuacgugaagggggagccgaucauuaauuucuaugauccccugguuuuuccuagugacgaauuugaugccagcauaucccaagugaacgagaaaaucaaucagucuuuggcguuuauuaggaagucggacgaacuccugcacaacguaaaugucggaaagagcacgacaaacaucaugaucaccacuauuauaaucgugauuaucguuauuuuacugcuacucaucgccgugggccuguuccuuuacugcaaagcacgguccaccccagucacauugucaaaggaucagcugaguggcauaaauaacaucgcuuucucuaauugaggacuagucccuguucccagagcccacuuuuuuuucuuuuuuugaaauaaaauagccugucuuucagaucuaaaaaaaaaaaaaaaaaaaaaaaaaaaaaaaaaaaaaaaaaaaaaaaaaaaaaaaaaaaaaaaaugcaucccccccccccccccccccccccccccccccaaaggcucuuuucagagccaccagaauu

SEQ ID NO: 17659 - RNA, 1981 nt, Artificial Sequence
  mRNA product Design a-3 comprising derived and/or modified sequence from HRSV(Memphis-37)__AIY60640.1__F_DSCav1_mut6 (opt4)
gggagagggcgcuuggcuugcaaggacccugagcugcggcauugaagcacacccaacccaacucgacugaagucagccucacugaaccggaucugagaaucuucucucucugggcuugccagggcucuccgaaccuagcuagcauccucuucaauuccaacuagaaagcuuaccauggagcugcccauccugaagaccaacgccaucaccaccauccuggccgccgugacccugugcuucgccagcagccagaacaucaccgaggaguucuaccagagcaccugcagcgccgugagcaagggcuaccugggcgcccugagaaccggcugguacaccagcgugaucaccaucgagcugagcaacaucaaggagaacaagugcaacggcaccgacgccaaggugaagcugaucaagcaggagcuggacaaguacaagaacgccgugaccgaccugcagaugcugaugugcagcacccccgccgccggcagcggcagcgccaucgccagcggcaucgccgugugcaaggugcugcaccuggagggcgaggugaacaagaucaagaacgcccugcugagcaccaacaaggccguggugagccugagcaacggcgugagcgugcugaccuucaaggugcuggaccugaagaacuacaucgacaagcagcugcugcccauccugaacaagcagagcugcagcauccccaaccccgagaccgugauggaguuccagcagaagaacaacagacugcuggagaucaccagagaguucagcgugaacgccggcgugaccacccccgugagcaccuacaugcugaccaacagcgagcugcugagccugaucaacgacaugcccaucaccaacgaccagaagaagcugaugagcaacaacgugcagaucgugagacagcagagcuacagcaucaugugcaucaucaaggaggaggugcuggccuacguggugcagcugccccuguacggcgugaucgacacccccugcuggaagcugcacaccagcccccugugcaccaccaacaccaaggagggcagcaacaucugccugaccagaaccgacagaggcugguacugcgacaacgccggcagcgugagcuucuucccccaggccgagaccugcaaggugugcagcaacagaguguucugcgacaccaugaacagccugacccugcccagcgaggugaaccugugcaacaucgacaucuucaaccccaaguacgacugcaagaucaugaccagcaagaccgacgugagcagcagcgugaucaccagccugggcgccaucgugagcugcuacggcaagaccaagugcaccgccagcaacaagaacaagggcaucaucaagaccuucagcaacggcugcgacuacgugagcaacaagggcguggacaccgugagcgugggcaacacccuguacuacgugaacaagcaggagggccagagccuguacgugaagggcgagcccaucaucaacuucuacgacccccugguguuccccagcgacgaguucgacgccagcaucagccaggugaacgagaagaucaaccagagccuggccuucaucagaaagagcgacgagcugcugcacaacgugaacgugggcaagagcaccaccaacaucaugaucaccaccaucaucaucgugaucaucgugauccugcugcugcugaucgccgugggccuguuccuguacugcaaggccagaagcacccccgugacccugagcaaggaccagcugagcggcaucaacaacaucgccuucagcaacugaggacuagucccuguucccagagcccacuuuuuuuucuuuuuuugaaauaaaauagccugucuuucagaucuaaaaaaaaaaaaaaaaaaaaaaaaaaaaaaaaaaaaaaaaaaaaaaaaaaaaaaaaaaaaaaaaugcaucccccccccccccccccccccccccccccccaaaggcucuuuucagagccaccagaauu

SEQ ID NO: 17660 - RNA, 1981 nt, Artificial Sequence
  mRNA product Design a-3 comprising derived and/or modified sequence from HRSV(Memphis-37)__AIY60640.1__F_DSCav1_mut6 (opt5)
gggagagggcgcuuggcuugcaaggacccugagcugcggcauugaagcacacccaacccaacucgacugaagucagccucacugaaccggaucugagaaucuucucucucugggcuugccagggcucuccgaaccuagcuagcauccucuucaauuccaacuagaaagcuuaccauggagcugcccauccucaagaccaacgccauuacaacgauccuggcugccgugacccuuugcuucgcgagcucccagaauauuacagaagaguuuuaccaaucuaccuguagcgcugucuccaaaggcuaucugggggcccucagaacaggaugguacaccucuguuaucacaauugaacugagcaacaucaaggagaauaaaugcaacggcaccgacgccaaggugaaacuuaucaagcaggaacuggauaaguauaaaaaugcugugacggaccuccagaugcugauguguuccaccccugccgcugggucuggaagcgccauugcguccggcaucgccgucugcaaggugcugcaccucgagggggagguuaacaaaauuaagaaugcucugcuuagcacaaacaaagccguggucucucuguccaauggagugagcguucucaccuucaaggugcuggaucuuaagaacuacaucgacaaacagcugcucccgauucugaauaagcaaucuuguuccauccccaacccugaaacagucauggaguuucagcagaaaaauaaccggcugcucgaaauuacccgcgaguucagcgugaaugcuggcgugacgacacccgucucuaccuauaugcugacaaacuccgagcuucugagccucaucaacgauaugccuaucaccaaugaccagaagaaacugauguccaacaauguucaaauugugagacagcagucuuacagcaucaugugcauuaucaaggaagaggugcuugccuaugucgugcagcugccccucuacggcguuauugauaccccuuguuggaaacugcauacauccccgcugugcacgaccaacacaaaggaagggagcaauaucugucucacccggacagaccgcggaugguacugcgauaacgcgggcucuguguccuuuuucccccaagccgagaccuguaaggucugcagcaauagaguguuuugcgacacgaugaacucucugacacuuccuagcgaaguuaaucuguguaacaucgauauuuucaaucccaaauaugacugcaagaucaugaccuccaaaaccgaugugucuagcuccgucauuacaagccucggggcuaucgugucuuguuacggaaagaccaaaugcacagccuccaacaagaauaagggcauuaucaaaacguuuagcaacgggugugacuaugucucuaauaagggaguggacaccguuuccgugggcaacacacuguacuaugucaacaaacaggagggccagagccuuuacgugaagggggagccuaucauuaauuucuaugauccccugguuuuuccguccgacgaauuugaugcuucuaucagccaagugaacgagaaaauuaaucagucccucgccuucauccggaagucugacgaacugcugcacaacgucaaugugggaaagagcaccacaaacauuaugaucaccacgauuaucaucgugauuaucguuauucuccugcuucugaucgccgucggccucuuccuguacugcaaagcucgcuccaccccugugacacugagcaaggaucagcuuucugggauuaauaacaucgcguucuccaauugaggacuagucccuguucccagagcccacuuuuuuuucuuuuuuugaaauaaaauagccugucuuucagaucuaaaaaaaaaaaaaaaaaaaaaaaaaaaaaaaaaaaaaaaaaaaaaaaaaaaaaaaaaaaaaaaaugcaucccccccccccccccccccccccccccccccaaaggcucuuuucagagccaccagaauu

SEQ ID NO: 17661 - RNA, 1981 nt, Artificial Sequence
  mRNA product Design a-3 comprising derived and/or modified sequence from HRSV(Memphis-37)__AIY60640.1__F_DSCav1_mut6 (opt6)
gggagagggcgcuuggcuugcaaggacccugagcugcggcauugaagcacacccaacccaacucgacugaagucagccucacugaaccggaucugagaaucuucucucucugggcuugccagggcucuccgaaccuagcuagcauccucuucaauuccaacuagaaagcuuaccauggaacuaccaauuuuaaaaacaaacgcaauuacaacuauacucgcagcaguaacauuauguuucgccucaucccaaaacauaacagaagaauuuuaccaaucaacaugcagcgcaguaucaaaaggauaucucggagcauuacgaacagguugguacacaucuguaaucacuauagaacuaucaaacauaaaagaaaacaaaugcaauggaaccgacgcaaaaguaaaauuaauaaaacaagaacucgauaaauacaaaaaugcaguaacagaccuccaaaugcucauguguucaacaccagccgcaggaucagguuccgccauagcaucuggcauagcaguaugcaaaguacuccacuuagaaggagaaguuaacaaaauaaaaaacgcacuauuaucaacaaacaaagcaguaguaucccucucaaacggagucucaguauuaacauucaaaguauuagaccuaaaaaacuacauagacaaacaacuacuuccaauacucaacaaacaaucaugcucaauaccaaacccagaaaccguaauggaauuucaacaaaaaaacaaccgacuacuagaaaucacacgagaauuuucaguaaacgccggugucacaacuccaguaucaacuuauauguuaaccaacucagaacuauuaucauuaauaaacgauaugcccauaacuaacgaccaaaaaaaauuaaugucaaacaacguacaaauaguacgccaacaaaguuacucaauaaugugcaucauaaaagaagaaguauuagcguacguuguacaacuaccucuauacggagucauagacacaccaugcuggaaacuucacacaucaccacuauguacaacaaacacaaaagaaggcaguaacauaugccuaacaagaacagaccguggaugguauugugacaacgcuggaucuguaucauucuucccucaagcagaaaccuguaaaguuugcucaaacagagucuucugugacacaaugaacucucuaacacuaccuuccgaagugaaccucuguaacauagacauauucaauccaaaauaugauugcaaaauaaugacuucaaaaacagauguaucauccucuguuauaacaucauuaggcgccauaguuucaugcuacggaaaaacuaaaugcacagcaucaaacaaaaacaaaggaauaauaaaaaccuucucaaauggaugcgacuacguaagcaacaaaggcguagacacaguaucaguagguaauacauuauacuacguaaacaaacaagaaggacaaucacuuuauguuaaaggagaaccuauaauaaacuucuacgacccacuuguauuuccauccgaugaauuugacgcaucuauaucacaagucaacgaaaaaauaaaccaaucauuagcauucauucgaaaauccgaugaacuacuccauaacguaaaugucggaaaaucaacaaccaacauaaugaucacaacaauaaucauagugauaauaguaauacuccuacuacuaaucgcaguaggucuauuccuauauuguaaagcaagaucuacuccaguuacacucucuaaagaccaauuaagcgguaucaacaacaucgccuucagcaauuaaggacuagucccuguucccagagcccacuuuuuuuucuuuuuuugaaauaaaauagccugucuuucagaucuaaaaaaaaaaaaaaaaaaaaaaaaaaaaaaaaaaaaaaaaaaaaaaaaaaaaaaaaaaaaaaaaugcaucccccccccccccccccccccccccccccccaaaggcucuuuucagagccaccagaauu

SEQ ID NO: 17662 - RNA, 1981 nt, Artificial Sequence
  mRNA product Design a-3 comprising derived and/or modified sequence from HRSV(Memphis-37)__AIY60640.1__F_DSCav1_mut6 (opt11)
gggagagggcgcuuggcuugcaaggacccugagcugcggcauugaagcacacccaacccaacucgacugaagucagccucacugaaccggaucugagaaucuucucucucugggcuugccagggcucuccgaaccuagcuagcauccucuucaauuccaacuagaaagcuuaccauggagcugcccauccucaagaccaacgccaucaccacgauccuggccgcggugacccugugcuucgcgagcucccaaaacaucaccgaggaguucuaccagagcacgugcuccgccgucagcaagggcuaccucggggcccugcgcaccggcugguacaccuccgugaucaccaucgagcugagcaacaucaaggaaaacaagugcaacgggacggacgcaaaggugaagcucaucaagcaggagcuggauaaguacaagaacgcggucacggaccugcagaugcucaugugcuccaccccggccgccggcagcggguccgccaucgcguccggcaucgccgugugcaagguguugcaccuggagggcgaggucaacaagaucaagaacgcccuccuuuccaccaauaaggcuguugugagccuguccaacggggucagcgugcucaccuucaaggugcuggaccugaagaacuacaucgacaagcagcuccugcccauccugaacaagcaguccugcagcauccccaaccccgagacagucauggaguuccagcagaagaacaaccggcuccuggagaucacccgcgaguucuccguuaacgccggggugaccaccccgguaagcacauacaugcugaccaacagcgagcuccugagccugaucaacgacaugcccaucaccaacgaccagaagaagcucaugagcaacaacgugcagaucgugcggcagcaguccuacagcaucaugugcaucaucaaggaggagguccuggcguacguggugcaacugccccucuacggggucaucgacacccccugcuggaagcugcacacguccccgcugugcaccaccaacaccaaggagggcagcaacaucugccucacgcgcaccgaccgggggugguacugcgacaacgcaggcuccgugagcuucuucccccaggccgagaccugcaaggugugcuccaaccgcgucuucugcgacaccaugaacagccugacgcugcccuccgaggugaaccucugcaacaucgacaucuucaaccccaaguacgacuguaagaucaugaccagcaagaccgaugucuccagcuccgugaucaccagccugggcgccauaguguccuguuaugggaagacgaagugcaccgccagcaacaagaacaaaggcaucaucaagaccuucuccaacgggugcgacuacgucagcaacaagggcguggacacaguguccgucggcaacacgcuguacuacgugaacaagcaggaggggcagagccucuacgugaagggcgagccgaucaucaacuucuacgauccccuggucuuccccagcgacgaguucgacgcguccaucagccaagugaacgagaagaucaaccagucccuggccuucauccgcaagagcgacgagcuccugcacaacgugaacgucgggaaguccaccaccaacaucaugaucaccaccaucaucaucgugaucaucgucauccugcuccugcugaucgccgucggccucuuccuguacugcaaggcccggagcacgcccgugacccuguccaaggaccagcugucgggcaucaacaacaucgccuucuccaacugaggacuagucccuguucccagagcccacuuuuuuuucuuuuuuugaaauaaaauagccugucuuucagaucuaaaaaaaaaaaaaaaaaaaaaaaaaaaaaaaaaaaaaaaaaaaaaaaaaaaaaaaaaaaaaaaaugcaucccccccccccccccccccccccccccccccaaaggcucuuuucagagccaccagaauu

SEQ ID NO: 17663 - RNA, 1930 nt, Artificial Sequence
  mRNA product Design a-4 comprising derived and/or modified sequence from HRSV(Memphis-37)__AIY60640.1__F_DSCav1_mut6 (opt1)
gggagacuccugucgggcggaaguaggaggaguagaguuuaaaaacaguacucuuuuuccgguucgggacguaguugaagcaacgacaagccggauaaccgcucuugagacaggaagcuuaccauggagcugcccauccucaagaccaacgccaucaccacgauccuggccgcggugacccugugcuucgccagcucccagaacaucaccgaggaguucuaccagagcacgugcuccgccgucagcaagggcuaccucggcgcccugcgcaccgggugguacaccagcgugaucaccaucgagcuguccaacaucaaggagaacaagugcaacggcaccgacgccaaggugaagcucaucaagcaggagcuggacaaguacaagaacgcggucacggaccugcagaugcugaugugcagcaccccggccgccggcuccgggagcgcgaucgccuccggcaucgccgucugcaaggugcugcaccucgagggcgaggugaacaagaucaagaacgcccugcuguccaccaacaaggccgucgugagccucuccaacggggugagcguccugaccuucaaggugcuggaccucaagaacuacaucgacaagcagcugcugcccauccugaacaagcagagcugcuccauccccaaccccgagaccgucauggaguuccagcagaagaacaaccgccuccuggagaucacgcgggaguucagcgugaacgcgggcgugaccacccccgucuccaccuacaugcugacgaacagcgagcuccugucccugaucaacgacaugccgaucaccaacgaccagaagaagcucaugagcaacaacgugcagaucgugcgccagcaguccuacagcaucaugugcaucaucaaggaggagguccuggccuacguggugcagcugccccucuacggggucaucgacacccccugcuggaagcugcacaccagcccccugugcacgaccaacaccaaggagggcuccaacaucugccucacccggacggaccgcgggugguacugcgacaacgccggcagcguguccuucuucccgcaggccgagaccugcaaggucugcagcaaccggguguucugcgacaccaugaacucccugacccugcccagcgaggugaaccucugcaacaucgacaucuucaaccccaaguacgacugcaagaucaugacguccaagaccgacgucagcuccagcgugaucaccucccugggcgccaucgugagcugcuacgggaagaccaagugcacggcgagcaacaagaacaagggcaucaucaagaccuucuccaacgggugcgacuacgucagcaacaagggcguggacaccguguccgucggcaacacccuguacuacgugaacaagcaggagggccagagccucuacgugaagggggagcccaucaucaacuucuacgacccgcuggucuuccccuccgacgaguucgacgccagcaucucccaggugaacgagaagaucaaccagagccuggccuucauccggaaguccgacgagcuccugcacaacgugaacgucggcaagagcaccacgaacaucaugaucaccaccaucaucaucgugaucaucgugauccugcugcuccugaucgccgucgggcuguuccucuacugcaaggcccgcuccacccccgugacgcugagcaaggaccagcuguccgggaucaacaacaucgcguucagcaacugaggacuagucccuguucccagagcccacuuuuuuuucuuuuuuugaaauaaaauagccugucuuucagaucuaaaaaaaaaaaaaaaaaaaaaaaaaaaaaaaaaaaaaaaaaaaaaaaaaaaaaaaaaaaaaaaaugcaucccccccccccccccccccccccccccccccaaaggcucuuuucagagccaccagaauu

SEQ ID NO: 17664 - RNA, 1930 nt, Artificial Sequence
  mRNA product Design a-4 comprising derived and/or modified sequence from HRSV(Memphis-37)__AIY60640.1__F_DSCav1_mut6 (opt1)
gggagacuccugucgggcggaaguaggaggaguagaguuuaaaaacaguacucuuuuuccgguucgggacguaguugaagcaacgacaagccggauaaccgcucuugagacaggaagcuuaccauggagcugcccauccucaagaccaacgccaucaccacgauccuggccgcggugacccugugcuucgccagcucccagaacaucaccgaggaguucuaccagagcacgugcuccgccgucagcaagggcuaccucggggcccugcgcaccggcugguacaccuccgugaucaccaucgagcugagcaacaucaaggagaacaagugcaacgggaccgacgccaaggugaagcucaucaagcaggagcuggacaaguacaagaacgcggucacggaccugcagaugcucaugugcuccaccccggccgccggcagcggguccgccaucgcgagcggcaucgccgugugcaaggugcugcaccuggagggcgaggucaacaagaucaagaacgcccuccuguccaccaacaaggccguggugagccuguccaacggggucagcgugcucaccuucaaggugcuggaccugaagaacuacaucgacaagcagcuccugcccauccugaacaagcaguccugcagcauccccaaccccgagacggucauggaguuccagcagaagaacaaccggcuccuggagaucacccgcgaguucuccgugaacgccggcgugaccaccccggucagcacguacaugcugaccaacuccgagcuccugagccugaucaacgacaugcccaucaccaacgaccagaagaagcucaugagcaacaacgugcagaucgugcggcagcaguccuacagcaucaugugcaucaucaaggaggagguccuggcguacguggugcagcugccccucuacggggucaucgacacccccugcuggaagcugcacacguccccgcugugcaccaccaacaccaaggagggcagcaacaucugccucacgcgcaccgaccgggggugguacugcgacaacgccggcuccgugagcuucuucccccaggccgagaccugcaaggugugcuccaaccgcgucuucugcgacaccaugaacagccugacgcugcccuccgaggugaaccucugcaacaucgacaucuucaaccccaaguacgacugcaagaucaugaccagcaagaccgacgucuccagcuccgugaucaccagccugggcgccaucguguccugcuacgggaagacgaagugcaccgccagcaacaagaacaagggcaucaucaagaccuucuccaacgggugcgacuacgucagcaacaagggcguggacaccguguccgucggcaacacgcuguacuacgugaacaagcaggaggggcagagccucuacgugaagggcgagccgaucaucaacuucuacgacccccuggucuuccccagcgacgaguucgacgcguccaucagccaggugaacgagaagaucaaccagucccuggccuucauccgcaagagcgacgagcuccugcacaacgugaacgucgggaaguccaccaccaacaucaugaucaccaccaucaucaucgugaucaucgugauccugcuccugcugaucgccgucggccucuuccuguacugcaaggcccggagcacgcccgugacccuguccaaggaccagcugagcgggaucaacaacaucgccuucuccaacugaggacuagucccuguucccagagcccacuuuuuuuucuuuuuuugaaauaaaauagccugucuuucagaucuaaaaaaaaaaaaaaaaaaaaaaaaaaaaaaaaaaaaaaaaaaaaaaaaaaaaaaaaaaaaaaaaugcaucccccccccccccccccccccccccccccccaaaggcucuuuucagagccaccagaauu

SEQ ID NO: 17665 - RNA, 1930 nt, Artificial Sequence
  mRNA product Design a-4 comprising derived and/or modified sequence from HRSV(Memphis-37)__AIY60640.1__F_DSCav1_mut6 (opt2)
gggagacuccugucgggcggaaguaggaggaguagaguuuaaaaacaguacucuuuuuccgguucgggacguaguugaagcaacgacaagccggauaaccgcucuugagacaggaagcuuaccauggagcuccccauccucaagaccaacgccaucaccaccauccucgccgccgucacccucugcuucgccuccucccagaacaucaccgaggaguucuaccaguccaccugcuccgccgucuccaagggcuaccucggcgcccuccgcaccggcugguacaccuccgucaucaccaucgagcucuccaacaucaaggagaacaagugcaacggcaccgacgccaaggucaagcucaucaagcaggagcucgacaaguacaagaacgccgucaccgaccuccagaugcucaugugcuccacccccgccgccggcuccggcuccgccaucgccuccggcaucgccgucugcaagguccuccaccucgagggcgaggucaacaagaucaagaacgcccuccucuccaccaacaaggccgucgucucccucuccaacggcgucuccguccucaccuucaagguccucgaccucaagaacuacaucgacaagcagcuccuccccauccucaacaagcaguccugcuccauccccaaccccgagaccgucauggaguuccagcagaagaacaaccgccuccucgagaucacccgcgaguucuccgucaacgccggcgucaccacccccgucuccaccuacaugcucaccaacuccgagcuccucucccucaucaacgacaugcccaucaccaacgaccagaagaagcucauguccaacaacguccagaucguccgccagcaguccuacuccaucaugugcaucaucaaggaggagguccucgccuacgucguccagcucccccucuacggcgucaucgacacccccugcuggaagcuccacaccuccccccucugcaccaccaacaccaaggagggcuccaacaucugccucacccgcaccgaccgcggcugguacugcgacaacgccggcuccgucuccuucuucccccaggccgagaccugcaaggucugcuccaaccgcgucuucugcgacaccaugaacucccucacccuccccuccgaggucaaccucugcaacaucgacaucuucaaccccaaguacgacugcaagaucaugaccuccaagaccgacgucuccuccuccgucaucaccucccucggcgccaucgucuccugcuacggcaagaccaagugcaccgccuccaacaagaacaagggcaucaucaagaccuucuccaacggcugcgacuacgucuccaacaagggcgucgacaccgucuccgucggcaacacccucuacuacgucaacaagcaggagggccagucccucuacgucaagggcgagcccaucaucaacuucuacgacccccucgucuuccccuccgacgaguucgacgccuccaucucccaggucaacgagaagaucaaccagucccucgccuucauccgcaaguccgacgagcuccuccacaacgucaacgucggcaaguccaccaccaacaucaugaucaccaccaucaucaucgucaucaucgucauccuccuccuccucaucgccgucggccucuuccucuacugcaaggcccgcuccacccccgucacccucuccaaggaccagcucuccggcaucaacaacaucgccuucuccaacugaggacuagucccuguucccagagcccacuuuuuuuucuuuuuuugaaauaaaauagccugucuuucagaucuaaaaaaaaaaaaaaaaaaaaaaaaaaaaaaaaaaaaaaaaaaaaaaaaaaaaaaaaaaaaaaaaugcaucccccccccccccccccccccccccccccccaaaggcucuuuucagagccaccagaauu

SEQ ID NO: 17666 - RNA, 1930 nt, Artificial Sequence
  mRNA product Design a-4 comprising derived and/or modified sequence from HRSV(Memphis-37)__AIY60640.1__F_DSCav1_mut6 (opt3)
gggagacuccugucgggcggaaguaggaggaguagaguuuaaaaacaguacucuuuuuccgguucgggacguaguugaagcaacgacaagccggauaaccgcucuugagacaggaagcuuaccauggagcugcccauccucaagaccaacgccauuacaacuauacuugcugcagugacgcugugcuucgccagcucccagaauaucaccgaagaguuuuaccaaucuacauguucagcggucaguaaaggcuauuugggggcuuuaagaacuggaugguacaccagcguuauuacaaucgaacuguccaacauuaaggagaauaaaugcaacgguaccgacgccaaggugaaacuaaucaagcaggaacucgauaaguauaaaaaugcaguaacugaccugcagaugcuuauguguucuacuccugccgcuggcucggggucagcaauagccagcggaaucgcugugugcaagguccugcacuuggagggcgaggugaacaaaauuaagaaugcccuccugaguaccaacaaagcgguugugucccugucuaauggugucagcgugcucacguucaagguauuagaucugaagaacuacaucgacaaacagcuuuugccaauucugaauaagcaauccuguucaaucccgaaccccgaaacuguuauggaguuucagcagaaaaauaacaggcuacucgaaauaacccgggaguucagugugaaugcaggggucacaacuccugugagcaccuauaugcugacaaacucugagcuucuguccuugauuaacgauaugccaaucaccaaugaccagaagaaacucaugucaaacaaugugcaaauuguccgccagcagagcuacaguaucaugugcaucauuaaggaagagguucuggccuaugugguacaguuaccccuguacggagugauagauacgccuuguuggaaacuccauacuucuccacuuugcacaaccaacacuaaggaaggcuccaauaucugucugacacgaaccgaccguggcugguacugcgauaacgcugggagcgucucguuuuucccccaagccgagacguguaaggugugcucuaauagaguuuucugcgacaccaugaacuccuugacacuaccuucagaagugaaucuguguaacauugauaucuucaauccaaaauaugacugcaagauaaugacaaguaaaaccgaugucagcuccucugugauuacaagccucggagcaaucguaucauguuacgguaagacuaaaugcaccgcuaguaacaagaauaagggcaucauuaaaacauuuuccaacgggugugacuauguuagcaauaagggaguggacaccgucucugugggcaacacucuguacuaugucaacaaacaggagggucagucacuuuacgugaagggggagccgaucauuaauuucuaugauccccugguuuuuccuagugacgaauuugaugccagcauaucccaagugaacgagaaaaucaaucagucuuuggcguuuauuaggaagucggacgaacuccugcacaacguaaaugucggaaagagcacgacaaacaucaugaucaccacuauuauaaucgugauuaucguuauuuuacugcuacucaucgccgugggccuguuccuuuacugcaaagcacgguccaccccagucacauugucaaaggaucagcugaguggcauaaauaacaucgcuuucucuaauugaggacuagucccuguucccagagcccacuuuuuuuucuuuuuuugaaauaaaauagccugucuuucagaucuaaaaaaaaaaaaaaaaaaaaaaaaaaaaaaaaaaaaaaaaaaaaaaaaaaaaaaaaaaaaaaaaugcaucccccccccccccccccccccccccccccccaaaggcucuuuucagagccaccagaauu

SEQ ID NO: 17667 - RNA, 1930 nt, Artificial Sequence
  mRNA product Design a-4 comprising derived and/or modified sequence from HRSV(Memphis-37)__AIY60640.1__F_DSCav1_mut6 (opt4)
gggagacuccugucgggcggaaguaggaggaguagaguuuaaaaacaguacucuuuuuccgguucgggacguaguugaagcaacgacaagccggauaaccgcucuugagacaggaagcuuaccauggagcugcccauccugaagaccaacgccaucaccaccauccuggccgccgugacccugugcuucgccagcagccagaacaucaccgaggaguucuaccagagcaccugcagcgccgugagcaagggcuaccugggcgcccugagaaccggcugguacaccagcgugaucaccaucgagcugagcaacaucaaggagaacaagugcaacggcaccgacgccaaggugaagcugaucaagcaggagcuggacaaguacaagaacgccgugaccgaccugcagaugcugaugugcagcacccccgccgccggcagcggcagcgccaucgccagcggcaucgccgugugcaaggugcugcaccuggagggcgaggugaacaagaucaagaacgcccugcugagcaccaacaaggccguggugagccugagcaacggcgugagcgugcugaccuucaaggugcuggaccugaagaacuacaucgacaagcagcugcugcccauccugaacaagcagagcugcagcauccccaaccccgagaccgugauggaguuccagcagaagaacaacagacugcuggagaucaccagagaguucagcgugaacgccggcgugaccacccccgugagcaccuacaugcugaccaacagcgagcugcugagccugaucaacgacaugcccaucaccaacgaccagaagaagcugaugagcaacaacgugcagaucgugagacagcagagcuacagcaucaugugcaucaucaaggaggaggugcuggccuacguggugcagcugccccuguacggcgugaucgacacccccugcuggaagcugcacaccagcccccugugcaccaccaacaccaaggagggcagcaacaucugccugaccagaaccgacagaggcugguacugcgacaacgccggcagcgugagcuucuucccccaggccgagaccugcaaggugugcagcaacagaguguucugcgacaccaugaacagccugacccugcccagcgaggugaaccugugcaacaucgacaucuucaaccccaaguacgacugcaagaucaugaccagcaagaccgacgugagcagcagcgugaucaccagccugggcgccaucgugagcugcuacggcaagaccaagugcaccgccagcaacaagaacaagggcaucaucaagaccuucagcaacggcugcgacuacgugagcaacaagggcguggacaccgugagcgugggcaacacccuguacuacgugaacaagcaggagggccagagccuguacgugaagggcgagcccaucaucaacuucuacgacccccugguguuccccagcgacgaguucgacgccagcaucagccaggugaacgagaagaucaaccagagccuggccuucaucagaaagagcgacgagcugcugcacaacgugaacgugggcaagagcaccaccaacaucaugaucaccaccaucaucaucgugaucaucgugauccugcugcugcugaucgccgugggccuguuccuguacugcaaggccagaagcacccccgugacccugagcaaggaccagcugagcggcaucaacaacaucgccuucagcaacugaggacuagucccuguucccagagcccacuuuuuuuucuuuuuuugaaauaaaauagccugucuuucagaucuaaaaaaaaaaaaaaaaaaaaaaaaaaaaaaaaaaaaaaaaaaaaaaaaaaaaaaaaaaaaaaaaugcaucccccccccccccccccccccccccccccccaaaggcucuuuucagagccaccagaauu

SEQ ID NO: 17668 - RNA, 1930 nt, Artificial Sequence
  mRNA product Design a-4 comprising derived and/or modified sequence from HRSV(Memphis-37)__AIY60640.1__F_DSCav1_mut6 (opt5)
gggagacuccugucgggcggaaguaggaggaguagaguuuaaaaacaguacucuuuuuccgguucgggacguaguugaagcaacgacaagccggauaaccgcucuugagacaggaagcuuaccauggagcugcccauccucaagaccaacgccauuacaacgauccuggcugccgugacccuuugcuucgcgagcucccagaauauuacagaagaguuuuaccaaucuaccuguagcgcugucuccaaaggcuaucugggggcccucagaacaggaugguacaccucuguuaucacaauugaacugagcaacaucaaggagaauaaaugcaacggcaccgacgccaaggugaaacuuaucaagcaggaacuggauaaguauaaaaaugcugugacggaccuccagaugcugauguguuccaccccugccgcugggucuggaagcgccauugcguccggcaucgccgucugcaaggugcugcaccucgagggggagguuaacaaaauuaagaaugcucugcuuagcacaaacaaagccguggucucucuguccaauggagugagcguucucaccuucaaggugcuggaucuuaagaacuacaucgacaaacagcugcucccgauucugaauaagcaaucuuguuccauccccaacccugaaacagucauggaguuucagcagaaaaauaaccggcugcucgaaauuacccgcgaguucagcgugaaugcuggcgugacgacacccgucucuaccuauaugcugacaaacuccgagcuucugagccucaucaacgauaugccuaucaccaaugaccagaagaaacugauguccaacaauguucaaauugugagacagcagucuuacagcaucaugugcauuaucaaggaagaggugcuugccuaugucgugcagcugccccucuacggcguuauugauaccccuuguuggaaacugcauacauccccgcugugcacgaccaacacaaaggaagggagcaauaucugucucacccggacagaccgcggaugguacugcgauaacgcgggcucuguguccuuuuucccccaagccgagaccuguaaggucugcagcaauagaguguuuugcgacacgaugaacucucugacacuuccuagcgaaguuaaucuguguaacaucgauauuuucaaucccaaauaugacugcaagaucaugaccuccaaaaccgaugugucuagcuccgucauuacaagccucggggcuaucgugucuuguuacggaaagaccaaaugcacagccuccaacaagaauaagggcauuaucaaaacguuuagcaacgggugugacuaugucucuaauaagggaguggacaccguuuccgugggcaacacacuguacuaugucaacaaacaggagggccagagccuuuacgugaagggggagccuaucauuaauuucuaugauccccugguuuuuccguccgacgaauuugaugcuucuaucagccaagugaacgagaaaauuaaucagucccucgccuucauccggaagucugacgaacugcugcacaacgucaaugugggaaagagcaccacaaacauuaugaucaccacgauuaucaucgugauuaucguuauucuccugcuucugaucgccgucggccucuuccuguacugcaaagcucgcuccaccccugugacacugagcaaggaucagcuuucugggauuaauaacaucgcguucuccaauugaggacuagucccuguucccagagcccacuuuuuuuucuuuuuuugaaauaaaauagccugucuuucagaucuaaaaaaaaaaaaaaaaaaaaaaaaaaaaaaaaaaaaaaaaaaaaaaaaaaaaaaaaaaaaaaaaugcaucccccccccccccccccccccccccccccccaaaggcucuuuucagagccaccagaauu

SEQ ID NO: 17669 - RNA, 1930 nt, Artificial Sequence
  mRNA product Design a-4 comprising derived and/or modified sequence from HRSV(Memphis-37)__AIY60640.1__F_DSCav1_mut6 (opt6)
gggagacuccugucgggcggaaguaggaggaguagaguuuaaaaacaguacucuuuuuccgguucgggacguaguugaagcaacgacaagccggauaaccgcucuugagacaggaagcuuaccauggaacuaccaauuuuaaaaacaaacgcaauuacaacuauacucgcagcaguaacauuauguuucgccucaucccaaaacauaacagaagaauuuuaccaaucaacaugcagcgcaguaucaaaaggauaucucggagcauuacgaacagguugguacacaucuguaaucacuauagaacuaucaaacauaaaagaaaacaaaugcaauggaaccgacgcaaaaguaaaauuaauaaaacaagaacucgauaaauacaaaaaugcaguaacagaccuccaaaugcucauguguucaacaccagccgcaggaucagguuccgccauagcaucuggcauagcaguaugcaaaguacuccacuuagaaggagaaguuaacaaaauaaaaaacgcacuauuaucaacaaacaaagcaguaguaucccucucaaacggagucucaguauuaacauucaaaguauuagaccuaaaaaacuacauagacaaacaacuacuuccaauacucaacaaacaaucaugcucaauaccaaacccagaaaccguaauggaauuucaacaaaaaaacaaccgacuacuagaaaucacacgagaauuuucaguaaacgccggugucacaacuccaguaucaacuuauauguuaaccaacucagaacuauuaucauuaauaaacgauaugcccauaacuaacgaccaaaaaaaauuaaugucaaacaacguacaaauaguacgccaacaaaguuacucaauaaugugcaucauaaaagaagaaguauuagcguacguuguacaacuaccucuauacggagucauagacacaccaugcuggaaacuucacacaucaccacuauguacaacaaacacaaaagaaggcaguaacauaugccuaacaagaacagaccguggaugguauugugacaacgcuggaucuguaucauucuucccucaagcagaaaccuguaaaguuugcucaaacagagucuucugugacacaaugaacucucuaacacuaccuuccgaagugaaccucuguaacauagacauauucaauccaaaauaugauugcaaaauaaugacuucaaaaacagauguaucauccucuguuauaacaucauuaggcgccauaguuucaugcuacggaaaaacuaaaugcacagcaucaaacaaaaacaaaggaauaauaaaaaccuucucaaauggaugcgacuacguaagcaacaaaggcguagacacaguaucaguagguaauacauuauacuacguaaacaaacaagaaggacaaucacuuuauguuaaaggagaaccuauaauaaacuucuacgacccacuuguauuuccauccgaugaauuugacgcaucuauaucacaagucaacgaaaaaauaaaccaaucauuagcauucauucgaaaauccgaugaacuacuccauaacguaaaugucggaaaaucaacaaccaacauaaugaucacaacaauaaucauagugauaauaguaauacuccuacuacuaaucgcaguaggucuauuccuauauuguaaagcaagaucuacuccaguuacacucucuaaagaccaauuaagcgguaucaacaacaucgccuucagcaauuaaggacuagucccuguucccagagcccacuuuuuuuucuuuuuuugaaauaaaauagccugucuuucagaucuaaaaaaaaaaaaaaaaaaaaaaaaaaaaaaaaaaaaaaaaaaaaaaaaaaaaaaaaaaaaaaaaugcaucccccccccccccccccccccccccccccccaaaggcucuuuucagagccaccagaauu

SEQ ID NO: 17670 - RNA, 1930 nt, Artificial Sequence
  mRNA product Design a-4 comprising derived and/or modified sequence from HRSV(Memphis-37)__AIY60640.1__F_DSCav1_mut6 (opt11)
gggagacuccugucgggcggaaguaggaggaguagaguuuaaaaacaguacucuuuuuccgguucgggacguaguugaagcaacgacaagccggauaaccgcucuugagacaggaagcuuaccauggagcugcccauccucaagaccaacgccaucaccacgauccuggccgcggugacccugugcuucgcgagcucccaaaacaucaccgaggaguucuaccagagcacgugcuccgccgucagcaagggcuaccucggggcccugcgcaccggcugguacaccuccgugaucaccaucgagcugagcaacaucaaggaaaacaagugcaacgggacggacgcaaaggugaagcucaucaagcaggagcuggauaaguacaagaacgcggucacggaccugcagaugcucaugugcuccaccccggccgccggcagcggguccgccaucgcguccggcaucgccgugugcaagguguugcaccuggagggcgaggucaacaagaucaagaacgcccuccuuuccaccaauaaggcuguugugagccuguccaacggggucagcgugcucaccuucaaggugcuggaccugaagaacuacaucgacaagcagcuccugcccauccugaacaagcaguccugcagcauccccaaccccgagacagucauggaguuccagcagaagaacaaccggcuccuggagaucacccgcgaguucuccguuaacgccggggugaccaccccgguaagcacauacaugcugaccaacagcgagcuccugagccugaucaacgacaugcccaucaccaacgaccagaagaagcucaugagcaacaacgugcagaucgugcggcagcaguccuacagcaucaugugcaucaucaaggaggagguccuggcguacguggugcaacugccccucuacggggucaucgacacccccugcuggaagcugcacacguccccgcugugcaccaccaacaccaaggagggcagcaacaucugccucacgcgcaccgaccgggggugguacugcgacaacgcaggcuccgugagcuucuucccccaggccgagaccugcaaggugugcuccaaccgcgucuucugcgacaccaugaacagccugacgcugcccuccgaggugaaccucugcaacaucgacaucuucaaccccaaguacgacuguaagaucaugaccagcaagaccgaugucuccagcuccgugaucaccagccugggcgccauaguguccuguuaugggaagacgaagugcaccgccagcaacaagaacaaaggcaucaucaagaccuucuccaacgggugcgacuacgucagcaacaagggcguggacacaguguccgucggcaacacgcuguacuacgugaacaagcaggaggggcagagccucuacgugaagggcgagccgaucaucaacuucuacgauccccuggucuuccccagcgacgaguucgacgcguccaucagccaagugaacgagaagaucaaccagucccuggccuucauccgcaagagcgacgagcuccugcacaacgugaacgucgggaaguccaccaccaacaucaugaucaccaccaucaucaucgugaucaucgucauccugcuccugcugaucgccgucggccucuuccuguacugcaaggcccggagcacgcccgugacccuguccaaggaccagcugucgggcaucaacaacaucgccuucuccaacugaggacuagucccuguucccagagcccacuuuuuuuucuuuuuuugaaauaaaauagccugucuuucagaucuaaaaaaaaaaaaaaaaaaaaaaaaaaaaaaaaaaaaaaaaaaaaaaaaaaaaaaaaaaaaaaaaugcaucccccccccccccccccccccccccccccccaaaggcucuuuucagagccaccagaauu

SEQ ID NO: 17671 - RNA, 1876 nt, Artificial Sequence
  mRNA product Design a-5 comprising derived and/or modified sequence from HRSV(Memphis-37)__AIY60640.1__F_DSCav1_mut6 (opt1)
gggagacuuucccauucuguagcagaauuugguguugccuguggucuuggucccgcggagaagcuuaccauggagcugcccauccucaagaccaacgccaucaccacgauccuggccgcggugacccugugcuucgccagcucccagaacaucaccgaggaguucuaccagagcacgugcuccgccgucagcaagggcuaccucggcgcccugcgcaccgggugguacaccagcgugaucaccaucgagcuguccaacaucaaggagaacaagugcaacggcaccgacgccaaggugaagcucaucaagcaggagcuggacaaguacaagaacgcggucacggaccugcagaugcugaugugcagcaccccggccgccggcuccgggagcgcgaucgccuccggcaucgccgucugcaaggugcugcaccucgagggcgaggugaacaagaucaagaacgcccugcuguccaccaacaaggccgucgugagccucuccaacggggugagcguccugaccuucaaggugcuggaccucaagaacuacaucgacaagcagcugcugcccauccugaacaagcagagcugcuccauccccaaccccgagaccgucauggaguuccagcagaagaacaaccgccuccuggagaucacgcgggaguucagcgugaacgcgggcgugaccacccccgucuccaccuacaugcugacgaacagcgagcuccugucccugaucaacgacaugccgaucaccaacgaccagaagaagcucaugagcaacaacgugcagaucgugcgccagcaguccuacagcaucaugugcaucaucaaggaggagguccuggccuacguggugcagcugccccucuacggggucaucgacacccccugcuggaagcugcacaccagcccccugugcacgaccaacaccaaggagggcuccaacaucugccucacccggacggaccgcgggugguacugcgacaacgccggcagcguguccuucuucccgcaggccgagaccugcaaggucugcagcaaccggguguucugcgacaccaugaacucccugacccugcccagcgaggugaaccucugcaacaucgacaucuucaaccccaaguacgacugcaagaucaugacguccaagaccgacgucagcuccagcgugaucaccucccugggcgccaucgugagcugcuacgggaagaccaagugcacggcgagcaacaagaacaagggcaucaucaagaccuucuccaacgggugcgacuacgucagcaacaagggcguggacaccguguccgucggcaacacccuguacuacgugaacaagcaggagggccagagccucuacgugaagggggagcccaucaucaacuucuacgacccgcuggucuuccccuccgacgaguucgacgccagcaucucccaggugaacgagaagaucaaccagagccuggccuucauccggaaguccgacgagcuccugcacaacgugaacgucggcaagagcaccacgaacaucaugaucaccaccaucaucaucgugaucaucgugauccugcugcuccugaucgccgucgggcuguuccucuacugcaaggcccgcuccacccccgugacgcugagcaaggaccagcuguccgggaucaacaacaucgcguucagcaacugaggacuagucccuguucccagagcccacuuuuuuuucuuuuuuugaaauaaaauagccugucuuucagaucuaaaaaaaaaaaaaaaaaaaaaaaaaaaaaaaaaaaaaaaaaaaaaaaaaaaaaaaaaaaaaaaaugcaucccccccccccccccccccccccccccccccaaaggcucuuuucagagccaccagaauu

SEQ ID NO: 17672 - RNA, 1876 nt, Artificial Sequence
  mRNA product Design a-5 comprising derived and/or modified sequence from HRSV(Memphis-37)__AIY60640.1__F_DSCav1_mut6 (opt1)
gggagacuuucccauucuguagcagaauuugguguugccuguggucuuggucccgcggagaagcuuaccauggagcugcccauccucaagaccaacgccaucaccacgauccuggccgcggugacccugugcuucgccagcucccagaacaucaccgaggaguucuaccagagcacgugcuccgccgucagcaagggcuaccucggggcccugcgcaccggcugguacaccuccgugaucaccaucgagcugagcaacaucaaggagaacaagugcaacgggaccgacgccaaggugaagcucaucaagcaggagcuggacaaguacaagaacgcggucacggaccugcagaugcucaugugcuccaccccggccgccggcagcggguccgccaucgcgagcggcaucgccgugugcaaggugcugcaccuggagggcgaggucaacaagaucaagaacgcccuccuguccaccaacaaggccguggugagccuguccaacggggucagcgugcucaccuucaaggugcuggaccugaagaacuacaucgacaagcagcuccugcccauccugaacaagcaguccugcagcauccccaaccccgagacggucauggaguuccagcagaagaacaaccggcuccuggagaucacccgcgaguucuccgugaacgccggcgugaccaccccggucagcacguacaugcugaccaacuccgagcuccugagccugaucaacgacaugcccaucaccaacgaccagaagaagcucaugagcaacaacgugcagaucgugcggcagcaguccuacagcaucaugugcaucaucaaggaggagguccuggcguacguggugcagcugccccucuacggggucaucgacacccccugcuggaagcugcacacguccccgcugugcaccaccaacaccaaggagggcagcaacaucugccucacgcgcaccgaccgggggugguacugcgacaacgccggcuccgugagcuucuucccccaggccgagaccugcaaggugugcuccaaccgcgucuucugcgacaccaugaacagccugacgcugcccuccgaggugaaccucugcaacaucgacaucuucaaccccaaguacgacugcaagaucaugaccagcaagaccgacgucuccagcuccgugaucaccagccugggcgccaucguguccugcuacgggaagacgaagugcaccgccagcaacaagaacaagggcaucaucaagaccuucuccaacgggugcgacuacgucagcaacaagggcguggacaccguguccgucggcaacacgcuguacuacgugaacaagcaggaggggcagagccucuacgugaagggcgagccgaucaucaacuucuacgacccccuggucuuccccagcgacgaguucgacgcguccaucagccaggugaacgagaagaucaaccagucccuggccuucauccgcaagagcgacgagcuccugcacaacgugaacgucgggaaguccaccaccaacaucaugaucaccaccaucaucaucgugaucaucgugauccugcuccugcugaucgccgucggccucuuccuguacugcaaggcccggagcacgcccgugacccuguccaaggaccagcugagcgggaucaacaacaucgccuucuccaacugaggacuagucccuguucccagagcccacuuuuuuuucuuuuuuugaaauaaaauagccugucuuucagaucuaaaaaaaaaaaaaaaaaaaaaaaaaaaaaaaaaaaaaaaaaaaaaaaaaaaaaaaaaaaaaaaaugcaucccccccccccccccccccccccccccccccaaaggcucuuuucagagccaccagaauu

SEQ ID NO: 17673 - RNA, 1876 nt, Artificial Sequence
  mRNA product Design a-5 comprising derived and/or modified sequence from HRSV(Memphis-37)__AIY60640.1__F_DSCav1_mut6 (opt2)
gggagacuuucccauucuguagcagaauuugguguugccuguggucuuggucccgcggagaagcuuaccauggagcuccccauccucaagaccaacgccaucaccaccauccucgccgccgucacccucugcuucgccuccucccagaacaucaccgaggaguucuaccaguccaccugcuccgccgucuccaagggcuaccucggcgcccuccgcaccggcugguacaccuccgucaucaccaucgagcucuccaacaucaaggagaacaagugcaacggcaccgacgccaaggucaagcucaucaagcaggagcucgacaaguacaagaacgccgucaccgaccuccagaugcucaugugcuccacccccgccgccggcuccggcuccgccaucgccuccggcaucgccgucugcaagguccuccaccucgagggcgaggucaacaagaucaagaacgcccuccucuccaccaacaaggccgucgucucccucuccaacggcgucuccguccucaccuucaagguccucgaccucaagaacuacaucgacaagcagcuccuccccauccucaacaagcaguccugcuccauccccaaccccgagaccgucauggaguuccagcagaagaacaaccgccuccucgagaucacccgcgaguucuccgucaacgccggcgucaccacccccgucuccaccuacaugcucaccaacuccgagcuccucucccucaucaacgacaugcccaucaccaacgaccagaagaagcucauguccaacaacguccagaucguccgccagcaguccuacuccaucaugugcaucaucaaggaggagguccucgccuacgucguccagcucccccucuacggcgucaucgacacccccugcuggaagcuccacaccuccccccucugcaccaccaacaccaaggagggcuccaacaucugccucacccgcaccgaccgcggcugguacugcgacaacgccggcuccgucuccuucuucccccaggccgagaccugcaaggucugcuccaaccgcgucuucugcgacaccaugaacucccucacccuccccuccgaggucaaccucugcaacaucgacaucuucaaccccaaguacgacugcaagaucaugaccuccaagaccgacgucuccuccuccgucaucaccucccucggcgccaucgucuccugcuacggcaagaccaagugcaccgccuccaacaagaacaagggcaucaucaagaccuucuccaacggcugcgacuacgucuccaacaagggcgucgacaccgucuccgucggcaacacccucuacuacgucaacaagcaggagggccagucccucuacgucaagggcgagcccaucaucaacuucuacgacccccucgucuuccccuccgacgaguucgacgccuccaucucccaggucaacgagaagaucaaccagucccucgccuucauccgcaaguccgacgagcuccuccacaacgucaacgucggcaaguccaccaccaacaucaugaucaccaccaucaucaucgucaucaucgucauccuccuccuccucaucgccgucggccucuuccucuacugcaaggcccgcuccacccccgucacccucuccaaggaccagcucuccggcaucaacaacaucgccuucuccaacugaggacuagucccuguucccagagcccacuuuuuuuucuuuuuuugaaauaaaauagccugucuuucagaucuaaaaaaaaaaaaaaaaaaaaaaaaaaaaaaaaaaaaaaaaaaaaaaaaaaaaaaaaaaaaaaaaugcaucccccccccccccccccccccccccccccccaaaggcucuuuucagagccaccagaauu

SEQ ID NO: 17674 - RNA, 1876 nt, Artificial Sequence
  mRNA product Design a-5 comprising derived and/or modified sequence from HRSV(Memphis-37)__AIY60640.1__F_DSCav1_mut6 (opt3)
gggagacuuucccauucuguagcagaauuugguguugccuguggucuuggucccgcggagaagcuuaccauggagcugcccauccucaagaccaacgccauuacaacuauacuugcugcagugacgcugugcuucgccagcucccagaauaucaccgaagaguuuuaccaaucuacauguucagcggucaguaaaggcuauuugggggcuuuaagaacuggaugguacaccagcguuauuacaaucgaacuguccaacauuaaggagaauaaaugcaacgguaccgacgccaaggugaaacuaaucaagcaggaacucgauaaguauaaaaaugcaguaacugaccugcagaugcuuauguguucuacuccugccgcuggcucggggucagcaauagccagcggaaucgcugugugcaagguccugcacuuggagggcgaggugaacaaaauuaagaaugcccuccugaguaccaacaaagcgguugugucccugucuaauggugucagcgugcucacguucaagguauuagaucugaagaacuacaucgacaaacagcuuuugccaauucugaauaagcaauccuguucaaucccgaaccccgaaacuguuauggaguuucagcagaaaaauaacaggcuacucgaaauaacccgggaguucagugugaaugcaggggucacaacuccugugagcaccuauaugcugacaaacucugagcuucuguccuugauuaacgauaugccaaucaccaaugaccagaagaaacucaugucaaacaaugugcaaauuguccgccagcagagcuacaguaucaugugcaucauuaaggaagagguucuggccuaugugguacaguuaccccuguacggagugauagauacgccuuguuggaaacuccauacuucuccacuuugcacaaccaacacuaaggaaggcuccaauaucugucugacacgaaccgaccguggcugguacugcgauaacgcugggagcgucucguuuuucccccaagccgagacguguaaggugugcucuaauagaguuuucugcgacaccaugaacuccuugacacuaccuucagaagugaaucuguguaacauugauaucuucaauccaaaauaugacugcaagauaaugacaaguaaaaccgaugucagcuccucugugauuacaagccucggagcaaucguaucauguuacgguaagacuaaaugcaccgcuaguaacaagaauaagggcaucauuaaaacauuuuccaacgggugugacuauguuagcaauaagggaguggacaccgucucugugggcaacacucuguacuaugucaacaaacaggagggucagucacuuuacgugaagggggagccgaucauuaauuucuaugauccccugguuuuuccuagugacgaauuugaugccagcauaucccaagugaacgagaaaaucaaucagucuuuggcguuuauuaggaagucggacgaacuccugcacaacguaaaugucggaaagagcacgacaaacaucaugaucaccacuauuauaaucgugauuaucguuauuuuacugcuacucaucgccgugggccuguuccuuuacugcaaagcacgguccaccccagucacauugucaaaggaucagcugaguggcauaaauaacaucgcuuucucuaauugaggacuagucccuguucccagagcccacuuuuuuuucuuuuuuugaaauaaaauagccugucuuucagaucuaaaaaaaaaaaaaaaaaaaaaaaaaaaaaaaaaaaaaaaaaaaaaaaaaaaaaaaaaaaaaaaaugcaucccccccccccccccccccccccccccccccaaaggcucuuuucagagccaccagaauu

SEQ ID NO: 17675 - RNA, 1876 nt, Artificial Sequence
  mRNA product Design a-5 comprising derived and/or modified sequence from HRSV(Memphis-37)__AIY60640.1__F_DSCav1_mut6 (opt4)
gggagacuuucccauucuguagcagaauuugguguugccuguggucuuggucccgcggagaagcuuaccauggagcugcccauccugaagaccaacgccaucaccaccauccuggccgccgugacccugugcuucgccagcagccagaacaucaccgaggaguucuaccagagcaccugcagcgccgugagcaagggcuaccugggcgcccugagaaccggcugguacaccagcgugaucaccaucgagcugagcaacaucaaggagaacaagugcaacggcaccgacgccaaggugaagcugaucaagcaggagcuggacaaguacaagaacgccgugaccgaccugcagaugcugaugugcagcacccccgccgccggcagcggcagcgccaucgccagcggcaucgccgugugcaaggugcugcaccuggagggcgaggugaacaagaucaagaacgcccugcugagcaccaacaaggccguggugagccugagcaacggcgugagcgugcugaccuucaaggugcuggaccugaagaacuacaucgacaagcagcugcugcccauccugaacaagcagagcugcagcauccccaaccccgagaccgugauggaguuccagcagaagaacaacagacugcuggagaucaccagagaguucagcgugaacgccggcgugaccacccccgugagcaccuacaugcugaccaacagcgagcugcugagccugaucaacgacaugcccaucaccaacgaccagaagaagcugaugagcaacaacgugcagaucgugagacagcagagcuacagcaucaugugcaucaucaaggaggaggugcuggccuacguggugcagcugccccuguacggcgugaucgacacccccugcuggaagcugcacaccagcccccugugcaccaccaacaccaaggagggcagcaacaucugccugaccagaaccgacagaggcugguacugcgacaacgccggcagcgugagcuucuucccccaggccgagaccugcaaggugugcagcaacagaguguucugcgacaccaugaacagccugacccugcccagcgaggugaaccugugcaacaucgacaucuucaaccccaaguacgacugcaagaucaugaccagcaagaccgacgugagcagcagcgugaucaccagccugggcgccaucgugagcugcuacggcaagaccaagugcaccgccagcaacaagaacaagggcaucaucaagaccuucagcaacggcugcgacuacgugagcaacaagggcguggacaccgugagcgugggcaacacccuguacuacgugaacaagcaggagggccagagccuguacgugaagggcgagcccaucaucaacuucuacgacccccugguguuccccagcgacgaguucgacgccagcaucagccaggugaacgagaagaucaaccagagccuggccuucaucagaaagagcgacgagcugcugcacaacgugaacgugggcaagagcaccaccaacaucaugaucaccaccaucaucaucgugaucaucgugauccugcugcugcugaucgccgugggccuguuccuguacugcaaggccagaagcacccccgugacccugagcaaggaccagcugagcggcaucaacaacaucgccuucagcaacugaggacuagucccuguucccagagcccacuuuuuuuucuuuuuuugaaauaaaauagccugucuuucagaucuaaaaaaaaaaaaaaaaaaaaaaaaaaaaaaaaaaaaaaaaaaaaaaaaaaaaaaaaaaaaaaaaugcaucccccccccccccccccccccccccccccccaaaggcucuuuucagagccaccagaauu

SEQ ID NO: 17676 - RNA, 1876 nt, Artificial Sequence
  mRNA product Design a-5 comprising derived and/or modified sequence from HRSV(Memphis-37)__AIY60640.1__F_DSCav1_mut6 (opt5)
gggagacuuucccauucuguagcagaauuugguguugccuguggucuuggucccgcggagaagcuuaccauggagcugcccauccucaagaccaacgccauuacaacgauccuggcugccgugacccuuugcuucgcgagcucccagaauauuacagaagaguuuuaccaaucuaccuguagcgcugucuccaaaggcuaucugggggcccucagaacaggaugguacaccucuguuaucacaauugaacugagcaacaucaaggagaauaaaugcaacggcaccgacgccaaggugaaacuuaucaagcaggaacuggauaaguauaaaaaugcugugacggaccuccagaugcugauguguuccaccccugccgcugggucuggaagcgccauugcguccggcaucgccgucugcaaggugcugcaccucgagggggagguuaacaaaauuaagaaugcucugcuuagcacaaacaaagccguggucucucuguccaauggagugagcguucucaccuucaaggugcuggaucuuaagaacuacaucgacaaacagcugcucccgauucugaauaagcaaucuuguuccauccccaacccugaaacagucauggaguuucagcagaaaaauaaccggcugcucgaaauuacccgcgaguucagcgugaaugcuggcgugacgacacccgucucuaccuauaugcugacaaacuccgagcuucugagccucaucaacgauaugccuaucaccaaugaccagaagaaacugauguccaacaauguucaaauugugagacagcagucuuacagcaucaugugcauuaucaaggaagaggugcuugccuaugucgugcagcugccccucuacggcguuauugauaccccuuguuggaaacugcauacauccccgcugugcacgaccaacacaaaggaagggagcaauaucugucucacccggacagaccgcggaugguacugcgauaacgcgggcucuguguccuuuuucccccaagccgagaccuguaaggucugcagcaauagaguguuuugcgacacgaugaacucucugacacuuccuagcgaaguuaaucuguguaacaucgauauuuucaaucccaaauaugacugcaagaucaugaccuccaaaaccgaugugucuagcuccgucauuacaagccucggggcuaucgugucuuguuacggaaagaccaaaugcacagccuccaacaagaauaagggcauuaucaaaacguuuagcaacgggugugacuaugucucuaauaagggaguggacaccguuuccgugggcaacacacuguacuaugucaacaaacaggagggccagagccuuuacgugaagggggagccuaucauuaauuucuaugauccccugguuuuuccguccgacgaauuugaugcuucuaucagccaagugaacgagaaaauuaaucagucccucgccuucauccggaagucugacgaacugcugcacaacgucaaugugggaaagagcaccacaaacauuaugaucaccacgauuaucaucgugauuaucguuauucuccugcuucugaucgccgucggccucuuccuguacugcaaagcucgcuccaccccugugacacugagcaaggaucagcuuucugggauuaauaacaucgcguucuccaauugaggacuagucccuguucccagagcccacuuuuuuuucuuuuuuugaaauaaaauagccugucuuucagaucuaaaaaaaaaaaaaaaaaaaaaaaaaaaaaaaaaaaaaaaaaaaaaaaaaaaaaaaaaaaaaaaaugcaucccccccccccccccccccccccccccccccaaaggcucuuuucagagccaccagaauu

SEQ ID NO: 17677 - RNA, 1876 nt, Artificial Sequence
  mRNA product Design a-5 comprising derived and/or modified sequence from HRSV(Memphis-37)__AIY60640.1__F_DSCav1_mut6 (opt6)
gggagacuuucccauucuguagcagaauuugguguugccuguggucuuggucccgcggagaagcuuaccauggaacuaccaauuuuaaaaacaaacgcaauuacaacuauacucgcagcaguaacauuauguuucgccucaucccaaaacauaacagaagaauuuuaccaaucaacaugcagcgcaguaucaaaaggauaucucggagcauuacgaacagguugguacacaucuguaaucacuauagaacuaucaaacauaaaagaaaacaaaugcaauggaaccgacgcaaaaguaaaauuaauaaaacaagaacucgauaaauacaaaaaugcaguaacagaccuccaaaugcucauguguucaacaccagccgcaggaucagguuccgccauagcaucuggcauagcaguaugcaaaguacuccacuuagaaggagaaguuaacaaaauaaaaaacgcacuauuaucaacaaacaaagcaguaguaucccucucaaacggagucucaguauuaacauucaaaguauuagaccuaaaaaacuacauagacaaacaacuacuuccaauacucaacaaacaaucaugcucaauaccaaacccagaaaccguaauggaauuucaacaaaaaaacaaccgacuacuagaaaucacacgagaauuuucaguaaacgccggugucacaacuccaguaucaacuuauauguuaaccaacucagaacuauuaucauuaauaaacgauaugcccauaacuaacgaccaaaaaaaauuaaugucaaacaacguacaaauaguacgccaacaaaguuacucaauaaugugcaucauaaaagaagaaguauuagcguacguuguacaacuaccucuauacggagucauagacacaccaugcuggaaacuucacacaucaccacuauguacaacaaacacaaaagaaggcaguaacauaugccuaacaagaacagaccguggaugguauugugacaacgcuggaucuguaucauucuucccucaagcagaaaccuguaaaguuugcucaaacagagucuucugugacacaaugaacucucuaacacuaccuuccgaagugaaccucuguaacauagacauauucaauccaaaauaugauugcaaaauaaugacuucaaaaacagauguaucauccucuguuauaacaucauuaggcgccauaguuucaugcuacggaaaaacuaaaugcacagcaucaaacaaaaacaaaggaauaauaaaaaccuucucaaauggaugcgacuacguaagcaacaaaggcguagacacaguaucaguagguaauacauuauacuacguaaacaaacaagaaggacaaucacuuuauguuaaaggagaaccuauaauaaacuucuacgacccacuuguauuuccauccgaugaauuugacgcaucuauaucacaagucaacgaaaaaauaaaccaaucauuagcauucauucgaaaauccgaugaacuacuccauaacguaaaugucggaaaaucaacaaccaacauaaugaucacaacaauaaucauagugauaauaguaauacuccuacuacuaaucgcaguaggucuauuccuauauuguaaagcaagaucuacuccaguuacacucucuaaagaccaauuaagcgguaucaacaacaucgccuucagcaauuaaggacuagucccuguucccagagcccacuuuuuuuucuuuuuuugaaauaaaauagccugucuuucagaucuaaaaaaaaaaaaaaaaaaaaaaaaaaaaaaaaaaaaaaaaaaaaaaaaaaaaaaaaaaaaaaaaugcaucccccccccccccccccccccccccccccccaaaggcucuuuucagagccaccagaauu

SEQ ID NO: 17678 - RNA, 1876 nt, Artificial Sequence
  mRNA product Design a-5 comprising derived and/or modified sequence from HRSV(Memphis-37)__AIY60640.1__F_DSCav1_mut6 (opt11)
gggagacuuucccauucuguagcagaauuugguguugccuguggucuuggucccgcggagaagcuuaccauggagcugcccauccucaagaccaacgccaucaccacgauccuggccgcggugacccugugcuucgcgagcucccaaaacaucaccgaggaguucuaccagagcacgugcuccgccgucagcaagggcuaccucggggcccugcgcaccggcugguacaccuccgugaucaccaucgagcugagcaacaucaaggaaaacaagugcaacgggacggacgcaaaggugaagcucaucaagcaggagcuggauaaguacaagaacgcggucacggaccugcagaugcucaugugcuccaccccggccgccggcagcggguccgccaucgcguccggcaucgccgugugcaagguguugcaccuggagggcgaggucaacaagaucaagaacgcccuccuuuccaccaauaaggcuguugugagccuguccaacggggucagcgugcucaccuucaaggugcuggaccugaagaacuacaucgacaagcagcuccugcccauccugaacaagcaguccugcagcauccccaaccccgagacagucauggaguuccagcagaagaacaaccggcuccuggagaucacccgcgaguucuccguuaacgccggggugaccaccccgguaagcacauacaugcugaccaacagcgagcuccugagccugaucaacgacaugcccaucaccaacgaccagaagaagcucaugagcaacaacgugcagaucgugcggcagcaguccuacagcaucaugugcaucaucaaggaggagguccuggcguacguggugcaacugccccucuacggggucaucgacacccccugcuggaagcugcacacguccccgcugugcaccaccaacaccaaggagggcagcaacaucugccucacgcgcaccgaccgggggugguacugcgacaacgcaggcuccgugagcuucuucccccaggccgagaccugcaaggugugcuccaaccgcgucuucugcgacaccaugaacagccugacgcugcccuccgaggugaaccucugcaacaucgacaucuucaaccccaaguacgacuguaagaucaugaccagcaagaccgaugucuccagcuccgugaucaccagccugggcgccauaguguccuguuaugggaagacgaagugcaccgccagcaacaagaacaaaggcaucaucaagaccuucuccaacgggugcgacuacgucagcaacaagggcguggacacaguguccgucggcaacacgcuguacuacgugaacaagcaggaggggcagagccucuacgugaagggcgagccgaucaucaacuucuacgauccccuggucuuccccagcgacgaguucgacgcguccaucagccaagugaacgagaagaucaaccagucccuggccuucauccgcaagagcgacgagcuccugcacaacgugaacgucgggaaguccaccaccaacaucaugaucaccaccaucaucaucgugaucaucgucauccugcuccugcugaucgccgucggccucuuccuguacugcaaggcccggagcacgcccgugacccuguccaaggaccagcugucgggcaucaacaacaucgccuucuccaacugaggacuagucccuguucccagagcccacuuuuuuuucuuuuuuugaaauaaaauagccugucuuucagaucuaaaaaaaaaaaaaaaaaaaaaaaaaaaaaaaaaaaaaaaaaaaaaaaaaaaaaaaaaaaaaaaaugcaucccccccccccccccccccccccccccccccaaaggcucuuuucagagccaccagaauu

SEQ ID NO: 17679 - RNA, 2057 nt, Artificial Sequence
  mRNA product Design b-1 comprising derived and/or modified sequence from HRSV(Memphis-37)__AIY60640.1__F_DSCav1_mut6 (opt1)
gggagacggagacggccugcaggaccugcucucucagcccucagccgaggccuacgccgagccgagugcgcagccgacgaccgggaggagccgcagccuucaacucugagguacugugauccgcgcugcccgccgggccgccccaguccgcugcugcggcaccuccuucccucgcgcccucuucgcucgccagcgccuucccugugagccugcgucaccgcggccgccaagcuuaccauggagcugcccauccucaagaccaacgccaucaccacgauccuggccgcggugacccugugcuucgccagcucccagaacaucaccgaggaguucuaccagagcacgugcuccgccgucagcaagggcuaccucggcgcccugcgcaccgggugguacaccagcgugaucaccaucgagcuguccaacaucaaggagaacaagugcaacggcaccgacgccaaggugaagcucaucaagcaggagcuggacaaguacaagaacgcggucacggaccugcagaugcugaugugcagcaccccggccgccggcuccgggagcgcgaucgccuccggcaucgccgucugcaaggugcugcaccucgagggcgaggugaacaagaucaagaacgcccugcuguccaccaacaaggccgucgugagccucuccaacggggugagcguccugaccuucaaggugcuggaccucaagaacuacaucgacaagcagcugcugcccauccugaacaagcagagcugcuccauccccaaccccgagaccgucauggaguuccagcagaagaacaaccgccuccuggagaucacgcgggaguucagcgugaacgcgggcgugaccacccccgucuccaccuacaugcugacgaacagcgagcuccugucccugaucaacgacaugccgaucaccaacgaccagaagaagcucaugagcaacaacgugcagaucgugcgccagcaguccuacagcaucaugugcaucaucaaggaggagguccuggccuacguggugcagcugccccucuacggggucaucgacacccccugcuggaagcugcacaccagcccccugugcacgaccaacaccaaggagggcuccaacaucugccucacccggacggaccgcgggugguacugcgacaacgccggcagcguguccuucuucccgcaggccgagaccugcaaggucugcagcaaccggguguucugcgacaccaugaacucccugacccugcccagcgaggugaaccucugcaacaucgacaucuucaaccccaaguacgacugcaagaucaugacguccaagaccgacgucagcuccagcgugaucaccucccugggcgccaucgugagcugcuacgggaagaccaagugcacggcgagcaacaagaacaagggcaucaucaagaccuucuccaacgggugcgacuacgucagcaacaagggcguggacaccguguccgucggcaacacccuguacuacgugaacaagcaggagggccagagccucuacgugaagggggagcccaucaucaacuucuacgacccgcuggucuuccccuccgacgaguucgacgccagcaucucccaggugaacgagaagaucaaccagagccuggccuucauccggaaguccgacgagcuccugcacaacgugaacgucggcaagagcaccacgaacaucaugaucaccaccaucaucaucgugaucaucgugauccugcugcuccugaucgccgucgggcuguuccucuacugcaaggcccgcuccacccccgugacgcugagcaaggaccagcuguccgggaucaacaacaucgcguucagcaacugaggacuaguguccaccugucccuccugggcugcuggauugucucguuuuccugccaaauaaacaggaucagcgcuuuacagaucuaaaaaaaaaaaaaaaaaaaaaaaaaaaaaaaaaaaaaaaaaaaaaaaaaaaaaaaaaaaaaaaaugcaucccccccccccccccccccccccccccccccaaaggcucuuuucagagccaccagaauu

SEQ ID NO: 17680 - RNA, 2057 nt, Artificial Sequence
  mRNA product Design b-1 comprising derived and/or modified sequence from HRSV(Memphis-37)__AIY60640.1__F_DSCav1_mut6 (opt1)
gggagacggagacggccugcaggaccugcucucucagcccucagccgaggccuacgccgagccgagugcgcagccgacgaccgggaggagccgcagccuucaacucugagguacugugauccgcgcugcccgccgggccgccccaguccgcugcugcggcaccuccuucccucgcgcccucuucgcucgccagcgccuucccugugagccugcgucaccgcggccgccaagcuuaccauggagcugcccauccucaagaccaacgccaucaccacgauccuggccgcggugacccugugcuucgccagcucccagaacaucaccgaggaguucuaccagagcacgugcuccgccgucagcaagggcuaccucggggcccugcgcaccggcugguacaccuccgugaucaccaucgagcugagcaacaucaaggagaacaagugcaacgggaccgacgccaaggugaagcucaucaagcaggagcuggacaaguacaagaacgcggucacggaccugcagaugcucaugugcuccaccccggccgccggcagcggguccgccaucgcgagcggcaucgccgugugcaaggugcugcaccuggagggcgaggucaacaagaucaagaacgcccuccuguccaccaacaaggccguggugagccuguccaacggggucagcgugcucaccuucaaggugcuggaccugaagaacuacaucgacaagcagcuccugcccauccugaacaagcaguccugcagcauccccaaccccgagacggucauggaguuccagcagaagaacaaccggcuccuggagaucacccgcgaguucuccgugaacgccggcgugaccaccccggucagcacguacaugcugaccaacuccgagcuccugagccugaucaacgacaugcccaucaccaacgaccagaagaagcucaugagcaacaacgugcagaucgugcggcagcaguccuacagcaucaugugcaucaucaaggaggagguccuggcguacguggugcagcugccccucuacggggucaucgacacccccugcuggaagcugcacacguccccgcugugcaccaccaacaccaaggagggcagcaacaucugccucacgcgcaccgaccgggggugguacugcgacaacgccggcuccgugagcuucuucccccaggccgagaccugcaaggugugcuccaaccgcgucuucugcgacaccaugaacagccugacgcugcccuccgaggugaaccucugcaacaucgacaucuucaaccccaaguacgacugcaagaucaugaccagcaagaccgacgucuccagcuccgugaucaccagccugggcgccaucguguccugcuacgggaagacgaagugcaccgccagcaacaagaacaagggcaucaucaagaccuucuccaacgggugcgacuacgucagcaacaagggcguggacaccguguccgucggcaacacgcuguacuacgugaacaagcaggaggggcagagccucuacgugaagggcgagccgaucaucaacuucuacgacccccuggucuuccccagcgacgaguucgacgcguccaucagccaggugaacgagaagaucaaccagucccuggccuucauccgcaagagcgacgagcuccugcacaacgugaacgucgggaaguccaccaccaacaucaugaucaccaccaucaucaucgugaucaucgugauccugcuccugcugaucgccgucggccucuuccuguacugcaaggcccggagcacgcccgugacccuguccaaggaccagcugagcgggaucaacaacaucgccuucuccaacugaggacuaguguccaccugucccuccugggcugcuggauugucucguuuuccugccaaauaaacaggaucagcgcuuuacagaucuaaaaaaaaaaaaaaaaaaaaaaaaaaaaaaaaaaaaaaaaaaaaaaaaaaaaaaaaaaaaaaaaugcaucccccccccccccccccccccccccccccccaaaggcucuuuucagagccaccagaauu

SEQ ID NO: 17681 - RNA, 2057 nt, Artificial Sequence
  mRNA product Design b-1 comprising derived and/or modified sequence from HRSV(Memphis-37)__AIY60640.1__F_DSCav1_mut6 (opt2)
gggagacggagacggccugcaggaccugcucucucagcccucagccgaggccuacgccgagccgagugcgcagccgacgaccgggaggagccgcagccuucaacucugagguacugugauccgcgcugcccgccgggccgccccaguccgcugcugcggcaccuccuucccucgcgcccucuucgcucgccagcgccuucccugugagccugcgucaccgcggccgccaagcuuaccauggagcuccccauccucaagaccaacgccaucaccaccauccucgccgccgucacccucugcuucgccuccucccagaacaucaccgaggaguucuaccaguccaccugcuccgccgucuccaagggcuaccucggcgcccuccgcaccggcugguacaccuccgucaucaccaucgagcucuccaacaucaaggagaacaagugcaacggcaccgacgccaaggucaagcucaucaagcaggagcucgacaaguacaagaacgccgucaccgaccuccagaugcucaugugcuccacccccgccgccggcuccggcuccgccaucgccuccggcaucgccgucugcaagguccuccaccucgagggcgaggucaacaagaucaagaacgcccuccucuccaccaacaaggccgucgucucccucuccaacggcgucuccguccucaccuucaagguccucgaccucaagaacuacaucgacaagcagcuccuccccauccucaacaagcaguccugcuccauccccaaccccgagaccgucauggaguuccagcagaagaacaaccgccuccucgagaucacccgcgaguucuccgucaacgccggcgucaccacccccgucuccaccuacaugcucaccaacuccgagcuccucucccucaucaacgacaugcccaucaccaacgaccagaagaagcucauguccaacaacguccagaucguccgccagcaguccuacuccaucaugugcaucaucaaggaggagguccucgccuacgucguccagcucccccucuacggcgucaucgacacccccugcuggaagcuccacaccuccccccucugcaccaccaacaccaaggagggcuccaacaucugccucacccgcaccgaccgcggcugguacugcgacaacgccggcuccgucuccuucuucccccaggccgagaccugcaaggucugcuccaaccgcgucuucugcgacaccaugaacucccucacccuccccuccgaggucaaccucugcaacaucgacaucuucaaccccaaguacgacugcaagaucaugaccuccaagaccgacgucuccuccuccgucaucaccucccucggcgccaucgucuccugcuacggcaagaccaagugcaccgccuccaacaagaacaagggcaucaucaagaccuucuccaacggcugcgacuacgucuccaacaagggcgucgacaccgucuccgucggcaacacccucuacuacgucaacaagcaggagggccagucccucuacgucaagggcgagcccaucaucaacuucuacgacccccucgucuuccccuccgacgaguucgacgccuccaucucccaggucaacgagaagaucaaccagucccucgccuucauccgcaaguccgacgagcuccuccacaacgucaacgucggcaaguccaccaccaacaucaugaucaccaccaucaucaucgucaucaucgucauccuccuccuccucaucgccgucggccucuuccucuacugcaaggcccgcuccacccccgucacccucuccaaggaccagcucuccggcaucaacaacaucgccuucuccaacugaggacuaguguccaccugucccuccugggcugcuggauugucucguuuuccugccaaauaaacaggaucagcgcuuuacagaucuaaaaaaaaaaaaaaaaaaaaaaaaaaaaaaaaaaaaaaaaaaaaaaaaaaaaaaaaaaaaaaaaugcaucccccccccccccccccccccccccccccccaaaggcucuuuucagagccaccagaauu

SEQ ID NO: 17682 - RNA, 2057 nt, Artificial Sequence
  mRNA product Design b-1 comprising derived and/or modified sequence from HRSV(Memphis-37)__AIY60640.1__F_DSCav1_mut6 (opt3)
gggagacggagacggccugcaggaccugcucucucagcccucagccgaggccuacgccgagccgagugcgcagccgacgaccgggaggagccgcagccuucaacucugagguacugugauccgcgcugcccgccgggccgccccaguccgcugcugcggcaccuccuucccucgcgcccucuucgcucgccagcgccuucccugugagccugcgucaccgcggccgccaagcuuaccauggagcugcccauccucaagaccaacgccauuacaacuauacuugcugcagugacgcugugcuucgccagcucccagaauaucaccgaagaguuuuaccaaucuacauguucagcggucaguaaaggcuauuugggggcuuuaagaacuggaugguacaccagcguuauuacaaucgaacuguccaacauuaaggagaauaaaugcaacgguaccgacgccaaggugaaacuaaucaagcaggaacucgauaaguauaaaaaugcaguaacugaccugcagaugcuuauguguucuacuccugccgcuggcucggggucagcaauagccagcggaaucgcugugugcaagguccugcacuuggagggcgaggugaacaaaauuaagaaugcccuccugaguaccaacaaagcgguugugucccugucuaauggugucagcgugcucacguucaagguauuagaucugaagaacuacaucgacaaacagcuuuugccaauucugaauaagcaauccuguucaaucccgaaccccgaaacuguuauggaguuucagcagaaaaauaacaggcuacucgaaauaacccgggaguucagugugaaugcaggggucacaacuccugugagcaccuauaugcugacaaacucugagcuucuguccuugauuaacgauaugccaaucaccaaugaccagaagaaacucaugucaaacaaugugcaaauuguccgccagcagagcuacaguaucaugugcaucauuaaggaagagguucuggccuaugugguacaguuaccccuguacggagugauagauacgccuuguuggaaacuccauacuucuccacuuugcacaaccaacacuaaggaaggcuccaauaucugucugacacgaaccgaccguggcugguacugcgauaacgcugggagcgucucguuuuucccccaagccgagacguguaaggugugcucuaauagaguuuucugcgacaccaugaacuccuugacacuaccuucagaagugaaucuguguaacauugauaucuucaauccaaaauaugacugcaagauaaugacaaguaaaaccgaugucagcuccucugugauuacaagccucggagcaaucguaucauguuacgguaagacuaaaugcaccgcuaguaacaagaauaagggcaucauuaaaacauuuuccaacgggugugacuauguuagcaauaagggaguggacaccgucucugugggcaacacucuguacuaugucaacaaacaggagggucagucacuuuacgugaagggggagccgaucauuaauuucuaugauccccugguuuuuccuagugacgaauuugaugccagcauaucccaagugaacgagaaaaucaaucagucuuuggcguuuauuaggaagucggacgaacuccugcacaacguaaaugucggaaagagcacgacaaacaucaugaucaccacuauuauaaucgugauuaucguuauuuuacugcuacucaucgccgugggccuguuccuuuacugcaaagcacgguccaccccagucacauugucaaaggaucagcugaguggcauaaauaacaucgcuuucucuaauugaggacuaguguccaccugucccuccugggcugcuggauugucucguuuuccugccaaauaaacaggaucagcgcuuuacagaucuaaaaaaaaaaaaaaaaaaaaaaaaaaaaaaaaaaaaaaaaaaaaaaaaaaaaaaaaaaaaaaaaugcaucccccccccccccccccccccccccccccccaaaggcucuuuucagagccaccagaauu

SEQ ID NO: 17683 - RNA, 2057 nt, Artificial Sequence
  mRNA product Design b-1 comprising derived and/or modified sequence from HRSV(Memphis-37)__AIY60640.1__F_DSCav1_mut6 (opt4)
gggagacggagacggccugcaggaccugcucucucagcccucagccgaggccuacgccgagccgagugcgcagccgacgaccgggaggagccgcagccuucaacucugagguacugugauccgcgcugcccgccgggccgccccaguccgcugcugcggcaccuccuucccucgcgcccucuucgcucgccagcgccuucccugugagccugcgucaccgcggccgccaagcuuaccauggagcugcccauccugaagaccaacgccaucaccaccauccuggccgccgugacccugugcuucgccagcagccagaacaucaccgaggaguucuaccagagcaccugcagcgccgugagcaagggcuaccugggcgcccugagaaccggcugguacaccagcgugaucaccaucgagcugagcaacaucaaggagaacaagugcaacggcaccgacgccaaggugaagcugaucaagcaggagcuggacaaguacaagaacgccgugaccgaccugcagaugcugaugugcagcacccccgccgccggcagcggcagcgccaucgccagcggcaucgccgugugcaaggugcugcaccuggagggcgaggugaacaagaucaagaacgcccugcugagcaccaacaaggccguggugagccugagcaacggcgugagcgugcugaccuucaaggugcuggaccugaagaacuacaucgacaagcagcugcugcccauccugaacaagcagagcugcagcauccccaaccccgagaccgugauggaguuccagcagaagaacaacagacugcuggagaucaccagagaguucagcgugaacgccggcgugaccacccccgugagcaccuacaugcugaccaacagcgagcugcugagccugaucaacgacaugcccaucaccaacgaccagaagaagcugaugagcaacaacgugcagaucgugagacagcagagcuacagcaucaugugcaucaucaaggaggaggugcuggccuacguggugcagcugccccuguacggcgugaucgacacccccugcuggaagcugcacaccagcccccugugcaccaccaacaccaaggagggcagcaacaucugccugaccagaaccgacagaggcugguacugcgacaacgccggcagcgugagcuucuucccccaggccgagaccugcaaggugugcagcaacagaguguucugcgacaccaugaacagccugacccugcccagcgaggugaaccugugcaacaucgacaucuucaaccccaaguacgacugcaagaucaugaccagcaagaccgacgugagcagcagcgugaucaccagccugggcgccaucgugagcugcuacggcaagaccaagugcaccgccagcaacaagaacaagggcaucaucaagaccuucagcaacggcugcgacuacgugagcaacaagggcguggacaccgugagcgugggcaacacccuguacuacgugaacaagcaggagggccagagccuguacgugaagggcgagcccaucaucaacuucuacgacccccugguguuccccagcgacgaguucgacgccagcaucagccaggugaacgagaagaucaaccagagccuggccuucaucagaaagagcgacgagcugcugcacaacgugaacgugggcaagagcaccaccaacaucaugaucaccaccaucaucaucgugaucaucgugauccugcugcugcugaucgccgugggccuguuccuguacugcaaggccagaagcacccccgugacccugagcaaggaccagcugagcggcaucaacaacaucgccuucagcaacugaggacuaguguccaccugucccuccugggcugcuggauugucucguuuuccugccaaauaaacaggaucagcgcuuuacagaucuaaaaaaaaaaaaaaaaaaaaaaaaaaaaaaaaaaaaaaaaaaaaaaaaaaaaaaaaaaaaaaaaugcaucccccccccccccccccccccccccccccccaaaggcucuuuucagagccaccagaauu

SEQ ID NO: 17684 - RNA, 2057 nt, Artificial Sequence
  mRNA product Design b-1 comprising derived and/or modified sequence from HRSV(Memphis-37)__AIY60640.1__F_DSCav1_mut6 (opt5)
gggagacggagacggccugcaggaccugcucucucagcccucagccgaggccuacgccgagccgagugcgcagccgacgaccgggaggagccgcagccuucaacucugagguacugugauccgcgcugcccgccgggccgccccaguccgcugcugcggcaccuccuucccucgcgcccucuucgcucgccagcgccuucccugugagccugcgucaccgcggccgccaagcuuaccauggagcugcccauccucaagaccaacgccauuacaacgauccuggcugccgugacccuuugcuucgcgagcucccagaauauuacagaagaguuuuaccaaucuaccuguagcgcugucuccaaaggcuaucugggggcccucagaacaggaugguacaccucuguuaucacaauugaacugagcaacaucaaggagaauaaaugcaacggcaccgacgccaaggugaaacuuaucaagcaggaacuggauaaguauaaaaaugcugugacggaccuccagaugcugauguguuccaccccugccgcugggucuggaagcgccauugcguccggcaucgccgucugcaaggugcugcaccucgagggggagguuaacaaaauuaagaaugcucugcuuagcacaaacaaagccguggucucucuguccaauggagugagcguucucaccuucaaggugcuggaucuuaagaacuacaucgacaaacagcugcucccgauucugaauaagcaaucuuguuccauccccaacccugaaacagucauggaguuucagcagaaaaauaaccggcugcucgaaauuacccgcgaguucagcgugaaugcuggcgugacgacacccgucucuaccuauaugcugacaaacuccgagcuucugagccucaucaacgauaugccuaucaccaaugaccagaagaaacugauguccaacaauguucaaauugugagacagcagucuuacagcaucaugugcauuaucaaggaagaggugcuugccuaugucgugcagcugccccucuacggcguuauugauaccccuuguuggaaacugcauacauccccgcugugcacgaccaacacaaaggaagggagcaauaucugucucacccggacagaccgcggaugguacugcgauaacgcgggcucuguguccuuuuucccccaagccgagaccuguaaggucugcagcaauagaguguuuugcgacacgaugaacucucugacacuuccuagcgaaguuaaucuguguaacaucgauauuuucaaucccaaauaugacugcaagaucaugaccuccaaaaccgaugugucuagcuccgucauuacaagccucggggcuaucgugucuuguuacggaaagaccaaaugcacagccuccaacaagaauaagggcauuaucaaaacguuuagcaacgggugugacuaugucucuaauaagggaguggacaccguuuccgugggcaacacacuguacuaugucaacaaacaggagggccagagccuuuacgugaagggggagccuaucauuaauuucuaugauccccugguuuuuccguccgacgaauuugaugcuucuaucagccaagugaacgagaaaauuaaucagucccucgccuucauccggaagucugacgaacugcugcacaacgucaaugugggaaagagcaccacaaacauuaugaucaccacgauuaucaucgugauuaucguuauucuccugcuucugaucgccgucggccucuuccuguacugcaaagcucgcuccaccccugugacacugagcaaggaucagcuuucugggauuaauaacaucgcguucuccaauugaggacuaguguccaccugucccuccugggcugcuggauugucucguuuuccugccaaauaaacaggaucagcgcuuuacagaucuaaaaaaaaaaaaaaaaaaaaaaaaaaaaaaaaaaaaaaaaaaaaaaaaaaaaaaaaaaaaaaaaugcaucccccccccccccccccccccccccccccccaaaggcucuuuucagagccaccagaauu

SEQ ID NO: 17685 - RNA, 2057 nt, Artificial Sequence
  mRNA product Design b-1 comprising derived and/or modified sequence from HRSV(Memphis-37)__AIY60640.1__F_DSCav1_mut6 (opt6)
gggagacggagacggccugcaggaccugcucucucagcccucagccgaggccuacgccgagccgagugcgcagccgacgaccgggaggagccgcagccuucaacucugagguacugugauccgcgcugcccgccgggccgccccaguccgcugcugcggcaccuccuucccucgcgcccucuucgcucgccagcgccuucccugugagccugcgucaccgcggccgccaagcuuaccauggaacuaccaauuuuaaaaacaaacgcaauuacaacuauacucgcagcaguaacauuauguuucgccucaucccaaaacauaacagaagaauuuuaccaaucaacaugcagcgcaguaucaaaaggauaucucggagcauuacgaacagguugguacacaucuguaaucacuauagaacuaucaaacauaaaagaaaacaaaugcaauggaaccgacgcaaaaguaaaauuaauaaaacaagaacucgauaaauacaaaaaugcaguaacagaccuccaaaugcucauguguucaacaccagccgcaggaucagguuccgccauagcaucuggcauagcaguaugcaaaguacuccacuuagaaggagaaguuaacaaaauaaaaaacgcacuauuaucaacaaacaaagcaguaguaucccucucaaacggagucucaguauuaacauucaaaguauuagaccuaaaaaacuacauagacaaacaacuacuuccaauacucaacaaacaaucaugcucaauaccaaacccagaaaccguaauggaauuucaacaaaaaaacaaccgacuacuagaaaucacacgagaauuuucaguaaacgccggugucacaacuccaguaucaacuuauauguuaaccaacucagaacuauuaucauuaauaaacgauaugcccauaacuaacgaccaaaaaaaauuaaugucaaacaacguacaaauaguacgccaacaaaguuacucaauaaugugcaucauaaaagaagaaguauuagcguacguuguacaacuaccucuauacggagucauagacacaccaugcuggaaacuucacacaucaccacuauguacaacaaacacaaaagaaggcaguaacauaugccuaacaagaacagaccguggaugguauugugacaacgcuggaucuguaucauucuucccucaagcagaaaccuguaaaguuugcucaaacagagucuucugugacacaaugaacucucuaacacuaccuuccgaagugaaccucuguaacauagacauauucaauccaaaauaugauugcaaaauaaugacuucaaaaacagauguaucauccucuguuauaacaucauuaggcgccauaguuucaugcuacggaaaaacuaaaugcacagcaucaaacaaaaacaaaggaauaauaaaaaccuucucaaauggaugcgacuacguaagcaacaaaggcguagacacaguaucaguagguaauacauuauacuacguaaacaaacaagaaggacaaucacuuuauguuaaaggagaaccuauaauaaacuucuacgacccacuuguauuuccauccgaugaauuugacgcaucuauaucacaagucaacgaaaaaauaaaccaaucauuagcauucauucgaaaauccgaugaacuacuccauaacguaaaugucggaaaaucaacaaccaacauaaugaucacaacaauaaucauagugauaauaguaauacuccuacuacuaaucgcaguaggucuauuccuauauuguaaagcaagaucuacuccaguuacacucucuaaagaccaauuaagcgguaucaacaacaucgccuucagcaauuaaggacuaguguccaccugucccuccugggcugcuggauugucucguuuuccugccaaauaaacaggaucagcgcuuuacagaucuaaaaaaaaaaaaaaaaaaaaaaaaaaaaaaaaaaaaaaaaaaaaaaaaaaaaaaaaaaaaaaaaugcaucccccccccccccccccccccccccccccccaaaggcucuuuucagagccaccagaauu

SEQ ID NO: 17686 - RNA, 2057 nt, Artificial Sequence
  mRNA product Design b-1 comprising derived and/or modified sequence from HRSV(Memphis-37)__AIY60640.1__F_DSCav1_mut6 (opt11)
gggagacggagacggccugcaggaccugcucucucagcccucagccgaggccuacgccgagccgagugcgcagccgacgaccgggaggagccgcagccuucaacucugagguacugugauccgcgcugcccgccgggccgccccaguccgcugcugcggcaccuccuucccucgcgcccucuucgcucgccagcgccuucccugugagccugcgucaccgcggccgccaagcuuaccauggagcugcccauccucaagaccaacgccaucaccacgauccuggccgcggugacccugugcuucgcgagcucccaaaacaucaccgaggaguucuaccagagcacgugcuccgccgucagcaagggcuaccucggggcccugcgcaccggcugguacaccuccgugaucaccaucgagcugagcaacaucaaggaaaacaagugcaacgggacggacgcaaaggugaagcucaucaagcaggagcuggauaaguacaagaacgcggucacggaccugcagaugcucaugugcuccaccccggccgccggcagcggguccgccaucgcguccggcaucgccgugugcaagguguugcaccuggagggcgaggucaacaagaucaagaacgcccuccuuuccaccaauaaggcuguugugagccuguccaacggggucagcgugcucaccuucaaggugcuggaccugaagaacuacaucgacaagcagcuccugcccauccugaacaagcaguccugcagcauccccaaccccgagacagucauggaguuccagcagaagaacaaccggcuccuggagaucacccgcgaguucuccguuaacgccggggugaccaccccgguaagcacauacaugcugaccaacagcgagcuccugagccugaucaacgacaugcccaucaccaacgaccagaagaagcucaugagcaacaacgugcagaucgugcggcagcaguccuacagcaucaugugcaucaucaaggaggagguccuggcguacguggugcaacugccccucuacggggucaucgacacccccugcuggaagcugcacacguccccgcugugcaccaccaacaccaaggagggcagcaacaucugccucacgcgcaccgaccgggggugguacugcgacaacgcaggcuccgugagcuucuucccccaggccgagaccugcaaggugugcuccaaccgcgucuucugcgacaccaugaacagccugacgcugcccuccgaggugaaccucugcaacaucgacaucuucaaccccaaguacgacuguaagaucaugaccagcaagaccgaugucuccagcuccgugaucaccagccugggcgccauaguguccuguuaugggaagacgaagugcaccgccagcaacaagaacaaaggcaucaucaagaccuucuccaacgggugcgacuacgucagcaacaagggcguggacacaguguccgucggcaacacgcuguacuacgugaacaagcaggaggggcagagccucuacgugaagggcgagccgaucaucaacuucuacgauccccuggucuuccccagcgacgaguucgacgcguccaucagccaagugaacgagaagaucaaccagucccuggccuucauccgcaagagcgacgagcuccugcacaacgugaacgucgggaaguccaccaccaacaucaugaucaccaccaucaucaucgugaucaucgucauccugcuccugcugaucgccgucggccucuuccuguacugcaaggcccggagcacgcccgugacccuguccaaggaccagcugucgggcaucaacaacaucgccuucuccaacugaggacuaguguccaccugucccuccugggcugcuggauugucucguuuuccugccaaauaaacaggaucagcgcuuuacagaucuaaaaaaaaaaaaaaaaaaaaaaaaaaaaaaaaaaaaaaaaaaaaaaaaaaaaaaaaaaaaaaaaugcaucccccccccccccccccccccccccccccccaaaggcucuuuucagagccaccagaauu

SEQ ID NO: 17687 - RNA, 1877 nt, Artificial Sequence
  mRNA product Design b-2 comprising derived and/or modified sequence from HRSV(Memphis-37)__AIY60640.1__F_DSCav1_mut6 (opt1)
gggagagccucugcuggaguccggggaguggcguuggcugcuagagcgaagcuuaccauggagcugcccauccucaagaccaacgccaucaccacgauccuggccgcggugacccugugcuucgccagcucccagaacaucaccgaggaguucuaccagagcacgugcuccgccgucagcaagggcuaccucggcgcccugcgcaccgggugguacaccagcgugaucaccaucgagcuguccaacaucaaggagaacaagugcaacggcaccgacgccaaggugaagcucaucaagcaggagcuggacaaguacaagaacgcggucacggaccugcagaugcugaugugcagcaccccggccgccggcuccgggagcgcgaucgccuccggcaucgccgucugcaaggugcugcaccucgagggcgaggugaacaagaucaagaacgcccugcuguccaccaacaaggccgucgugagccucuccaacggggugagcguccugaccuucaaggugcuggaccucaagaacuacaucgacaagcagcugcugcccauccugaacaagcagagcugcuccauccccaaccccgagaccgucauggaguuccagcagaagaacaaccgccuccuggagaucacgcgggaguucagcgugaacgcgggcgugaccacccccgucuccaccuacaugcugacgaacagcgagcuccugucccugaucaacgacaugccgaucaccaacgaccagaagaagcucaugagcaacaacgugcagaucgugcgccagcaguccuacagcaucaugugcaucaucaaggaggagguccuggccuacguggugcagcugccccucuacggggucaucgacacccccugcuggaagcugcacaccagcccccugugcacgaccaacaccaaggagggcuccaacaucugccucacccggacggaccgcgggugguacugcgacaacgccggcagcguguccuucuucccgcaggccgagaccugcaaggucugcagcaaccggguguucugcgacaccaugaacucccugacccugcccagcgaggugaaccucugcaacaucgacaucuucaaccccaaguacgacugcaagaucaugacguccaagaccgacgucagcuccagcgugaucaccucccugggcgccaucgugagcugcuacgggaagaccaagugcacggcgagcaacaagaacaagggcaucaucaagaccuucuccaacgggugcgacuacgucagcaacaagggcguggacaccguguccgucggcaacacccuguacuacgugaacaagcaggagggccagagccucuacgugaagggggagcccaucaucaacuucuacgacccgcuggucuuccccuccgacgaguucgacgccagcaucucccaggugaacgagaagaucaaccagagccuggccuucauccggaaguccgacgagcuccugcacaacgugaacgucggcaagagcaccacgaacaucaugaucaccaccaucaucaucgugaucaucgugauccugcugcuccugaucgccgucgggcuguuccucuacugcaaggcccgcuccacccccgugacgcugagcaaggaccagcuguccgggaucaacaacaucgcguucagcaacugaggacuaguguccaccugucccuccugggcugcuggauugucucguuuuccugccaaauaaacaggaucagcgcuuuacagaucuaaaaaaaaaaaaaaaaaaaaaaaaaaaaaaaaaaaaaaaaaaaaaaaaaaaaaaaaaaaaaaaaugcaucccccccccccccccccccccccccccccccaaaggcucuuuucagagccaccagaauu

SEQ ID NO: 17688 - RNA, 1877 nt, Artificial Sequence
  mRNA product Design b-2 comprising derived and/or modified sequence from HRSV(Memphis-37)__AIY60640.1__F_DSCav1_mut6 (opt1)
gggagagccucugcuggaguccggggaguggcguuggcugcuagagcgaagcuuaccauggagcugcccauccucaagaccaacgccaucaccacgauccuggccgcggugacccugugcuucgccagcucccagaacaucaccgaggaguucuaccagagcacgugcuccgccgucagcaagggcuaccucggggcccugcgcaccggcugguacaccuccgugaucaccaucgagcugagcaacaucaaggagaacaagugcaacgggaccgacgccaaggugaagcucaucaagcaggagcuggacaaguacaagaacgcggucacggaccugcagaugcucaugugcuccaccccggccgccggcagcggguccgccaucgcgagcggcaucgccgugugcaaggugcugcaccuggagggcgaggucaacaagaucaagaacgcccuccuguccaccaacaaggccguggugagccuguccaacggggucagcgugcucaccuucaaggugcuggaccugaagaacuacaucgacaagcagcuccugcccauccugaacaagcaguccugcagcauccccaaccccgagacggucauggaguuccagcagaagaacaaccggcuccuggagaucacccgcgaguucuccgugaacgccggcgugaccaccccggucagcacguacaugcugaccaacuccgagcuccugagccugaucaacgacaugcccaucaccaacgaccagaagaagcucaugagcaacaacgugcagaucgugcggcagcaguccuacagcaucaugugcaucaucaaggaggagguccuggcguacguggugcagcugccccucuacggggucaucgacacccccugcuggaagcugcacacguccccgcugugcaccaccaacaccaaggagggcagcaacaucugccucacgcgcaccgaccgggggugguacugcgacaacgccggcuccgugagcuucuucccccaggccgagaccugcaaggugugcuccaaccgcgucuucugcgacaccaugaacagccugacgcugcccuccgaggugaaccucugcaacaucgacaucuucaaccccaaguacgacugcaagaucaugaccagcaagaccgacgucuccagcuccgugaucaccagccugggcgccaucguguccugcuacgggaagacgaagugcaccgccagcaacaagaacaagggcaucaucaagaccuucuccaacgggugcgacuacgucagcaacaagggcguggacaccguguccgucggcaacacgcuguacuacgugaacaagcaggaggggcagagccucuacgugaagggcgagccgaucaucaacuucuacgacccccuggucuuccccagcgacgaguucgacgcguccaucagccaggugaacgagaagaucaaccagucccuggccuucauccgcaagagcgacgagcuccugcacaacgugaacgucgggaaguccaccaccaacaucaugaucaccaccaucaucaucgugaucaucgugauccugcuccugcugaucgccgucggccucuuccuguacugcaaggcccggagcacgcccgugacccuguccaaggaccagcugagcgggaucaacaacaucgccuucuccaacugaggacuaguguccaccugucccuccugggcugcuggauugucucguuuuccugccaaauaaacaggaucagcgcuuuacagaucuaaaaaaaaaaaaaaaaaaaaaaaaaaaaaaaaaaaaaaaaaaaaaaaaaaaaaaaaaaaaaaaaugcaucccccccccccccccccccccccccccccccaaaggcucuuuucagagccaccagaauu

SEQ ID NO: 17689 - RNA, 1877 nt, Artificial Sequence
  mRNA product Design b-2 comprising derived and/or modified sequence from HRSV(Memphis-37)__AIY60640.1__F_DSCav1_mut6 (opt2)
gggagagccucugcuggaguccggggaguggcguuggcugcuagagcgaagcuuaccauggagcuccccauccucaagaccaacgccaucaccaccauccucgccgccgucacccucugcuucgccuccucccagaacaucaccgaggaguucuaccaguccaccugcuccgccgucuccaagggcuaccucggcgcccuccgcaccggcugguacaccuccgucaucaccaucgagcucuccaacaucaaggagaacaagugcaacggcaccgacgccaaggucaagcucaucaagcaggagcucgacaaguacaagaacgccgucaccgaccuccagaugcucaugugcuccacccccgccgccggcuccggcuccgccaucgccuccggcaucgccgucugcaagguccuccaccucgagggcgaggucaacaagaucaagaacgcccuccucuccaccaacaaggccgucgucucccucuccaacggcgucuccguccucaccuucaagguccucgaccucaagaacuacaucgacaagcagcuccuccccauccucaacaagcaguccugcuccauccccaaccccgagaccgucauggaguuccagcagaagaacaaccgccuccucgagaucacccgcgaguucuccgucaacgccggcgucaccacccccgucuccaccuacaugcucaccaacuccgagcuccucucccucaucaacgacaugcccaucaccaacgaccagaagaagcucauguccaacaacguccagaucguccgccagcaguccuacuccaucaugugcaucaucaaggaggagguccucgccuacgucguccagcucccccucuacggcgucaucgacacccccugcuggaagcuccacaccuccccccucugcaccaccaacaccaaggagggcuccaacaucugccucacccgcaccgaccgcggcugguacugcgacaacgccggcuccgucuccuucuucccccaggccgagaccugcaaggucugcuccaaccgcgucuucugcgacaccaugaacucccucacccuccccuccgaggucaaccucugcaacaucgacaucuucaaccccaaguacgacugcaagaucaugaccuccaagaccgacgucuccuccuccgucaucaccucccucggcgccaucgucuccugcuacggcaagaccaagugcaccgccuccaacaagaacaagggcaucaucaagaccuucuccaacggcugcgacuacgucuccaacaagggcgucgacaccgucuccgucggcaacacccucuacuacgucaacaagcaggagggccagucccucuacgucaagggcgagcccaucaucaacuucuacgacccccucgucuuccccuccgacgaguucgacgccuccaucucccaggucaacgagaagaucaaccagucccucgccuucauccgcaaguccgacgagcuccuccacaacgucaacgucggcaaguccaccaccaacaucaugaucaccaccaucaucaucgucaucaucgucauccuccuccuccucaucgccgucggccucuuccucuacugcaaggcccgcuccacccccgucacccucuccaaggaccagcucuccggcaucaacaacaucgccuucuccaacugaggacuaguguccaccugucccuccugggcugcuggauugucucguuuuccugccaaauaaacaggaucagcgcuuuacagaucuaaaaaaaaaaaaaaaaaaaaaaaaaaaaaaaaaaaaaaaaaaaaaaaaaaaaaaaaaaaaaaaaugcaucccccccccccccccccccccccccccccccaaaggcucuuuucagagccaccagaauu

SEQ ID NO: 17690 - RNA, 1877 nt, Artificial Sequence
  mRNA product Design b-2 comprising derived and/or modified sequence from HRSV(Memphis-37)__AIY60640.1__F_DSCav1_mut6 (opt3)
gggagagccucugcuggaguccggggaguggcguuggcugcuagagcgaagcuuaccauggagcugcccauccucaagaccaacgccauuacaacuauacuugcugcagugacgcugugcuucgccagcucccagaauaucaccgaagaguuuuaccaaucuacauguucagcggucaguaaaggcuauuugggggcuuuaagaacuggaugguacaccagcguuauuacaaucgaacuguccaacauuaaggagaauaaaugcaacgguaccgacgccaaggugaaacuaaucaagcaggaacucgauaaguauaaaaaugcaguaacugaccugcagaugcuuauguguucuacuccugccgcuggcucggggucagcaauagccagcggaaucgcugugugcaagguccugcacuuggagggcgaggugaacaaaauuaagaaugcccuccugaguaccaacaaagcgguugugucccugucuaauggugucagcgugcucacguucaagguauuagaucugaagaacuacaucgacaaacagcuuuugccaauucugaauaagcaauccuguucaaucccgaaccccgaaacuguuauggaguuucagcagaaaaauaacaggcuacucgaaauaacccgggaguucagugugaaugcaggggucacaacuccugugagcaccuauaugcugacaaacucugagcuucuguccuugauuaacgauaugccaaucaccaaugaccagaagaaacucaugucaaacaaugugcaaauuguccgccagcagagcuacaguaucaugugcaucauuaaggaagagguucuggccuaugugguacaguuaccccuguacggagugauagauacgccuuguuggaaacuccauacuucuccacuuugcacaaccaacacuaaggaaggcuccaauaucugucugacacgaaccgaccguggcugguacugcgauaacgcugggagcgucucguuuuucccccaagccgagacguguaaggugugcucuaauagaguuuucugcgacaccaugaacuccuugacacuaccuucagaagugaaucuguguaacauugauaucuucaauccaaaauaugacugcaagauaaugacaaguaaaaccgaugucagcuccucugugauuacaagccucggagcaaucguaucauguuacgguaagacuaaaugcaccgcuaguaacaagaauaagggcaucauuaaaacauuuuccaacgggugugacuauguuagcaauaagggaguggacaccgucucugugggcaacacucuguacuaugucaacaaacaggagggucagucacuuuacgugaagggggagccgaucauuaauuucuaugauccccugguuuuuccuagugacgaauuugaugccagcauaucccaagugaacgagaaaaucaaucagucuuuggcguuuauuaggaagucggacgaacuccugcacaacguaaaugucggaaagagcacgacaaacaucaugaucaccacuauuauaaucgugauuaucguuauuuuacugcuacucaucgccgugggccuguuccuuuacugcaaagcacgguccaccccagucacauugucaaaggaucagcugaguggcauaaauaacaucgcuuucucuaauugaggacuaguguccaccugucccuccugggcugcuggauugucucguuuuccugccaaauaaacaggaucagcgcuuuacagaucuaaaaaaaaaaaaaaaaaaaaaaaaaaaaaaaaaaaaaaaaaaaaaaaaaaaaaaaaaaaaaaaaugcaucccccccccccccccccccccccccccccccaaaggcucuuuucagagccaccagaauu

SEQ ID NO: 17691 - RNA, 1877 nt, Artificial Sequence
  mRNA product Design b-2 comprising derived and/or modified sequence from HRSV(Memphis-37)__AIY60640.1__F_DSCav1_mut6 (opt4)
gggagagccucugcuggaguccggggaguggcguuggcugcuagagcgaagcuuaccauggagcugcccauccugaagaccaacgccaucaccaccauccuggccgccgugacccugugcuucgccagcagccagaacaucaccgaggaguucuaccagagcaccugcagcgccgugagcaagggcuaccugggcgcccugagaaccggcugguacaccagcgugaucaccaucgagcugagcaacaucaaggagaacaagugcaacggcaccgacgccaaggugaagcugaucaagcaggagcuggacaaguacaagaacgccgugaccgaccugcagaugcugaugugcagcacccccgccgccggcagcggcagcgccaucgccagcggcaucgccgugugcaaggugcugcaccuggagggcgaggugaacaagaucaagaacgcccugcugagcaccaacaaggccguggugagccugagcaacggcgugagcgugcugaccuucaaggugcuggaccugaagaacuacaucgacaagcagcugcugcccauccugaacaagcagagcugcagcauccccaaccccgagaccgugauggaguuccagcagaagaacaacagacugcuggagaucaccagagaguucagcgugaacgccggcgugaccacccccgugagcaccuacaugcugaccaacagcgagcugcugagccugaucaacgacaugcccaucaccaacgaccagaagaagcugaugagcaacaacgugcagaucgugagacagcagagcuacagcaucaugugcaucaucaaggaggaggugcuggccuacguggugcagcugccccuguacggcgugaucgacacccccugcuggaagcugcacaccagcccccugugcaccaccaacaccaaggagggcagcaacaucugccugaccagaaccgacagaggcugguacugcgacaacgccggcagcgugagcuucuucccccaggccgagaccugcaaggugugcagcaacagaguguucugcgacaccaugaacagccugacccugcccagcgaggugaaccugugcaacaucgacaucuucaaccccaaguacgacugcaagaucaugaccagcaagaccgacgugagcagcagcgugaucaccagccugggcgccaucgugagcugcuacggcaagaccaagugcaccgccagcaacaagaacaagggcaucaucaagaccuucagcaacggcugcgacuacgugagcaacaagggcguggacaccgugagcgugggcaacacccuguacuacgugaacaagcaggagggccagagccuguacgugaagggcgagcccaucaucaacuucuacgacccccugguguuccccagcgacgaguucgacgccagcaucagccaggugaacgagaagaucaaccagagccuggccuucaucagaaagagcgacgagcugcugcacaacgugaacgugggcaagagcaccaccaacaucaugaucaccaccaucaucaucgugaucaucgugauccugcugcugcugaucgccgugggccuguuccuguacugcaaggccagaagcacccccgugacccugagcaaggaccagcugagcggcaucaacaacaucgccuucagcaacugaggacuaguguccaccugucccuccugggcugcuggauugucucguuuuccugccaaauaaacaggaucagcgcuuuacagaucuaaaaaaaaaaaaaaaaaaaaaaaaaaaaaaaaaaaaaaaaaaaaaaaaaaaaaaaaaaaaaaaaugcaucccccccccccccccccccccccccccccccaaaggcucuuuucagagccaccagaauu

SEQ ID NO: 17692 - RNA, 1877 nt, Artificial Sequence
  mRNA product Design b-2 comprising derived and/or modified sequence from HRSV(Memphis-37)__AIY60640.1__F_DSCav1_mut6 (opt5)
gggagagccucugcuggaguccggggaguggcguuggcugcuagagcgaagcuuaccauggagcugcccauccucaagaccaacgccauuacaacgauccuggcugccgugacccuuugcuucgcgagcucccagaauauuacagaagaguuuuaccaaucuaccuguagcgcugucuccaaaggcuaucugggggcccucagaacaggaugguacaccucuguuaucacaauugaacugagcaacaucaaggagaauaaaugcaacggcaccgacgccaaggugaaacuuaucaagcaggaacuggauaaguauaaaaaugcugugacggaccuccagaugcugauguguuccaccccugccgcugggucuggaagcgccauugcguccggcaucgccgucugcaaggugcugcaccucgagggggagguuaacaaaauuaagaaugcucugcuuagcacaaacaaagccguggucucucuguccaauggagugagcguucucaccuucaaggugcuggaucuuaagaacuacaucgacaaacagcugcucccgauucugaauaagcaaucuuguuccauccccaacccugaaacagucauggaguuucagcagaaaaauaaccggcugcucgaaauuacccgcgaguucagcgugaaugcuggcgugacgacacccgucucuaccuauaugcugacaaacuccgagcuucugagccucaucaacgauaugccuaucaccaaugaccagaagaaacugauguccaacaauguucaaauugugagacagcagucuuacagcaucaugugcauuaucaaggaagaggugcuugccuaugucgugcagcugccccucuacggcguuauugauaccccuuguuggaaacugcauacauccccgcugugcacgaccaacacaaaggaagggagcaauaucugucucacccggacagaccgcggaugguacugcgauaacgcgggcucuguguccuuuuucccccaagccgagaccuguaaggucugcagcaauagaguguuuugcgacacgaugaacucucugacacuuccuagcgaaguuaaucuguguaacaucgauauuuucaaucccaaauaugacugcaagaucaugaccuccaaaaccgaugugucuagcuccgucauuacaagccucggggcuaucgugucuuguuacggaaagaccaaaugcacagccuccaacaagaauaagggcauuaucaaaacguuuagcaacgggugugacuaugucucuaauaagggaguggacaccguuuccgugggcaacacacuguacuaugucaacaaacaggagggccagagccuuuacgugaagggggagccuaucauuaauuucuaugauccccugguuuuuccguccgacgaauuugaugcuucuaucagccaagugaacgagaaaauuaaucagucccucgccuucauccggaagucugacgaacugcugcacaacgucaaugugggaaagagcaccacaaacauuaugaucaccacgauuaucaucgugauuaucguuauucuccugcuucugaucgccgucggccucuuccuguacugcaaagcucgcuccaccccugugacacugagcaaggaucagcuuucugggauuaauaacaucgcguucuccaauugaggacuaguguccaccugucccuccugggcugcuggauugucucguuuuccugccaaauaaacaggaucagcgcuuuacagaucuaaaaaaaaaaaaaaaaaaaaaaaaaaaaaaaaaaaaaaaaaaaaaaaaaaaaaaaaaaaaaaaaugcaucccccccccccccccccccccccccccccccaaaggcucuuuucagagccaccagaauu

SEQ ID NO: 17693 - RNA, 1877 nt, Artificial Sequence
  mRNA product Design b-2 comprising derived and/or modified sequence from HRSV(Memphis-37)__AIY60640.1__F_DSCav1_mut6 (opt6)
gggagagccucugcuggaguccggggaguggcguuggcugcuagagcgaagcuuaccauggaacuaccaauuuuaaaaacaaacgcaauuacaacuauacucgcagcaguaacauuauguuucgccucaucccaaaacauaacagaagaauuuuaccaaucaacaugcagcgcaguaucaaaaggauaucucggagcauuacgaacagguugguacacaucuguaaucacuauagaacuaucaaacauaaaagaaaacaaaugcaauggaaccgacgcaaaaguaaaauuaauaaaacaagaacucgauaaauacaaaaaugcaguaacagaccuccaaaugcucauguguucaacaccagccgcaggaucagguuccgccauagcaucuggcauagcaguaugcaaaguacuccacuuagaaggagaaguuaacaaaauaaaaaacgcacuauuaucaacaaacaaagcaguaguaucccucucaaacggagucucaguauuaacauucaaaguauuagaccuaaaaaacuacauagacaaacaacuacuuccaauacucaacaaacaaucaugcucaauaccaaacccagaaaccguaauggaauuucaacaaaaaaacaaccgacuacuagaaaucacacgagaauuuucaguaaacgccggugucacaacuccaguaucaacuuauauguuaaccaacucagaacuauuaucauuaauaaacgauaugcccauaacuaacgaccaaaaaaaauuaaugucaaacaacguacaaauaguacgccaacaaaguuacucaauaaugugcaucauaaaagaagaaguauuagcguacguuguacaacuaccucuauacggagucauagacacaccaugcuggaaacuucacacaucaccacuauguacaacaaacacaaaagaaggcaguaacauaugccuaacaagaacagaccguggaugguauugugacaacgcuggaucuguaucauucuucccucaagcagaaaccuguaaaguuugcucaaacagagucuucugugacacaaugaacucucuaacacuaccuuccgaagugaaccucuguaacauagacauauucaauccaaaauaugauugcaaaauaaugacuucaaaaacagauguaucauccucuguuauaacaucauuaggcgccauaguuucaugcuacggaaaaacuaaaugcacagcaucaaacaaaaacaaaggaauaauaaaaaccuucucaaauggaugcgacuacguaagcaacaaaggcguagacacaguaucaguagguaauacauuauacuacguaaacaaacaagaaggacaaucacuuuauguuaaaggagaaccuauaauaaacuucuacgacccacuuguauuuccauccgaugaauuugacgcaucuauaucacaagucaacgaaaaaauaaaccaaucauuagcauucauucgaaaauccgaugaacuacuccauaacguaaaugucggaaaaucaacaaccaacauaaugaucacaacaauaaucauagugauaauaguaauacuccuacuacuaaucgcaguaggucuauuccuauauuguaaagcaagaucuacuccaguuacacucucuaaagaccaauuaagcgguaucaacaacaucgccuucagcaauuaaggacuaguguccaccugucccuccugggcugcuggauugucucguuuuccugccaaauaaacaggaucagcgcuuuacagaucuaaaaaaaaaaaaaaaaaaaaaaaaaaaaaaaaaaaaaaaaaaaaaaaaaaaaaaaaaaaaaaaaugcaucccccccccccccccccccccccccccccccaaaggcucuuuucagagccaccagaauu

SEQ ID NO: 17694 - RNA, 1877 nt, Artificial Sequence
  mRNA product Design b-2 comprising derived and/or modified sequence from HRSV(Memphis-37)__AIY60640.1__F_DSCav1_mut6 (opt11)
gggagagccucugcuggaguccggggaguggcguuggcugcuagagcgaagcuuaccauggagcugcccauccucaagaccaacgccaucaccacgauccuggccgcggugacccugugcuucgcgagcucccaaaacaucaccgaggaguucuaccagagcacgugcuccgccgucagcaagggcuaccucggggcccugcgcaccggcugguacaccuccgugaucaccaucgagcugagcaacaucaaggaaaacaagugcaacgggacggacgcaaaggugaagcucaucaagcaggagcuggauaaguacaagaacgcggucacggaccugcagaugcucaugugcuccaccccggccgccggcagcggguccgccaucgcguccggcaucgccgugugcaagguguugcaccuggagggcgaggucaacaagaucaagaacgcccuccuuuccaccaauaaggcuguugugagccuguccaacggggucagcgugcucaccuucaaggugcuggaccugaagaacuacaucgacaagcagcuccugcccauccugaacaagcaguccugcagcauccccaaccccgagacagucauggaguuccagcagaagaacaaccggcuccuggagaucacccgcgaguucuccguuaacgccggggugaccaccccgguaagcacauacaugcugaccaacagcgagcuccugagccugaucaacgacaugcccaucaccaacgaccagaagaagcucaugagcaacaacgugcagaucgugcggcagcaguccuacagcaucaugugcaucaucaaggaggagguccuggcguacguggugcaacugccccucuacggggucaucgacacccccugcuggaagcugcacacguccccgcugugcaccaccaacaccaaggagggcagcaacaucugccucacgcgcaccgaccgggggugguacugcgacaacgcaggcuccgugagcuucuucccccaggccgagaccugcaaggugugcuccaaccgcgucuucugcgacaccaugaacagccugacgcugcccuccgaggugaaccucugcaacaucgacaucuucaaccccaaguacgacuguaagaucaugaccagcaagaccgaugucuccagcuccgugaucaccagccugggcgccauaguguccuguuaugggaagacgaagugcaccgccagcaacaagaacaaaggcaucaucaagaccuucuccaacgggugcgacuacgucagcaacaagggcguggacacaguguccgucggcaacacgcuguacuacgugaacaagcaggaggggcagagccucuacgugaagggcgagccgaucaucaacuucuacgauccccuggucuuccccagcgacgaguucgacgcguccaucagccaagugaacgagaagaucaaccagucccuggccuucauccgcaagagcgacgagcuccugcacaacgugaacgucgggaaguccaccaccaacaucaugaucaccaccaucaucaucgugaucaucgucauccugcuccugcugaucgccgucggccucuuccuguacugcaaggcccggagcacgcccgugacccuguccaaggaccagcugucgggcaucaacaacaucgccuucuccaacugaggacuaguguccaccugucccuccugggcugcuggauugucucguuuuccugccaaauaaacaggaucagcgcuuuacagaucuaaaaaaaaaaaaaaaaaaaaaaaaaaaaaaaaaaaaaaaaaaaaaaaaaaaaaaaaaaaaaaaaugcaucccccccccccccccccccccccccccccccaaaggcucuuuucagagccaccagaauu

SEQ ID NO: 17695 - RNA, 1897 nt, Artificial Sequence
  mRNA product Design b-3 comprising derived and/or modified sequence from HRSV(Memphis-37)__AIY60640.1__F_DSCav1_mut6 (opt1)
gggagagucccgcagucggcguccagcggcucugcuuguucgugugugugucguugcaggccuuauucaagcuuaccauggagcugcccauccucaagaccaacgccaucaccacgauccuggccgcggugacccugugcuucgccagcucccagaacaucaccgaggaguucuaccagagcacgugcuccgccgucagcaagggcuaccucggcgcccugcgcaccgggugguacaccagcgugaucaccaucgagcuguccaacaucaaggagaacaagugcaacggcaccgacgccaaggugaagcucaucaagcaggagcuggacaaguacaagaacgcggucacggaccugcagaugcugaugugcagcaccccggccgccggcuccgggagcgcgaucgccuccggcaucgccgucugcaaggugcugcaccucgagggcgaggugaacaagaucaagaacgcccugcuguccaccaacaaggccgucgugagccucuccaacggggugagcguccugaccuucaaggugcuggaccucaagaacuacaucgacaagcagcugcugcccauccugaacaagcagagcugcuccauccccaaccccgagaccgucauggaguuccagcagaagaacaaccgccuccuggagaucacgcgggaguucagcgugaacgcgggcgugaccacccccgucuccaccuacaugcugacgaacagcgagcuccugucccugaucaacgacaugccgaucaccaacgaccagaagaagcucaugagcaacaacgugcagaucgugcgccagcaguccuacagcaucaugugcaucaucaaggaggagguccuggccuacguggugcagcugccccucuacggggucaucgacacccccugcuggaagcugcacaccagcccccugugcacgaccaacaccaaggagggcuccaacaucugccucacccggacggaccgcgggugguacugcgacaacgccggcagcguguccuucuucccgcaggccgagaccugcaaggucugcagcaaccggguguucugcgacaccaugaacucccugacccugcccagcgaggugaaccucugcaacaucgacaucuucaaccccaaguacgacugcaagaucaugacguccaagaccgacgucagcuccagcgugaucaccucccugggcgccaucgugagcugcuacgggaagaccaagugcacggcgagcaacaagaacaagggcaucaucaagaccuucuccaacgggugcgacuacgucagcaacaagggcguggacaccguguccgucggcaacacccuguacuacgugaacaagcaggagggccagagccucuacgugaagggggagcccaucaucaacuucuacgacccgcuggucuuccccuccgacgaguucgacgccagcaucucccaggugaacgagaagaucaaccagagccuggccuucauccggaaguccgacgagcuccugcacaacgugaacgucggcaagagcaccacgaacaucaugaucaccaccaucaucaucgugaucaucgugauccugcugcuccugaucgccgucgggcuguuccucuacugcaaggcccgcuccacccccgugacgcugagcaaggaccagcuguccgggaucaacaacaucgcguucagcaacugaggacuaguguccaccugucccuccugggcugcuggauugucucguuuuccugccaaauaaacaggaucagcgcuuuacagaucuaaaaaaaaaaaaaaaaaaaaaaaaaaaaaaaaaaaaaaaaaaaaaaaaaaaaaaaaaaaaaaaaugcaucccccccccccccccccccccccccccccccaaaggcucuuuucagagccaccagaauu

SEQ ID NO: 17696 - RNA, 1897 nt, Artificial Sequence
  mRNA product Design b-3 comprising derived and/or modified sequence from HRSV(Memphis-37)__AIY60640.1__F_DSCav1_mut6 (opt1)
gggagagucccgcagucggcguccagcggcucugcuuguucgugugugugucguugcaggccuuauucaagcuuaccauggagcugcccauccucaagaccaacgccaucaccacgauccuggccgcggugacccugugcuucgccagcucccagaacaucaccgaggaguucuaccagagcacgugcuccgccgucagcaagggcuaccucggggcccugcgcaccggcugguacaccuccgugaucaccaucgagcugagcaacaucaaggagaacaagugcaacgggaccgacgccaaggugaagcucaucaagcaggagcuggacaaguacaagaacgcggucacggaccugcagaugcucaugugcuccaccccggccgccggcagcggguccgccaucgcgagcggcaucgccgugugcaaggugcugcaccuggagggcgaggucaacaagaucaagaacgcccuccuguccaccaacaaggccguggugagccuguccaacggggucagcgugcucaccuucaaggugcuggaccugaagaacuacaucgacaagcagcuccugcccauccugaacaagcaguccugcagcauccccaaccccgagacggucauggaguuccagcagaagaacaaccggcuccuggagaucacccgcgaguucuccgugaacgccggcgugaccaccccggucagcacguacaugcugaccaacuccgagcuccugagccugaucaacgacaugcccaucaccaacgaccagaagaagcucaugagcaacaacgugcagaucgugcggcagcaguccuacagcaucaugugcaucaucaaggaggagguccuggcguacguggugcagcugccccucuacggggucaucgacacccccugcuggaagcugcacacguccccgcugugcaccaccaacaccaaggagggcagcaacaucugccucacgcgcaccgaccgggggugguacugcgacaacgccggcuccgugagcuucuucccccaggccgagaccugcaaggugugcuccaaccgcgucuucugcgacaccaugaacagccugacgcugcccuccgaggugaaccucugcaacaucgacaucuucaaccccaaguacgacugcaagaucaugaccagcaagaccgacgucuccagcuccgugaucaccagccugggcgccaucguguccugcuacgggaagacgaagugcaccgccagcaacaagaacaagggcaucaucaagaccuucuccaacgggugcgacuacgucagcaacaagggcguggacaccguguccgucggcaacacgcuguacuacgugaacaagcaggaggggcagagccucuacgugaagggcgagccgaucaucaacuucuacgacccccuggucuuccccagcgacgaguucgacgcguccaucagccaggugaacgagaagaucaaccagucccuggccuucauccgcaagagcgacgagcuccugcacaacgugaacgucgggaaguccaccaccaacaucaugaucaccaccaucaucaucgugaucaucgugauccugcuccugcugaucgccgucggccucuuccuguacugcaaggcccggagcacgcccgugacccuguccaaggaccagcugagcgggaucaacaacaucgccuucuccaacugaggacuaguguccaccugucccuccugggcugcuggauugucucguuuuccugccaaauaaacaggaucagcgcuuuacagaucuaaaaaaaaaaaaaaaaaaaaaaaaaaaaaaaaaaaaaaaaaaaaaaaaaaaaaaaaaaaaaaaaugcaucccccccccccccccccccccccccccccccaaaggcucuuuucagagccaccagaauu

SEQ ID NO: 17697 - RNA, 1897 nt, Artificial Sequence
  mRNA product Design b-3 comprising derived and/or modified sequence from HRSV(Memphis-37)__AIY60640.1__F_DSCav1_mut6 (opt2)
gggagagucccgcagucggcguccagcggcucugcuuguucgugugugugucguugcaggccuuauucaagcuuaccauggagcuccccauccucaagaccaacgccaucaccaccauccucgccgccgucacccucugcuucgccuccucccagaacaucaccgaggaguucuaccaguccaccugcuccgccgucuccaagggcuaccucggcgcccuccgcaccggcugguacaccuccgucaucaccaucgagcucuccaacaucaaggagaacaagugcaacggcaccgacgccaaggucaagcucaucaagcaggagcucgacaaguacaagaacgccgucaccgaccuccagaugcucaugugcuccacccccgccgccggcuccggcuccgccaucgccuccggcaucgccgucugcaagguccuccaccucgagggcgaggucaacaagaucaagaacgcccuccucuccaccaacaaggccgucgucucccucuccaacggcgucuccguccucaccuucaagguccucgaccucaagaacuacaucgacaagcagcuccuccccauccucaacaagcaguccugcuccauccccaaccccgagaccgucauggaguuccagcagaagaacaaccgccuccucgagaucacccgcgaguucuccgucaacgccggcgucaccacccccgucuccaccuacaugcucaccaacuccgagcuccucucccucaucaacgacaugcccaucaccaacgaccagaagaagcucauguccaacaacguccagaucguccgccagcaguccuacuccaucaugugcaucaucaaggaggagguccucgccuacgucguccagcucccccucuacggcgucaucgacacccccugcuggaagcuccacaccuccccccucugcaccaccaacaccaaggagggcuccaacaucugccucacccgcaccgaccgcggcugguacugcgacaacgccggcuccgucuccuucuucccccaggccgagaccugcaaggucugcuccaaccgcgucuucugcgacaccaugaacucccucacccuccccuccgaggucaaccucugcaacaucgacaucuucaaccccaaguacgacugcaagaucaugaccuccaagaccgacgucuccuccuccgucaucaccucccucggcgccaucgucuccugcuacggcaagaccaagugcaccgccuccaacaagaacaagggcaucaucaagaccuucuccaacggcugcgacuacgucuccaacaagggcgucgacaccgucuccgucggcaacacccucuacuacgucaacaagcaggagggccagucccucuacgucaagggcgagcccaucaucaacuucuacgacccccucgucuuccccuccgacgaguucgacgccuccaucucccaggucaacgagaagaucaaccagucccucgccuucauccgcaaguccgacgagcuccuccacaacgucaacgucggcaaguccaccaccaacaucaugaucaccaccaucaucaucgucaucaucgucauccuccuccuccucaucgccgucggccucuuccucuacugcaaggcccgcuccacccccgucacccucuccaaggaccagcucuccggcaucaacaacaucgccuucuccaacugaggacuaguguccaccugucccuccugggcugcuggauugucucguuuuccugccaaauaaacaggaucagcgcuuuacagaucuaaaaaaaaaaaaaaaaaaaaaaaaaaaaaaaaaaaaaaaaaaaaaaaaaaaaaaaaaaaaaaaaugcaucccccccccccccccccccccccccccccccaaaggcucuuuucagagccaccagaauu

SEQ ID NO: 17698 - RNA, 1897 nt, Artificial Sequence
  mRNA product Design b-3 comprising derived and/or modified sequence from HRSV(Memphis-37)__AIY60640.1__F_DSCav1_mut6 (opt3)
gggagagucccgcagucggcguccagcggcucugcuuguucgugugugugucguugcaggccuuauucaagcuuaccauggagcugcccauccucaagaccaacgccauuacaacuauacuugcugcagugacgcugugcuucgccagcucccagaauaucaccgaagaguuuuaccaaucuacauguucagcggucaguaaaggcuauuugggggcuuuaagaacuggaugguacaccagcguuauuacaaucgaacuguccaacauuaaggagaauaaaugcaacgguaccgacgccaaggugaaacuaaucaagcaggaacucgauaaguauaaaaaugcaguaacugaccugcagaugcuuauguguucuacuccugccgcuggcucggggucagcaauagccagcggaaucgcugugugcaagguccugcacuuggagggcgaggugaacaaaauuaagaaugcccuccugaguaccaacaaagcgguugugucccugucuaauggugucagcgugcucacguucaagguauuagaucugaagaacuacaucgacaaacagcuuuugccaauucugaauaagcaauccuguucaaucccgaaccccgaaacuguuauggaguuucagcagaaaaauaacaggcuacucgaaauaacccgggaguucagugugaaugcaggggucacaacuccugugagcaccuauaugcugacaaacucugagcuucuguccuugauuaacgauaugccaaucaccaaugaccagaagaaacucaugucaaacaaugugcaaauuguccgccagcagagcuacaguaucaugugcaucauuaaggaagagguucuggccuaugugguacaguuaccccuguacggagugauagauacgccuuguuggaaacuccauacuucuccacuuugcacaaccaacacuaaggaaggcuccaauaucugucugacacgaaccgaccguggcugguacugcgauaacgcugggagcgucucguuuuucccccaagccgagacguguaaggugugcucuaauagaguuuucugcgacaccaugaacuccuugacacuaccuucagaagugaaucuguguaacauugauaucuucaauccaaaauaugacugcaagauaaugacaaguaaaaccgaugucagcuccucugugauuacaagccucggagcaaucguaucauguuacgguaagacuaaaugcaccgcuaguaacaagaauaagggcaucauuaaaacauuuuccaacgggugugacuauguuagcaauaagggaguggacaccgucucugugggcaacacucuguacuaugucaacaaacaggagggucagucacuuuacgugaagggggagccgaucauuaauuucuaugauccccugguuuuuccuagugacgaauuugaugccagcauaucccaagugaacgagaaaaucaaucagucuuuggcguuuauuaggaagucggacgaacuccugcacaacguaaaugucggaaagagcacgacaaacaucaugaucaccacuauuauaaucgugauuaucguuauuuuacugcuacucaucgccgugggccuguuccuuuacugcaaagcacgguccaccccagucacauugucaaaggaucagcugaguggcauaaauaacaucgcuuucucuaauugaggacuaguguccaccugucccuccugggcugcuggauugucucguuuuccugccaaauaaacaggaucagcgcuuuacagaucuaaaaaaaaaaaaaaaaaaaaaaaaaaaaaaaaaaaaaaaaaaaaaaaaaaaaaaaaaaaaaaaaugcaucccccccccccccccccccccccccccccccaaaggcucuuuucagagccaccagaauu

SEQ ID NO: 17699 - RNA, 1897 nt, Artificial Sequence
  mRNA product Design b-3 comprising derived and/or modified sequence from HRSV(Memphis-37)__AIY60640.1__F_DSCav1_mut6 (opt4)
gggagagucccgcagucggcguccagcggcucugcuuguucgugugugugucguugcaggccuuauucaagcuuaccauggagcugcccauccugaagaccaacgccaucaccaccauccuggccgccgugacccugugcuucgccagcagccagaacaucaccgaggaguucuaccagagcaccugcagcgccgugagcaagggcuaccugggcgcccugagaaccggcugguacaccagcgugaucaccaucgagcugagcaacaucaaggagaacaagugcaacggcaccgacgccaaggugaagcugaucaagcaggagcuggacaaguacaagaacgccgugaccgaccugcagaugcugaugugcagcacccccgccgccggcagcggcagcgccaucgccagcggcaucgccgugugcaaggugcugcaccuggagggcgaggugaacaagaucaagaacgcccugcugagcaccaacaaggccguggugagccugagcaacggcgugagcgugcugaccuucaaggugcuggaccugaagaacuacaucgacaagcagcugcugcccauccugaacaagcagagcugcagcauccccaaccccgagaccgugauggaguuccagcagaagaacaacagacugcuggagaucaccagagaguucagcgugaacgccggcgugaccacccccgugagcaccuacaugcugaccaacagcgagcugcugagccugaucaacgacaugcccaucaccaacgaccagaagaagcugaugagcaacaacgugcagaucgugagacagcagagcuacagcaucaugugcaucaucaaggaggaggugcuggccuacguggugcagcugccccuguacggcgugaucgacacccccugcuggaagcugcacaccagcccccugugcaccaccaacaccaaggagggcagcaacaucugccugaccagaaccgacagaggcugguacugcgacaacgccggcagcgugagcuucuucccccaggccgagaccugcaaggugugcagcaacagaguguucugcgacaccaugaacagccugacccugcccagcgaggugaaccugugcaacaucgacaucuucaaccccaaguacgacugcaagaucaugaccagcaagaccgacgugagcagcagcgugaucaccagccugggcgccaucgugagcugcuacggcaagaccaagugcaccgccagcaacaagaacaagggcaucaucaagaccuucagcaacggcugcgacuacgugagcaacaagggcguggacaccgugagcgugggcaacacccuguacuacgugaacaagcaggagggccagagccuguacgugaagggcgagcccaucaucaacuucuacgacccccugguguuccccagcgacgaguucgacgccagcaucagccaggugaacgagaagaucaaccagagccuggccuucaucagaaagagcgacgagcugcugcacaacgugaacgugggcaagagcaccaccaacaucaugaucaccaccaucaucaucgugaucaucgugauccugcugcugcugaucgccgugggccuguuccuguacugcaaggccagaagcacccccgugacccugagcaaggaccagcugagcggcaucaacaacaucgccuucagcaacugaggacuaguguccaccugucccuccugggcugcuggauugucucguuuuccugccaaauaaacaggaucagcgcuuuacagaucuaaaaaaaaaaaaaaaaaaaaaaaaaaaaaaaaaaaaaaaaaaaaaaaaaaaaaaaaaaaaaaaaugcaucccccccccccccccccccccccccccccccaaaggcucuuuucagagccaccagaauu

SEQ ID NO: 17700 - RNA, 1897 nt, Artificial Sequence
  mRNA product Design b-3 comprising derived and/or modified sequence from HRSV(Memphis-37)__AIY60640.1__F_DSCav1_mut6 (opt5)
gggagagucccgcagucggcguccagcggcucugcuuguucgugugugugucguugcaggccuuauucaagcuuaccauggagcugcccauccucaagaccaacgccauuacaacgauccuggcugccgugacccuuugcuucgcgagcucccagaauauuacagaagaguuuuaccaaucuaccuguagcgcugucuccaaaggcuaucugggggcccucagaacaggaugguacaccucuguuaucacaauugaacugagcaacaucaaggagaauaaaugcaacggcaccgacgccaaggugaaacuuaucaagcaggaacuggauaaguauaaaaaugcugugacggaccuccagaugcugauguguuccaccccugccgcugggucuggaagcgccauugcguccggcaucgccgucugcaaggugcugcaccucgagggggagguuaacaaaauuaagaaugcucugcuuagcacaaacaaagccguggucucucuguccaauggagugagcguucucaccuucaaggugcuggaucuuaagaacuacaucgacaaacagcugcucccgauucugaauaagcaaucuuguuccauccccaacccugaaacagucauggaguuucagcagaaaaauaaccggcugcucgaaauuacccgcgaguucagcgugaaugcuggcgugacgacacccgucucuaccuauaugcugacaaacuccgagcuucugagccucaucaacgauaugccuaucaccaaugaccagaagaaacugauguccaacaauguucaaauugugagacagcagucuuacagcaucaugugcauuaucaaggaagaggugcuugccuaugucgugcagcugccccucuacggcguuauugauaccccuuguuggaaacugcauacauccccgcugugcacgaccaacacaaaggaagggagcaauaucugucucacccggacagaccgcggaugguacugcgauaacgcgggcucuguguccuuuuucccccaagccgagaccuguaaggucugcagcaauagaguguuuugcgacacgaugaacucucugacacuuccuagcgaaguuaaucuguguaacaucgauauuuucaaucccaaauaugacugcaagaucaugaccuccaaaaccgaugugucuagcuccgucauuacaagccucggggcuaucgugucuuguuacggaaagaccaaaugcacagccuccaacaagaauaagggcauuaucaaaacguuuagcaacgggugugacuaugucucuaauaagggaguggacaccguuuccgugggcaacacacuguacuaugucaacaaacaggagggccagagccuuuacgugaagggggagccuaucauuaauuucuaugauccccugguuuuuccguccgacgaauuugaugcuucuaucagccaagugaacgagaaaauuaaucagucccucgccuucauccggaagucugacgaacugcugcacaacgucaaugugggaaagagcaccacaaacauuaugaucaccacgauuaucaucgugauuaucguuauucuccugcuucugaucgccgucggccucuuccuguacugcaaagcucgcuccaccccugugacacugagcaaggaucagcuuucugggauuaauaacaucgcguucuccaauugaggacuaguguccaccugucccuccugggcugcuggauugucucguuuuccugccaaauaaacaggaucagcgcuuuacagaucuaaaaaaaaaaaaaaaaaaaaaaaaaaaaaaaaaaaaaaaaaaaaaaaaaaaaaaaaaaaaaaaaugcaucccccccccccccccccccccccccccccccaaaggcucuuuucagagccaccagaauu

SEQ ID NO: 17701 - RNA, 1897 nt, Artificial Sequence
  mRNA product Design b-3 comprising derived and/or modified sequence from HRSV(Memphis-37)__AIY60640.1__F_DSCav1_mut6 (opt6)
gggagagucccgcagucggcguccagcggcucugcuuguucgugugugugucguugcaggccuuauucaagcuuaccauggaacuaccaauuuuaaaaacaaacgcaauuacaacuauacucgcagcaguaacauuauguuucgccucaucccaaaacauaacagaagaauuuuaccaaucaacaugcagcgcaguaucaaaaggauaucucggagcauuacgaacagguugguacacaucuguaaucacuauagaacuaucaaacauaaaagaaaacaaaugcaauggaaccgacgcaaaaguaaaauuaauaaaacaagaacucgauaaauacaaaaaugcaguaacagaccuccaaaugcucauguguucaacaccagccgcaggaucagguuccgccauagcaucuggcauagcaguaugcaaaguacuccacuuagaaggagaaguuaacaaaauaaaaaacgcacuauuaucaacaaacaaagcaguaguaucccucucaaacggagucucaguauuaacauucaaaguauuagaccuaaaaaacuacauagacaaacaacuacuuccaauacucaacaaacaaucaugcucaauaccaaacccagaaaccguaauggaauuucaacaaaaaaacaaccgacuacuagaaaucacacgagaauuuucaguaaacgccggugucacaacuccaguaucaacuuauauguuaaccaacucagaacuauuaucauuaauaaacgauaugcccauaacuaacgaccaaaaaaaauuaaugucaaacaacguacaaauaguacgccaacaaaguuacucaauaaugugcaucauaaaagaagaaguauuagcguacguuguacaacuaccucuauacggagucauagacacaccaugcuggaaacuucacacaucaccacuauguacaacaaacacaaaagaaggcaguaacauaugccuaacaagaacagaccguggaugguauugugacaacgcuggaucuguaucauucuucccucaagcagaaaccuguaaaguuugcucaaacagagucuucugugacacaaugaacucucuaacacuaccuuccgaagugaaccucuguaacauagacauauucaauccaaaauaugauugcaaaauaaugacuucaaaaacagauguaucauccucuguuauaacaucauuaggcgccauaguuucaugcuacggaaaaacuaaaugcacagcaucaaacaaaaacaaaggaauaauaaaaaccuucucaaauggaugcgacuacguaagcaacaaaggcguagacacaguaucaguagguaauacauuauacuacguaaacaaacaagaaggacaaucacuuuauguuaaaggagaaccuauaauaaacuucuacgacccacuuguauuuccauccgaugaauuugacgcaucuauaucacaagucaacgaaaaaauaaaccaaucauuagcauucauucgaaaauccgaugaacuacuccauaacguaaaugucggaaaaucaacaaccaacauaaugaucacaacaauaaucauagugauaauaguaauacuccuacuacuaaucgcaguaggucuauuccuauauuguaaagcaagaucuacuccaguuacacucucuaaagaccaauuaagcgguaucaacaacaucgccuucagcaauuaaggacuaguguccaccugucccuccugggcugcuggauugucucguuuuccugccaaauaaacaggaucagcgcuuuacagaucuaaaaaaaaaaaaaaaaaaaaaaaaaaaaaaaaaaaaaaaaaaaaaaaaaaaaaaaaaaaaaaaaugcaucccccccccccccccccccccccccccccccaaaggcucuuuucagagccaccagaauu

SEQ ID NO: 17702 - RNA, 1897 nt, Artificial Sequence
  mRNA product Design b-3 comprising derived and/or modified sequence from HRSV(Memphis-37)__AIY60640.1__F_DSCav1_mut6 (opt11)
gggagagucccgcagucggcguccagcggcucugcuuguucgugugugugucguugcaggccuuauucaagcuuaccauggagcugcccauccucaagaccaacgccaucaccacgauccuggccgcggugacccugugcuucgcgagcucccaaaacaucaccgaggaguucuaccagagcacgugcuccgccgucagcaagggcuaccucggggcccugcgcaccggcugguacaccuccgugaucaccaucgagcugagcaacaucaaggaaaacaagugcaacgggacggacgcaaaggugaagcucaucaagcaggagcuggauaaguacaagaacgcggucacggaccugcagaugcucaugugcuccaccccggccgccggcagcggguccgccaucgcguccggcaucgccgugugcaagguguugcaccuggagggcgaggucaacaagaucaagaacgcccuccuuuccaccaauaaggcuguugugagccuguccaacggggucagcgugcucaccuucaaggugcuggaccugaagaacuacaucgacaagcagcuccugcccauccugaacaagcaguccugcagcauccccaaccccgagacagucauggaguuccagcagaagaacaaccggcuccuggagaucacccgcgaguucuccguuaacgccggggugaccaccccgguaagcacauacaugcugaccaacagcgagcuccugagccugaucaacgacaugcccaucaccaacgaccagaagaagcucaugagcaacaacgugcagaucgugcggcagcaguccuacagcaucaugugcaucaucaaggaggagguccuggcguacguggugcaacugccccucuacggggucaucgacacccccugcuggaagcugcacacguccccgcugugcaccaccaacaccaaggagggcagcaacaucugccucacgcgcaccgaccgggggugguacugcgacaacgcaggcuccgugagcuucuucccccaggccgagaccugcaaggugugcuccaaccgcgucuucugcgacaccaugaacagccugacgcugcccuccgaggugaaccucugcaacaucgacaucuucaaccccaaguacgacuguaagaucaugaccagcaagaccgaugucuccagcuccgugaucaccagccugggcgccauaguguccuguuaugggaagacgaagugcaccgccagcaacaagaacaaaggcaucaucaagaccuucuccaacgggugcgacuacgucagcaacaagggcguggacacaguguccgucggcaacacgcuguacuacgugaacaagcaggaggggcagagccucuacgugaagggcgagccgaucaucaacuucuacgauccccuggucuuccccagcgacgaguucgacgcguccaucagccaagugaacgagaagaucaaccagucccuggccuucauccgcaagagcgacgagcuccugcacaacgugaacgucgggaaguccaccaccaacaucaugaucaccaccaucaucaucgugaucaucgucauccugcuccugcugaucgccgucggccucuuccuguacugcaaggcccggagcacgcccgugacccuguccaaggaccagcugucgggcaucaacaacaucgccuucuccaacugaggacuaguguccaccugucccuccugggcugcuggauugucucguuuuccugccaaauaaacaggaucagcgcuuuacagaucuaaaaaaaaaaaaaaaaaaaaaaaaaaaaaaaaaaaaaaaaaaaaaaaaaaaaaaaaaaaaaaaaugcaucccccccccccccccccccccccccccccccaaaggcucuuuucagagccaccagaauu

SEQ ID NO: 17703 - RNA, 1948 nt, Artificial Sequence
  mRNA product Design b-4 comprising derived and/or modified sequence from HRSV(Memphis-37)__AIY60640.1__F_DSCav1_mut6 (opt1)
gggagagucccgcagucggcguccagcggcucugcuuguucgugugugugucguugcaggccuuauucaagcuuaccauggagcugcccauccucaagaccaacgccaucaccacgauccuggccgcggugacccugugcuucgccagcucccagaacaucaccgaggaguucuaccagagcacgugcuccgccgucagcaagggcuaccucggcgcccugcgcaccgggugguacaccagcgugaucaccaucgagcuguccaacaucaaggagaacaagugcaacggcaccgacgccaaggugaagcucaucaagcaggagcuggacaaguacaagaacgcggucacggaccugcagaugcugaugugcagcaccccggccgccggcuccgggagcgcgaucgccuccggcaucgccgucugcaaggugcugcaccucgagggcgaggugaacaagaucaagaacgcccugcuguccaccaacaaggccgucgugagccucuccaacggggugagcguccugaccuucaaggugcuggaccucaagaacuacaucgacaagcagcugcugcccauccugaacaagcagagcugcuccauccccaaccccgagaccgucauggaguuccagcagaagaacaaccgccuccuggagaucacgcgggaguucagcgugaacgcgggcgugaccacccccgucuccaccuacaugcugacgaacagcgagcuccugucccugaucaacgacaugccgaucaccaacgaccagaagaagcucaugagcaacaacgugcagaucgugcgccagcaguccuacagcaucaugugcaucaucaaggaggagguccuggccuacguggugcagcugccccucuacggggucaucgacacccccugcuggaagcugcacaccagcccccugugcacgaccaacaccaaggagggcuccaacaucugccucacccggacggaccgcgggugguacugcgacaacgccggcagcguguccuucuucccgcaggccgagaccugcaaggucugcagcaaccggguguucugcgacaccaugaacucccugacccugcccagcgaggugaaccucugcaacaucgacaucuucaaccccaaguacgacugcaagaucaugacguccaagaccgacgucagcuccagcgugaucaccucccugggcgccaucgugagcugcuacgggaagaccaagugcacggcgagcaacaagaacaagggcaucaucaagaccuucuccaacgggugcgacuacgucagcaacaagggcguggacaccguguccgucggcaacacccuguacuacgugaacaagcaggagggccagagccucuacgugaagggggagcccaucaucaacuucuacgacccgcuggucuuccccuccgacgaguucgacgccagcaucucccaggugaacgagaagaucaaccagagccuggccuucauccggaaguccgacgagcuccugcacaacgugaacgucggcaagagcaccacgaacaucaugaucaccaccaucaucaucgugaucaucgugauccugcugcuccugaucgccgucgggcuguuccucuacugcaaggcccgcuccacccccgugacgcugagcaaggaccagcuguccgggaucaacaacaucgcguucagcaacugaggacuaguaauaaggaaacuguaugaaugucugugggcaggaagugaagagauccuucuguaaagguuuuuggaauuaugucugcugaauaauaaacuuuuuugaaauaauaaaucugguagaaaaaugagaucuaaaaaaaaaaaaaaaaaaaaaaaaaaaaaaaaaaaaaaaaaaaaaaaaaaaaaaaaaaaaaaaaugcaucccccccccccccccccccccccccccccccaaaggcucuuuucagagccaccagaauu

SEQ ID NO: 17704 - RNA, 1948 nt, Artificial Sequence
  mRNA product Design b-4 comprising derived and/or modified sequence from HRSV(Memphis-37)__AIY60640.1__F_DSCav1_mut6 (opt1)
gggagagucccgcagucggcguccagcggcucugcuuguucgugugugugucguugcaggccuuauucaagcuuaccauggagcugcccauccucaagaccaacgccaucaccacgauccuggccgcggugacccugugcuucgccagcucccagaacaucaccgaggaguucuaccagagcacgugcuccgccgucagcaagggcuaccucggggcccugcgcaccggcugguacaccuccgugaucaccaucgagcugagcaacaucaaggagaacaagugcaacgggaccgacgccaaggugaagcucaucaagcaggagcuggacaaguacaagaacgcggucacggaccugcagaugcucaugugcuccaccccggccgccggcagcggguccgccaucgcgagcggcaucgccgugugcaaggugcugcaccuggagggcgaggucaacaagaucaagaacgcccuccuguccaccaacaaggccguggugagccuguccaacggggucagcgugcucaccuucaaggugcuggaccugaagaacuacaucgacaagcagcuccugcccauccugaacaagcaguccugcagcauccccaaccccgagacggucauggaguuccagcagaagaacaaccggcuccuggagaucacccgcgaguucuccgugaacgccggcgugaccaccccggucagcacguacaugcugaccaacuccgagcuccugagccugaucaacgacaugcccaucaccaacgaccagaagaagcucaugagcaacaacgugcagaucgugcggcagcaguccuacagcaucaugugcaucaucaaggaggagguccuggcguacguggugcagcugccccucuacggggucaucgacacccccugcuggaagcugcacacguccccgcugugcaccaccaacaccaaggagggcagcaacaucugccucacgcgcaccgaccgggggugguacugcgacaacgccggcuccgugagcuucuucccccaggccgagaccugcaaggugugcuccaaccgcgucuucugcgacaccaugaacagccugacgcugcccuccgaggugaaccucugcaacaucgacaucuucaaccccaaguacgacugcaagaucaugaccagcaagaccgacgucuccagcuccgugaucaccagccugggcgccaucguguccugcuacgggaagacgaagugcaccgccagcaacaagaacaagggcaucaucaagaccuucuccaacgggugcgacuacgucagcaacaagggcguggacaccguguccgucggcaacacgcuguacuacgugaacaagcaggaggggcagagccucuacgugaagggcgagccgaucaucaacuucuacgacccccuggucuuccccagcgacgaguucgacgcguccaucagccaggugaacgagaagaucaaccagucccuggccuucauccgcaagagcgacgagcuccugcacaacgugaacgucgggaaguccaccaccaacaucaugaucaccaccaucaucaucgugaucaucgugauccugcuccugcugaucgccgucggccucuuccuguacugcaaggcccggagcacgcccgugacccuguccaaggaccagcugagcgggaucaacaacaucgccuucuccaacugaggacuaguaauaaggaaacuguaugaaugucugugggcaggaagugaagagauccuucuguaaagguuuuuggaauuaugucugcugaauaauaaacuuuuuugaaauaauaaaucugguagaaaaaugagaucuaaaaaaaaaaaaaaaaaaaaaaaaaaaaaaaaaaaaaaaaaaaaaaaaaaaaaaaaaaaaaaaaugcaucccccccccccccccccccccccccccccccaaaggcucuuuucagagccaccagaauu

SEQ ID NO: 17705 - RNA, 1948 nt, Artificial Sequence
  mRNA product Design b-4 comprising derived and/or modified sequence from HRSV(Memphis-37)__AIY60640.1__F_DSCav1_mut6 (opt2)
gggagagucccgcagucggcguccagcggcucugcuuguucgugugugugucguugcaggccuuauucaagcuuaccauggagcuccccauccucaagaccaacgccaucaccaccauccucgccgccgucacccucugcuucgccuccucccagaacaucaccgaggaguucuaccaguccaccugcuccgccgucuccaagggcuaccucggcgcccuccgcaccggcugguacaccuccgucaucaccaucgagcucuccaacaucaaggagaacaagugcaacggcaccgacgccaaggucaagcucaucaagcaggagcucgacaaguacaagaacgccgucaccgaccuccagaugcucaugugcuccacccccgccgccggcuccggcuccgccaucgccuccggcaucgccgucugcaagguccuccaccucgagggcgaggucaacaagaucaagaacgcccuccucuccaccaacaaggccgucgucucccucuccaacggcgucuccguccucaccuucaagguccucgaccucaagaacuacaucgacaagcagcuccuccccauccucaacaagcaguccugcuccauccccaaccccgagaccgucauggaguuccagcagaagaacaaccgccuccucgagaucacccgcgaguucuccgucaacgccggcgucaccacccccgucuccaccuacaugcucaccaacuccgagcuccucucccucaucaacgacaugcccaucaccaacgaccagaagaagcucauguccaacaacguccagaucguccgccagcaguccuacuccaucaugugcaucaucaaggaggagguccucgccuacgucguccagcucccccucuacggcgucaucgacacccccugcuggaagcuccacaccuccccccucugcaccaccaacaccaaggagggcuccaacaucugccucacccgcaccgaccgcggcugguacugcgacaacgccggcuccgucuccuucuucccccaggccgagaccugcaaggucugcuccaaccgcgucuucugcgacaccaugaacucccucacccuccccuccgaggucaaccucugcaacaucgacaucuucaaccccaaguacgacugcaagaucaugaccuccaagaccgacgucuccuccuccgucaucaccucccucggcgccaucgucuccugcuacggcaagaccaagugcaccgccuccaacaagaacaagggcaucaucaagaccuucuccaacggcugcgacuacgucuccaacaagggcgucgacaccgucuccgucggcaacacccucuacuacgucaacaagcaggagggccagucccucuacgucaagggcgagcccaucaucaacuucuacgacccccucgucuuccccuccgacgaguucgacgccuccaucucccaggucaacgagaagaucaaccagucccucgccuucauccgcaaguccgacgagcuccuccacaacgucaacgucggcaaguccaccaccaacaucaugaucaccaccaucaucaucgucaucaucgucauccuccuccuccucaucgccgucggccucuuccucuacugcaaggcccgcuccacccccgucacccucuccaaggaccagcucuccggcaucaacaacaucgccuucuccaacugaggacuaguaauaaggaaacuguaugaaugucugugggcaggaagugaagagauccuucuguaaagguuuuuggaauuaugucugcugaauaauaaacuuuuuugaaauaauaaaucugguagaaaaaugagaucuaaaaaaaaaaaaaaaaaaaaaaaaaaaaaaaaaaaaaaaaaaaaaaaaaaaaaaaaaaaaaaaaugcaucccccccccccccccccccccccccccccccaaaggcucuuuucagagccaccagaauu

SEQ ID NO: 17706 - RNA, 1948 nt, Artificial Sequence
  mRNA product Design b-4 comprising derived and/or modified sequence from HRSV(Memphis-37)__AIY60640.1__F_DSCav1_mut6 (opt3)
gggagagucccgcagucggcguccagcggcucugcuuguucgugugugugucguugcaggccuuauucaagcuuaccauggagcugcccauccucaagaccaacgccauuacaacuauacuugcugcagugacgcugugcuucgccagcucccagaauaucaccgaagaguuuuaccaaucuacauguucagcggucaguaaaggcuauuugggggcuuuaagaacuggaugguacaccagcguuauuacaaucgaacuguccaacauuaaggagaauaaaugcaacgguaccgacgccaaggugaaacuaaucaagcaggaacucgauaaguauaaaaaugcaguaacugaccugcagaugcuuauguguucuacuccugccgcuggcucggggucagcaauagccagcggaaucgcugugugcaagguccugcacuuggagggcgaggugaacaaaauuaagaaugcccuccugaguaccaacaaagcgguugugucccugucuaauggugucagcgugcucacguucaagguauuagaucugaagaacuacaucgacaaacagcuuuugccaauucugaauaagcaauccuguucaaucccgaaccccgaaacuguuauggaguuucagcagaaaaauaacaggcuacucgaaauaacccgggaguucagugugaaugcaggggucacaacuccugugagcaccuauaugcugacaaacucugagcuucuguccuugauuaacgauaugccaaucaccaaugaccagaagaaacucaugucaaacaaugugcaaauuguccgccagcagagcuacaguaucaugugcaucauuaaggaagagguucuggccuaugugguacaguuaccccuguacggagugauagauacgccuuguuggaaacuccauacuucuccacuuugcacaaccaacacuaaggaaggcuccaauaucugucugacacgaaccgaccguggcugguacugcgauaacgcugggagcgucucguuuuucccccaagccgagacguguaaggugugcucuaauagaguuuucugcgacaccaugaacuccuugacacuaccuucagaagugaaucuguguaacauugauaucuucaauccaaaauaugacugcaagauaaugacaaguaaaaccgaugucagcuccucugugauuacaagccucggagcaaucguaucauguuacgguaagacuaaaugcaccgcuaguaacaagaauaagggcaucauuaaaacauuuuccaacgggugugacuauguuagcaauaagggaguggacaccgucucugugggcaacacucuguacuaugucaacaaacaggagggucagucacuuuacgugaagggggagccgaucauuaauuucuaugauccccugguuuuuccuagugacgaauuugaugccagcauaucccaagugaacgagaaaaucaaucagucuuuggcguuuauuaggaagucggacgaacuccugcacaacguaaaugucggaaagagcacgacaaacaucaugaucaccacuauuauaaucgugauuaucguuauuuuacugcuacucaucgccgugggccuguuccuuuacugcaaagcacgguccaccccagucacauugucaaaggaucagcugaguggcauaaauaacaucgcuuucucuaauugaggacuaguaauaaggaaacuguaugaaugucugugggcaggaagugaagagauccuucuguaaagguuuuuggaauuaugucugcugaauaauaaacuuuuuugaaauaauaaaucugguagaaaaaugagaucuaaaaaaaaaaaaaaaaaaaaaaaaaaaaaaaaaaaaaaaaaaaaaaaaaaaaaaaaaaaaaaaaugcaucccccccccccccccccccccccccccccccaaaggcucuuuucagagccaccagaauu

SEQ ID NO: 17707 - RNA, 1948 nt, Artificial Sequence
  mRNA product Design b-4 comprising derived and/or modified sequence from HRSV(Memphis-37)__AIY60640.1__F_DSCav1_mut6 (opt4)
gggagagucccgcagucggcguccagcggcucugcuuguucgugugugugucguugcaggccuuauucaagcuuaccauggagcugcccauccugaagaccaacgccaucaccaccauccuggccgccgugacccugugcuucgccagcagccagaacaucaccgaggaguucuaccagagcaccugcagcgccgugagcaagggcuaccugggcgcccugagaaccggcugguacaccagcgugaucaccaucgagcugagcaacaucaaggagaacaagugcaacggcaccgacgccaaggugaagcugaucaagcaggagcuggacaaguacaagaacgccgugaccgaccugcagaugcugaugugcagcacccccgccgccggcagcggcagcgccaucgccagcggcaucgccgugugcaaggugcugcaccuggagggcgaggugaacaagaucaagaacgcccugcugagcaccaacaaggccguggugagccugagcaacggcgugagcgugcugaccuucaaggugcuggaccugaagaacuacaucgacaagcagcugcugcccauccugaacaagcagagcugcagcauccccaaccccgagaccgugauggaguuccagcagaagaacaacagacugcuggagaucaccagagaguucagcgugaacgccggcgugaccacccccgugagcaccuacaugcugaccaacagcgagcugcugagccugaucaacgacaugcccaucaccaacgaccagaagaagcugaugagcaacaacgugcagaucgugagacagcagagcuacagcaucaugugcaucaucaaggaggaggugcuggccuacguggugcagcugccccuguacggcgugaucgacacccccugcuggaagcugcacaccagcccccugugcaccaccaacaccaaggagggcagcaacaucugccugaccagaaccgacagaggcugguacugcgacaacgccggcagcgugagcuucuucccccaggccgagaccugcaaggugugcagcaacagaguguucugcgacaccaugaacagccugacccugcccagcgaggugaaccugugcaacaucgacaucuucaaccccaaguacgacugcaagaucaugaccagcaagaccgacgugagcagcagcgugaucaccagccugggcgccaucgugagcugcuacggcaagaccaagugcaccgccagcaacaagaacaagggcaucaucaagaccuucagcaacggcugcgacuacgugagcaacaagggcguggacaccgugagcgugggcaacacccuguacuacgugaacaagcaggagggccagagccuguacgugaagggcgagcccaucaucaacuucuacgacccccugguguuccccagcgacgaguucgacgccagcaucagccaggugaacgagaagaucaaccagagccuggccuucaucagaaagagcgacgagcugcugcacaacgugaacgugggcaagagcaccaccaacaucaugaucaccaccaucaucaucgugaucaucgugauccugcugcugcugaucgccgugggccuguuccuguacugcaaggccagaagcacccccgugacccugagcaaggaccagcugagcggcaucaacaacaucgccuucagcaacugaggacuaguaauaaggaaacuguaugaaugucugugggcaggaagugaagagauccuucuguaaagguuuuuggaauuaugucugcugaauaauaaacuuuuuugaaauaauaaaucugguagaaaaaugagaucuaaaaaaaaaaaaaaaaaaaaaaaaaaaaaaaaaaaaaaaaaaaaaaaaaaaaaaaaaaaaaaaaugcaucccccccccccccccccccccccccccccccaaaggcucuuuucagagccaccagaauu

SEQ ID NO: 17708 - RNA, 1948 nt, Artificial Sequence
  mRNA product Design b-4 comprising derived and/or modified sequence from HRSV(Memphis-37)__AIY60640.1__F_DSCav1_mut6 (opt5)
gggagagucccgcagucggcguccagcggcucugcuuguucgugugugugucguugcaggccuuauucaagcuuaccauggagcugcccauccucaagaccaacgccauuacaacgauccuggcugccgugacccuuugcuucgcgagcucccagaauauuacagaagaguuuuaccaaucuaccuguagcgcugucuccaaaggcuaucugggggcccucagaacaggaugguacaccucuguuaucacaauugaacugagcaacaucaaggagaauaaaugcaacggcaccgacgccaaggugaaacuuaucaagcaggaacuggauaaguauaaaaaugcugugacggaccuccagaugcugauguguuccaccccugccgcugggucuggaagcgccauugcguccggcaucgccgucugcaaggugcugcaccucgagggggagguuaacaaaauuaagaaugcucugcuuagcacaaacaaagccguggucucucuguccaauggagugagcguucucaccuucaaggugcuggaucuuaagaacuacaucgacaaacagcugcucccgauucugaauaagcaaucuuguuccauccccaacccugaaacagucauggaguuucagcagaaaaauaaccggcugcucgaaauuacccgcgaguucagcgugaaugcuggcgugacgacacccgucucuaccuauaugcugacaaacuccgagcuucugagccucaucaacgauaugccuaucaccaaugaccagaagaaacugauguccaacaauguucaaauugugagacagcagucuuacagcaucaugugcauuaucaaggaagaggugcuugccuaugucgugcagcugccccucuacggcguuauugauaccccuuguuggaaacugcauacauccccgcugugcacgaccaacacaaaggaagggagcaauaucugucucacccggacagaccgcggaugguacugcgauaacgcgggcucuguguccuuuuucccccaagccgagaccuguaaggucugcagcaauagaguguuuugcgacacgaugaacucucugacacuuccuagcgaaguuaaucuguguaacaucgauauuuucaaucccaaauaugacugcaagaucaugaccuccaaaaccgaugugucuagcuccgucauuacaagccucggggcuaucgugucuuguuacggaaagaccaaaugcacagccuccaacaagaauaagggcauuaucaaaacguuuagcaacgggugugacuaugucucuaauaagggaguggacaccguuuccgugggcaacacacuguacuaugucaacaaacaggagggccagagccuuuacgugaagggggagccuaucauuaauuucuaugauccccugguuuuuccguccgacgaauuugaugcuucuaucagccaagugaacgagaaaauuaaucagucccucgccuucauccggaagucugacgaacugcugcacaacgucaaugugggaaagagcaccacaaacauuaugaucaccacgauuaucaucgugauuaucguuauucuccugcuucugaucgccgucggccucuuccuguacugcaaagcucgcuccaccccugugacacugagcaaggaucagcuuucugggauuaauaacaucgcguucuccaauugaggacuaguaauaaggaaacuguaugaaugucugugggcaggaagugaagagauccuucuguaaagguuuuuggaauuaugucugcugaauaauaaacuuuuuugaaauaauaaaucugguagaaaaaugagaucuaaaaaaaaaaaaaaaaaaaaaaaaaaaaaaaaaaaaaaaaaaaaaaaaaaaaaaaaaaaaaaaaugcaucccccccccccccccccccccccccccccccaaaggcucuuuucagagccaccagaauu

SEQ ID NO: 17709 - RNA, 1948 nt, Artificial Sequence
  mRNA product Design b-4 comprising derived and/or modified sequence from HRSV(Memphis-37)__AIY60640.1__F_DSCav1_mut6 (opt6)
gggagagucccgcagucggcguccagcggcucugcuuguucgugugugugucguugcaggccuuauucaagcuuaccauggaacuaccaauuuuaaaaacaaacgcaauuacaacuauacucgcagcaguaacauuauguuucgccucaucccaaaacauaacagaagaauuuuaccaaucaacaugcagcgcaguaucaaaaggauaucucggagcauuacgaacagguugguacacaucuguaaucacuauagaacuaucaaacauaaaagaaaacaaaugcaauggaaccgacgcaaaaguaaaauuaauaaaacaagaacucgauaaauacaaaaaugcaguaacagaccuccaaaugcucauguguucaacaccagccgcaggaucagguuccgccauagcaucuggcauagcaguaugcaaaguacuccacuuagaaggagaaguuaacaaaauaaaaaacgcacuauuaucaacaaacaaagcaguaguaucccucucaaacggagucucaguauuaacauucaaaguauuagaccuaaaaaacuacauagacaaacaacuacuuccaauacucaacaaacaaucaugcucaauaccaaacccagaaaccguaauggaauuucaacaaaaaaacaaccgacuacuagaaaucacacgagaauuuucaguaaacgccggugucacaacuccaguaucaacuuauauguuaaccaacucagaacuauuaucauuaauaaacgauaugcccauaacuaacgaccaaaaaaaauuaaugucaaacaacguacaaauaguacgccaacaaaguuacucaauaaugugcaucauaaaagaagaaguauuagcguacguuguacaacuaccucuauacggagucauagacacaccaugcuggaaacuucacacaucaccacuauguacaacaaacacaaaagaaggcaguaacauaugccuaacaagaacagaccguggaugguauugugacaacgcuggaucuguaucauucuucccucaagcagaaaccuguaaaguuugcucaaacagagucuucugugacacaaugaacucucuaacacuaccuuccgaagugaaccucuguaacauagacauauucaauccaaaauaugauugcaaaauaaugacuucaaaaacagauguaucauccucuguuauaacaucauuaggcgccauaguuucaugcuacggaaaaacuaaaugcacagcaucaaacaaaaacaaaggaauaauaaaaaccuucucaaauggaugcgacuacguaagcaacaaaggcguagacacaguaucaguagguaauacauuauacuacguaaacaaacaagaaggacaaucacuuuauguuaaaggagaaccuauaauaaacuucuacgacccacuuguauuuccauccgaugaauuugacgcaucuauaucacaagucaacgaaaaaauaaaccaaucauuagcauucauucgaaaauccgaugaacuacuccauaacguaaaugucggaaaaucaacaaccaacauaaugaucacaacaauaaucauagugauaauaguaauacuccuacuacuaaucgcaguaggucuauuccuauauuguaaagcaagaucuacuccaguuacacucucuaaagaccaauuaagcgguaucaacaacaucgccuucagcaauuaaggacuaguaauaaggaaacuguaugaaugucugugggcaggaagugaagagauccuucuguaaagguuuuuggaauuaugucugcugaauaauaaacuuuuuugaaauaauaaaucugguagaaaaaugagaucuaaaaaaaaaaaaaaaaaaaaaaaaaaaaaaaaaaaaaaaaaaaaaaaaaaaaaaaaaaaaaaaaugcaucccccccccccccccccccccccccccccccaaaggcucuuuucagagccaccagaauu

SEQ ID NO: 17710 - RNA, 1948 nt, Artificial Sequence
  mRNA product Design b-4 comprising derived and/or modified sequence from HRSV(Memphis-37)__AIY60640.1__F_DSCav1_mut6 (opt11)
gggagagucccgcagucggcguccagcggcucugcuuguucgugugugugucguugcaggccuuauucaagcuuaccauggagcugcccauccucaagaccaacgccaucaccacgauccuggccgcggugacccugugcuucgcgagcucccaaaacaucaccgaggaguucuaccagagcacgugcuccgccgucagcaagggcuaccucggggcccugcgcaccggcugguacaccuccgugaucaccaucgagcugagcaacaucaaggaaaacaagugcaacgggacggacgcaaaggugaagcucaucaagcaggagcuggauaaguacaagaacgcggucacggaccugcagaugcucaugugcuccaccccggccgccggcagcggguccgccaucgcguccggcaucgccgugugcaagguguugcaccuggagggcgaggucaacaagaucaagaacgcccuccuuuccaccaauaaggcuguugugagccuguccaacggggucagcgugcucaccuucaaggugcuggaccugaagaacuacaucgacaagcagcuccugcccauccugaacaagcaguccugcagcauccccaaccccgagacagucauggaguuccagcagaagaacaaccggcuccuggagaucacccgcgaguucuccguuaacgccggggugaccaccccgguaagcacauacaugcugaccaacagcgagcuccugagccugaucaacgacaugcccaucaccaacgaccagaagaagcucaugagcaacaacgugcagaucgugcggcagcaguccuacagcaucaugugcaucaucaaggaggagguccuggcguacguggugcaacugccccucuacggggucaucgacacccccugcuggaagcugcacacguccccgcugugcaccaccaacaccaaggagggcagcaacaucugccucacgcgcaccgaccgggggugguacugcgacaacgcaggcuccgugagcuucuucccccaggccgagaccugcaaggugugcuccaaccgcgucuucugcgacaccaugaacagccugacgcugcccuccgaggugaaccucugcaacaucgacaucuucaaccccaaguacgacuguaagaucaugaccagcaagaccgaugucuccagcuccgugaucaccagccugggcgccauaguguccuguuaugggaagacgaagugcaccgccagcaacaagaacaaaggcaucaucaagaccuucuccaacgggugcgacuacgucagcaacaagggcguggacacaguguccgucggcaacacgcuguacuacgugaacaagcaggaggggcagagccucuacgugaagggcgagccgaucaucaacuucuacgauccccuggucuuccccagcgacgaguucgacgcguccaucagccaagugaacgagaagaucaaccagucccuggccuucauccgcaagagcgacgagcuccugcacaacgugaacgucgggaaguccaccaccaacaucaugaucaccaccaucaucaucgugaucaucgucauccugcuccugcugaucgccgucggccucuuccuguacugcaaggcccggagcacgcccgugacccuguccaaggaccagcugucgggcaucaacaacaucgccuucuccaacugaggacuaguaauaaggaaacuguaugaaugucugugggcaggaagugaagagauccuucuguaaagguuuuuggaauuaugucugcugaauaauaaacuuuuuugaaauaauaaaucugguagaaaaaugagaucuaaaaaaaaaaaaaaaaaaaaaaaaaaaaaaaaaaaaaaaaaaaaaaaaaaaaaaaaaaaaaaaaugcaucccccccccccccccccccccccccccccccaaaggcucuuuucagagccaccagaauu

SEQ ID NO: 17711 - RNA, 2010 nt, Artificial Sequence
  mRNA product Design b-5 comprising derived and/or modified sequence from HRSV(Memphis-37)__AIY60640.1__F_DSCav1_mut6 (opt1)
gggagacuccugucgggcggaaguaggaggaguagaguuuaaaaacaguacucuuuuuccgguucgggacguaguugaagcaacgacaagccggauaaccgcucuugagacaggaagcuuaccauggagcugcccauccucaagaccaacgccaucaccacgauccuggccgcggugacccugugcuucgccagcucccagaacaucaccgaggaguucuaccagagcacgugcuccgccgucagcaagggcuaccucggcgcccugcgcaccgggugguacaccagcgugaucaccaucgagcuguccaacaucaaggagaacaagugcaacggcaccgacgccaaggugaagcucaucaagcaggagcuggacaaguacaagaacgcggucacggaccugcagaugcugaugugcagcaccccggccgccggcuccgggagcgcgaucgccuccggcaucgccgucugcaaggugcugcaccucgagggcgaggugaacaagaucaagaacgcccugcuguccaccaacaaggccgucgugagccucuccaacggggugagcguccugaccuucaaggugcuggaccucaagaacuacaucgacaagcagcugcugcccauccugaacaagcagagcugcuccauccccaaccccgagaccgucauggaguuccagcagaagaacaaccgccuccuggagaucacgcgggaguucagcgugaacgcgggcgugaccacccccgucuccaccuacaugcugacgaacagcgagcuccugucccugaucaacgacaugccgaucaccaacgaccagaagaagcucaugagcaacaacgugcagaucgugcgccagcaguccuacagcaucaugugcaucaucaaggaggagguccuggccuacguggugcagcugccccucuacggggucaucgacacccccugcuggaagcugcacaccagcccccugugcacgaccaacaccaaggagggcuccaacaucugccucacccggacggaccgcgggugguacugcgacaacgccggcagcguguccuucuucccgcaggccgagaccugcaaggucugcagcaaccggguguucugcgacaccaugaacucccugacccugcccagcgaggugaaccucugcaacaucgacaucuucaaccccaaguacgacugcaagaucaugacguccaagaccgacgucagcuccagcgugaucaccucccugggcgccaucgugagcugcuacgggaagaccaagugcacggcgagcaacaagaacaagggcaucaucaagaccuucuccaacgggugcgacuacgucagcaacaagggcguggacaccguguccgucggcaacacccuguacuacgugaacaagcaggagggccagagccucuacgugaagggggagcccaucaucaacuucuacgacccgcuggucuuccccuccgacgaguucgacgccagcaucucccaggugaacgagaagaucaaccagagccuggccuucauccggaaguccgacgagcuccugcacaacgugaacgucggcaagagcaccacgaacaucaugaucaccaccaucaucaucgugaucaucgugauccugcugcuccugaucgccgucgggcuguuccucuacugcaaggcccgcuccacccccgugacgcugagcaaggaccagcuguccgggaucaacaacaucgcguucagcaacugaggacuaguacuggcugcaucucccuuuccucuguccuccauccuucucccaggauggugaagggggaccugguacccagugauccccaccccaggauccuaaaucaugacuuaccugcuaauaaaaacucauuggaaaagugagaagaucuaaaaaaaaaaaaaaaaaaaaaaaaaaaaaaaaaaaaaaaaaaaaaaaaaaaaaaaaaaaaaaaaugcaucccccccccccccccccccccccccccccccaaaggcucuuuucagagccaccagaauu

SEQ ID NO: 17712 - RNA, 2010 nt, Artificial Sequence
  mRNA product Design b-5 comprising derived and/or modified sequence from HRSV(Memphis-37)__AIY60640.1__F_DSCav1_mut6 (opt1)
gggagacuccugucgggcggaaguaggaggaguagaguuuaaaaacaguacucuuuuuccgguucgggacguaguugaagcaacgacaagccggauaaccgcucuugagacaggaagcuuaccauggagcugcccauccucaagaccaacgccaucaccacgauccuggccgcggugacccugugcuucgccagcucccagaacaucaccgaggaguucuaccagagcacgugcuccgccgucagcaagggcuaccucggggcccugcgcaccggcugguacaccuccgugaucaccaucgagcugagcaacaucaaggagaacaagugcaacgggaccgacgccaaggugaagcucaucaagcaggagcuggacaaguacaagaacgcggucacggaccugcagaugcucaugugcuccaccccggccgccggcagcggguccgccaucgcgagcggcaucgccgugugcaaggugcugcaccuggagggcgaggucaacaagaucaagaacgcccuccuguccaccaacaaggccguggugagccuguccaacggggucagcgugcucaccuucaaggugcuggaccugaagaacuacaucgacaagcagcuccugcccauccugaacaagcaguccugcagcauccccaaccccgagacggucauggaguuccagcagaagaacaaccggcuccuggagaucacccgcgaguucuccgugaacgccggcgugaccaccccggucagcacguacaugcugaccaacuccgagcuccugagccugaucaacgacaugcccaucaccaacgaccagaagaagcucaugagcaacaacgugcagaucgugcggcagcaguccuacagcaucaugugcaucaucaaggaggagguccuggcguacguggugcagcugccccucuacggggucaucgacacccccugcuggaagcugcacacguccccgcugugcaccaccaacaccaaggagggcagcaacaucugccucacgcgcaccgaccgggggugguacugcgacaacgccggcuccgugagcuucuucccccaggccgagaccugcaaggugugcuccaaccgcgucuucugcgacaccaugaacagccugacgcugcccuccgaggugaaccucugcaacaucgacaucuucaaccccaaguacgacugcaagaucaugaccagcaagaccgacgucuccagcuccgugaucaccagccugggcgccaucguguccugcuacgggaagacgaagugcaccgccagcaacaagaacaagggcaucaucaagaccuucuccaacgggugcgacuacgucagcaacaagggcguggacaccguguccgucggcaacacgcuguacuacgugaacaagcaggaggggcagagccucuacgugaagggcgagccgaucaucaacuucuacgacccccuggucuuccccagcgacgaguucgacgcguccaucagccaggugaacgagaagaucaaccagucccuggccuucauccgcaagagcgacgagcuccugcacaacgugaacgucgggaaguccaccaccaacaucaugaucaccaccaucaucaucgugaucaucgugauccugcuccugcugaucgccgucggccucuuccuguacugcaaggcccggagcacgcccgugacccuguccaaggaccagcugagcgggaucaacaacaucgccuucuccaacugaggacuaguacuggcugcaucucccuuuccucuguccuccauccuucucccaggauggugaagggggaccugguacccagugauccccaccccaggauccuaaaucaugacuuaccugcuaauaaaaacucauuggaaaagugagaagaucuaaaaaaaaaaaaaaaaaaaaaaaaaaaaaaaaaaaaaaaaaaaaaaaaaaaaaaaaaaaaaaaaugcaucccccccccccccccccccccccccccccccaaaggcucuuuucagagccaccagaauu

SEQ ID NO: 17713 - RNA, 2010 nt, Artificial Sequence
  mRNA product Design b-5 comprising derived and/or modified sequence from HRSV(Memphis-37)__AIY60640.1__F_DSCav1_mut6 (opt2)
gggagacuccugucgggcggaaguaggaggaguagaguuuaaaaacaguacucuuuuuccgguucgggacguaguugaagcaacgacaagccggauaaccgcucuugagacaggaagcuuaccauggagcuccccauccucaagaccaacgccaucaccaccauccucgccgccgucacccucugcuucgccuccucccagaacaucaccgaggaguucuaccaguccaccugcuccgccgucuccaagggcuaccucggcgcccuccgcaccggcugguacaccuccgucaucaccaucgagcucuccaacaucaaggagaacaagugcaacggcaccgacgccaaggucaagcucaucaagcaggagcucgacaaguacaagaacgccgucaccgaccuccagaugcucaugugcuccacccccgccgccggcuccggcuccgccaucgccuccggcaucgccgucugcaagguccuccaccucgagggcgaggucaacaagaucaagaacgcccuccucuccaccaacaaggccgucgucucccucuccaacggcgucuccguccucaccuucaagguccucgaccucaagaacuacaucgacaagcagcuccuccccauccucaacaagcaguccugcuccauccccaaccccgagaccgucauggaguuccagcagaagaacaaccgccuccucgagaucacccgcgaguucuccgucaacgccggcgucaccacccccgucuccaccuacaugcucaccaacuccgagcuccucucccucaucaacgacaugcccaucaccaacgaccagaagaagcucauguccaacaacguccagaucguccgccagcaguccuacuccaucaugugcaucaucaaggaggagguccucgccuacgucguccagcucccccucuacggcgucaucgacacccccugcuggaagcuccacaccuccccccucugcaccaccaacaccaaggagggcuccaacaucugccucacccgcaccgaccgcggcugguacugcgacaacgccggcuccgucuccuucuucccccaggccgagaccugcaaggucugcuccaaccgcgucuucugcgacaccaugaacucccucacccuccccuccgaggucaaccucugcaacaucgacaucuucaaccccaaguacgacugcaagaucaugaccuccaagaccgacgucuccuccuccgucaucaccucccucggcgccaucgucuccugcuacggcaagaccaagugcaccgccuccaacaagaacaagggcaucaucaagaccuucuccaacggcugcgacuacgucuccaacaagggcgucgacaccgucuccgucggcaacacccucuacuacgucaacaagcaggagggccagucccucuacgucaagggcgagcccaucaucaacuucuacgacccccucgucuuccccuccgacgaguucgacgccuccaucucccaggucaacgagaagaucaaccagucccucgccuucauccgcaaguccgacgagcuccuccacaacgucaacgucggcaaguccaccaccaacaucaugaucaccaccaucaucaucgucaucaucgucauccuccuccuccucaucgccgucggccucuuccucuacugcaaggcccgcuccacccccgucacccucuccaaggaccagcucuccggcaucaacaacaucgccuucuccaacugaggacuaguacuggcugcaucucccuuuccucuguccuccauccuucucccaggauggugaagggggaccugguacccagugauccccaccccaggauccuaaaucaugacuuaccugcuaauaaaaacucauuggaaaagugagaagaucuaaaaaaaaaaaaaaaaaaaaaaaaaaaaaaaaaaaaaaaaaaaaaaaaaaaaaaaaaaaaaaaaugcaucccccccccccccccccccccccccccccccaaaggcucuuuucagagccaccagaauu

SEQ ID NO: 17714 - RNA, 2010 nt, Artificial Sequence
  mRNA product Design b-5 comprising derived and/or modified sequence from HRSV(Memphis-37)__AIY60640.1__F_DSCav1_mut6 (opt3)
gggagacuccugucgggcggaaguaggaggaguagaguuuaaaaacaguacucuuuuuccgguucgggacguaguugaagcaacgacaagccggauaaccgcucuugagacaggaagcuuaccauggagcugcccauccucaagaccaacgccauuacaacuauacuugcugcagugacgcugugcuucgccagcucccagaauaucaccgaagaguuuuaccaaucuacauguucagcggucaguaaaggcuauuugggggcuuuaagaacuggaugguacaccagcguuauuacaaucgaacuguccaacauuaaggagaauaaaugcaacgguaccgacgccaaggugaaacuaaucaagcaggaacucgauaaguauaaaaaugcaguaacugaccugcagaugcuuauguguucuacuccugccgcuggcucggggucagcaauagccagcggaaucgcugugugcaagguccugcacuuggagggcgaggugaacaaaauuaagaaugcccuccugaguaccaacaaagcgguugugucccugucuaauggugucagcgugcucacguucaagguauuagaucugaagaacuacaucgacaaacagcuuuugccaauucugaauaagcaauccuguucaaucccgaaccccgaaacuguuauggaguuucagcagaaaaauaacaggcuacucgaaauaacccgggaguucagugugaaugcaggggucacaacuccugugagcaccuauaugcugacaaacucugagcuucuguccuugauuaacgauaugccaaucaccaaugaccagaagaaacucaugucaaacaaugugcaaauuguccgccagcagagcuacaguaucaugugcaucauuaaggaagagguucuggccuaugugguacaguuaccccuguacggagugauagauacgccuuguuggaaacuccauacuucuccacuuugcacaaccaacacuaaggaaggcuccaauaucugucugacacgaaccgaccguggcugguacugcgauaacgcugggagcgucucguuuuucccccaagccgagacguguaaggugugcucuaauagaguuuucugcgacaccaugaacuccuugacacuaccuucagaagugaaucuguguaacauugauaucuucaauccaaaauaugacugcaagauaaugacaaguaaaaccgaugucagcuccucugugauuacaagccucggagcaaucguaucauguuacgguaagacuaaaugcaccgcuaguaacaagaauaagggcaucauuaaaacauuuuccaacgggugugacuauguuagcaauaagggaguggacaccgucucugugggcaacacucuguacuaugucaacaaacaggagggucagucacuuuacgugaagggggagccgaucauuaauuucuaugauccccugguuuuuccuagugacgaauuugaugccagcauaucccaagugaacgagaaaaucaaucagucuuuggcguuuauuaggaagucggacgaacuccugcacaacguaaaugucggaaagagcacgacaaacaucaugaucaccacuauuauaaucgugauuaucguuauuuuacugcuacucaucgccgugggccuguuccuuuacugcaaagcacgguccaccccagucacauugucaaaggaucagcugaguggcauaaauaacaucgcuuucucuaauugaggacuaguacuggcugcaucucccuuuccucuguccuccauccuucucccaggauggugaagggggaccugguacccagugauccccaccccaggauccuaaaucaugacuuaccugcuaauaaaaacucauuggaaaagugagaagaucuaaaaaaaaaaaaaaaaaaaaaaaaaaaaaaaaaaaaaaaaaaaaaaaaaaaaaaaaaaaaaaaaugcaucccccccccccccccccccccccccccccccaaaggcucuuuucagagccaccagaauu

SEQ ID NO: 17715 - RNA, 2010 nt, Artificial Sequence
  mRNA product Design b-5 comprising derived and/or modified sequence from HRSV(Memphis-37)__AIY60640.1__F_DSCav1_mut6 (opt4)
gggagacuccugucgggcggaaguaggaggaguagaguuuaaaaacaguacucuuuuuccgguucgggacguaguugaagcaacgacaagccggauaaccgcucuugagacaggaagcuuaccauggagcugcccauccugaagaccaacgccaucaccaccauccuggccgccgugacccugugcuucgccagcagccagaacaucaccgaggaguucuaccagagcaccugcagcgccgugagcaagggcuaccugggcgcccugagaaccggcugguacaccagcgugaucaccaucgagcugagcaacaucaaggagaacaagugcaacggcaccgacgccaaggugaagcugaucaagcaggagcuggacaaguacaagaacgccgugaccgaccugcagaugcugaugugcagcacccccgccgccggcagcggcagcgccaucgccagcggcaucgccgugugcaaggugcugcaccuggagggcgaggugaacaagaucaagaacgcccugcugagcaccaacaaggccguggugagccugagcaacggcgugagcgugcugaccuucaaggugcuggaccugaagaacuacaucgacaagcagcugcugcccauccugaacaagcagagcugcagcauccccaaccccgagaccgugauggaguuccagcagaagaacaacagacugcuggagaucaccagagaguucagcgugaacgccggcgugaccacccccgugagcaccuacaugcugaccaacagcgagcugcugagccugaucaacgacaugcccaucaccaacgaccagaagaagcugaugagcaacaacgugcagaucgugagacagcagagcuacagcaucaugugcaucaucaaggaggaggugcuggccuacguggugcagcugccccuguacggcgugaucgacacccccugcuggaagcugcacaccagcccccugugcaccaccaacaccaaggagggcagcaacaucugccugaccagaaccgacagaggcugguacugcgacaacgccggcagcgugagcuucuucccccaggccgagaccugcaaggugugcagcaacagaguguucugcgacaccaugaacagccugacccugcccagcgaggugaaccugugcaacaucgacaucuucaaccccaaguacgacugcaagaucaugaccagcaagaccgacgugagcagcagcgugaucaccagccugggcgccaucgugagcugcuacggcaagaccaagugcaccgccagcaacaagaacaagggcaucaucaagaccuucagcaacggcugcgacuacgugagcaacaagggcguggacaccgugagcgugggcaacacccuguacuacgugaacaagcaggagggccagagccuguacgugaagggcgagcccaucaucaacuucuacgacccccugguguuccccagcgacgaguucgacgccagcaucagccaggugaacgagaagaucaaccagagccuggccuucaucagaaagagcgacgagcugcugcacaacgugaacgugggcaagagcaccaccaacaucaugaucaccaccaucaucaucgugaucaucgugauccugcugcugcugaucgccgugggccuguuccuguacugcaaggccagaagcacccccgugacccugagcaaggaccagcugagcggcaucaacaacaucgccuucagcaacugaggacuaguacuggcugcaucucccuuuccucuguccuccauccuucucccaggauggugaagggggaccugguacccagugauccccaccccaggauccuaaaucaugacuuaccugcuaauaaaaacucauuggaaaagugagaagaucuaaaaaaaaaaaaaaaaaaaaaaaaaaaaaaaaaaaaaaaaaaaaaaaaaaaaaaaaaaaaaaaaugcaucccccccccccccccccccccccccccccccaaaggcucuuuucagagccaccagaauu

SEQ ID NO: 17716 - RNA, 2010 nt, Artificial Sequence
  mRNA product Design b-5 comprising derived and/or modified sequence from HRSV(Memphis-37)__AIY60640.1__F_DSCav1_mut6 (opt5)
gggagacuccugucgggcggaaguaggaggaguagaguuuaaaaacaguacucuuuuuccgguucgggacguaguugaagcaacgacaagccggauaaccgcucuugagacaggaagcuuaccauggagcugcccauccucaagaccaacgccauuacaacgauccuggcugccgugacccuuugcuucgcgagcucccagaauauuacagaagaguuuuaccaaucuaccuguagcgcugucuccaaaggcuaucugggggcccucagaacaggaugguacaccucuguuaucacaauugaacugagcaacaucaaggagaauaaaugcaacggcaccgacgccaaggugaaacuuaucaagcaggaacuggauaaguauaaaaaugcugugacggaccuccagaugcugauguguuccaccccugccgcugggucuggaagcgccauugcguccggcaucgccgucugcaaggugcugcaccucgagggggagguuaacaaaauuaagaaugcucugcuuagcacaaacaaagccguggucucucuguccaauggagugagcguucucaccuucaaggugcuggaucuuaagaacuacaucgacaaacagcugcucccgauucugaauaagcaaucuuguuccauccccaacccugaaacagucauggaguuucagcagaaaaauaaccggcugcucgaaauuacccgcgaguucagcgugaaugcuggcgugacgacacccgucucuaccuauaugcugacaaacuccgagcuucugagccucaucaacgauaugccuaucaccaaugaccagaagaaacugauguccaacaauguucaaauugugagacagcagucuuacagcaucaugugcauuaucaaggaagaggugcuugccuaugucgugcagcugccccucuacggcguuauugauaccccuuguuggaaacugcauacauccccgcugugcacgaccaacacaaaggaagggagcaauaucugucucacccggacagaccgcggaugguacugcgauaacgcgggcucuguguccuuuuucccccaagccgagaccuguaaggucugcagcaauagaguguuuugcgacacgaugaacucucugacacuuccuagcgaaguuaaucuguguaacaucgauauuuucaaucccaaauaugacugcaagaucaugaccuccaaaaccgaugugucuagcuccgucauuacaagccucggggcuaucgugucuuguuacggaaagaccaaaugcacagccuccaacaagaauaagggcauuaucaaaacguuuagcaacgggugugacuaugucucuaauaagggaguggacaccguuuccgugggcaacacacuguacuaugucaacaaacaggagggccagagccuuuacgugaagggggagccuaucauuaauuucuaugauccccugguuuuuccguccgacgaauuugaugcuucuaucagccaagugaacgagaaaauuaaucagucccucgccuucauccggaagucugacgaacugcugcacaacgucaaugugggaaagagcaccacaaacauuaugaucaccacgauuaucaucgugauuaucguuauucuccugcuucugaucgccgucggccucuuccuguacugcaaagcucgcuccaccccugugacacugagcaaggaucagcuuucugggauuaauaacaucgcguucuccaauugaggacuaguacuggcugcaucucccuuuccucuguccuccauccuucucccaggauggugaagggggaccugguacccagugauccccaccccaggauccuaaaucaugacuuaccugcuaauaaaaacucauuggaaaagugagaagaucuaaaaaaaaaaaaaaaaaaaaaaaaaaaaaaaaaaaaaaaaaaaaaaaaaaaaaaaaaaaaaaaaugcaucccccccccccccccccccccccccccccccaaaggcucuuuucagagccaccagaauu

SEQ ID NO: 17717 - RNA, 2010 nt, Artificial Sequence
  mRNA product Design b-5 comprising derived and/or modified sequence from HRSV(Memphis-37)__AIY60640.1__F_DSCav1_mut6 (opt6)
gggagacuccugucgggcggaaguaggaggaguagaguuuaaaaacaguacucuuuuuccgguucgggacguaguugaagcaacgacaagccggauaaccgcucuugagacaggaagcuuaccauggaacuaccaauuuuaaaaacaaacgcaauuacaacuauacucgcagcaguaacauuauguuucgccucaucccaaaacauaacagaagaauuuuaccaaucaacaugcagcgcaguaucaaaaggauaucucggagcauuacgaacagguugguacacaucuguaaucacuauagaacuaucaaacauaaaagaaaacaaaugcaauggaaccgacgcaaaaguaaaauuaauaaaacaagaacucgauaaauacaaaaaugcaguaacagaccuccaaaugcucauguguucaacaccagccgcaggaucagguuccgccauagcaucuggcauagcaguaugcaaaguacuccacuuagaaggagaaguuaacaaaauaaaaaacgcacuauuaucaacaaacaaagcaguaguaucccucucaaacggagucucaguauuaacauucaaaguauuagaccuaaaaaacuacauagacaaacaacuacuuccaauacucaacaaacaaucaugcucaauaccaaacccagaaaccguaauggaauuucaacaaaaaaacaaccgacuacuagaaaucacacgagaauuuucaguaaacgccggugucacaacuccaguaucaacuuauauguuaaccaacucagaacuauuaucauuaauaaacgauaugcccauaacuaacgaccaaaaaaaauuaaugucaaacaacguacaaauaguacgccaacaaaguuacucaauaaugugcaucauaaaagaagaaguauuagcguacguuguacaacuaccucuauacggagucauagacacaccaugcuggaaacuucacacaucaccacuauguacaacaaacacaaaagaaggcaguaacauaugccuaacaagaacagaccguggaugguauugugacaacgcuggaucuguaucauucuucccucaagcagaaaccuguaaaguuugcucaaacagagucuucugugacacaaugaacucucuaacacuaccuuccgaagugaaccucuguaacauagacauauucaauccaaaauaugauugcaaaauaaugacuucaaaaacagauguaucauccucuguuauaacaucauuaggcgccauaguuucaugcuacggaaaaacuaaaugcacagcaucaaacaaaaacaaaggaauaauaaaaaccuucucaaauggaugcgacuacguaagcaacaaaggcguagacacaguaucaguagguaauacauuauacuacguaaacaaacaagaaggacaaucacuuuauguuaaaggagaaccuauaauaaacuucuacgacccacuuguauuuccauccgaugaauuugacgcaucuauaucacaagucaacgaaaaaauaaaccaaucauuagcauucauucgaaaauccgaugaacuacuccauaacguaaaugucggaaaaucaacaaccaacauaaugaucacaacaauaaucauagugauaauaguaauacuccuacuacuaaucgcaguaggucuauuccuauauuguaaagcaagaucuacuccaguuacacucucuaaagaccaauuaagcgguaucaacaacaucgccuucagcaauuaaggacuaguacuggcugcaucucccuuuccucuguccuccauccuucucccaggauggugaagggggaccugguacccagugauccccaccccaggauccuaaaucaugacuuaccugcuaauaaaaacucauuggaaaagugagaagaucuaaaaaaaaaaaaaaaaaaaaaaaaaaaaaaaaaaaaaaaaaaaaaaaaaaaaaaaaaaaaaaaaugcaucccccccccccccccccccccccccccccccaaaggcucuuuucagagccaccagaauu

SEQ ID NO: 17718 - RNA, 2010 nt, Artificial Sequence
  mRNA product Design b-5 comprising derived and/or modified sequence from HRSV(Memphis-37)__AIY60640.1__F_DSCav1_mut6 (opt11)
gggagacuccugucgggcggaaguaggaggaguagaguuuaaaaacaguacucuuuuuccgguucgggacguaguugaagcaacgacaagccggauaaccgcucuugagacaggaagcuuaccauggagcugcccauccucaagaccaacgccaucaccacgauccuggccgcggugacccugugcuucgcgagcucccaaaacaucaccgaggaguucuaccagagcacgugcuccgccgucagcaagggcuaccucggggcccugcgcaccggcugguacaccuccgugaucaccaucgagcugagcaacaucaaggaaaacaagugcaacgggacggacgcaaaggugaagcucaucaagcaggagcuggauaaguacaagaacgcggucacggaccugcagaugcucaugugcuccaccccggccgccggcagcggguccgccaucgcguccggcaucgccgugugcaagguguugcaccuggagggcgaggucaacaagaucaagaacgcccuccuuuccaccaauaaggcuguugugagccuguccaacggggucagcgugcucaccuucaaggugcuggaccugaagaacuacaucgacaagcagcuccugcccauccugaacaagcaguccugcagcauccccaaccccgagacagucauggaguuccagcagaagaacaaccggcuccuggagaucacccgcgaguucuccguuaacgccggggugaccaccccgguaagcacauacaugcugaccaacagcgagcuccugagccugaucaacgacaugcccaucaccaacgaccagaagaagcucaugagcaacaacgugcagaucgugcggcagcaguccuacagcaucaugugcaucaucaaggaggagguccuggcguacguggugcaacugccccucuacggggucaucgacacccccugcuggaagcugcacacguccccgcugugcaccaccaacaccaaggagggcagcaacaucugccucacgcgcaccgaccgggggugguacugcgacaacgcaggcuccgugagcuucuucccccaggccgagaccugcaaggugugcuccaaccgcgucuucugcgacaccaugaacagccugacgcugcccuccgaggugaaccucugcaacaucgacaucuucaaccccaaguacgacuguaagaucaugaccagcaagaccgaugucuccagcuccgugaucaccagccugggcgccauaguguccuguuaugggaagacgaagugcaccgccagcaacaagaacaaaggcaucaucaagaccuucuccaacgggugcgacuacgucagcaacaagggcguggacacaguguccgucggcaacacgcuguacuacgugaacaagcaggaggggcagagccucuacgugaagggcgagccgaucaucaacuucuacgauccccuggucuuccccagcgacgaguucgacgcguccaucagccaagugaacgagaagaucaaccagucccuggccuucauccgcaagagcgacgagcuccugcacaacgugaacgucgggaaguccaccaccaacaucaugaucaccaccaucaucaucgugaucaucgucauccugcuccugcugaucgccgucggccucuuccuguacugcaaggcccggagcacgcccgugacccuguccaaggaccagcugucgggcaucaacaacaucgccuucuccaacugaggacuaguacuggcugcaucucccuuuccucuguccuccauccuucucccaggauggugaagggggaccugguacccagugauccccaccccaggauccuaaaucaugacuuaccugcuaauaaaaacucauuggaaaagugagaagaucuaaaaaaaaaaaaaaaaaaaaaaaaaaaaaaaaaaaaaaaaaaaaaaaaaaaaaaaaaaaaaaaaugcaucccccccccccccccccccccccccccccccaaaggcucuuuucagagccaccagaauu

SEQ ID NO: 17719 - RNA, 1916 nt, Artificial Sequence
  mRNA product Design c-1 comprising derived and/or modified sequence from HRSV(Memphis-37)__AIY60640.1__F_DSCav1_mut6 (opt1)
gggagaguccgcucagccagguugcagaagcggcuuagcguguguccuaaucuucucucugcguguagguaggccugugccgcaaacaagcuuaccauggagcugcccauccucaagaccaacgccaucaccacgauccuggccgcggugacccugugcuucgccagcucccagaacaucaccgaggaguucuaccagagcacgugcuccgccgucagcaagggcuaccucggcgcccugcgcaccgggugguacaccagcgugaucaccaucgagcuguccaacaucaaggagaacaagugcaacggcaccgacgccaaggugaagcucaucaagcaggagcuggacaaguacaagaacgcggucacggaccugcagaugcugaugugcagcaccccggccgccggcuccgggagcgcgaucgccuccggcaucgccgucugcaaggugcugcaccucgagggcgaggugaacaagaucaagaacgcccugcuguccaccaacaaggccgucgugagccucuccaacggggugagcguccugaccuucaaggugcuggaccucaagaacuacaucgacaagcagcugcugcccauccugaacaagcagagcugcuccauccccaaccccgagaccgucauggaguuccagcagaagaacaaccgccuccuggagaucacgcgggaguucagcgugaacgcgggcgugaccacccccgucuccaccuacaugcugacgaacagcgagcuccugucccugaucaacgacaugccgaucaccaacgaccagaagaagcucaugagcaacaacgugcagaucgugcgccagcaguccuacagcaucaugugcaucaucaaggaggagguccuggccuacguggugcagcugccccucuacggggucaucgacacccccugcuggaagcugcacaccagcccccugugcacgaccaacaccaaggagggcuccaacaucugccucacccggacggaccgcgggugguacugcgacaacgccggcagcguguccuucuucccgcaggccgagaccugcaaggucugcagcaaccggguguucugcgacaccaugaacucccugacccugcccagcgaggugaaccucugcaacaucgacaucuucaaccccaaguacgacugcaagaucaugacguccaagaccgacgucagcuccagcgugaucaccucccugggcgccaucgugagcugcuacgggaagaccaagugcacggcgagcaacaagaacaagggcaucaucaagaccuucuccaacgggugcgacuacgucagcaacaagggcguggacaccguguccgucggcaacacccuguacuacgugaacaagcaggagggccagagccucuacgugaagggggagcccaucaucaacuucuacgacccgcuggucuuccccuccgacgaguucgacgccagcaucucccaggugaacgagaagaucaaccagagccuggccuucauccggaaguccgacgagcuccugcacaacgugaacgucggcaagagcaccacgaacaucaugaucaccaccaucaucaucgugaucaucgugauccugcugcuccugaucgccgucgggcuguuccucuacugcaaggcccgcuccacccccgugacgcugagcaaggaccagcuguccgggaucaacaacaucgcguucagcaacugaggacuaguguccaccugucccuccugggcugcuggauugucucguuuuccugccaaauaaacaggaucagcgcuuuacagaucuaaaaaaaaaaaaaaaaaaaaaaaaaaaaaaaaaaaaaaaaaaaaaaaaaaaaaaaaaaaaaaaaugcaucccccccccccccccccccccccccccccccaaaggcucuuuucagagccaccagaauu

SEQ ID NO: 17720 - RNA, 1916 nt, Artificial Sequence
  mRNA product Design c-1 comprising derived and/or modified sequence from HRSV(Memphis-37)__AIY60640.1__F_DSCav1_mut6 (opt1)
gggagaguccgcucagccagguugcagaagcggcuuagcguguguccuaaucuucucucugcguguagguaggccugugccgcaaacaagcuuaccauggagcugcccauccucaagaccaacgccaucaccacgauccuggccgcggugacccugugcuucgccagcucccagaacaucaccgaggaguucuaccagagcacgugcuccgccgucagcaagggcuaccucggggcccugcgcaccggcugguacaccuccgugaucaccaucgagcugagcaacaucaaggagaacaagugcaacgggaccgacgccaaggugaagcucaucaagcaggagcuggacaaguacaagaacgcggucacggaccugcagaugcucaugugcuccaccccggccgccggcagcggguccgccaucgcgagcggcaucgccgugugcaaggugcugcaccuggagggcgaggucaacaagaucaagaacgcccuccuguccaccaacaaggccguggugagccuguccaacggggucagcgugcucaccuucaaggugcuggaccugaagaacuacaucgacaagcagcuccugcccauccugaacaagcaguccugcagcauccccaaccccgagacggucauggaguuccagcagaagaacaaccggcuccuggagaucacccgcgaguucuccgugaacgccggcgugaccaccccggucagcacguacaugcugaccaacuccgagcuccugagccugaucaacgacaugcccaucaccaacgaccagaagaagcucaugagcaacaacgugcagaucgugcggcagcaguccuacagcaucaugugcaucaucaaggaggagguccuggcguacguggugcagcugccccucuacggggucaucgacacccccugcuggaagcugcacacguccccgcugugcaccaccaacaccaaggagggcagcaacaucugccucacgcgcaccgaccgggggugguacugcgacaacgccggcuccgugagcuucuucccccaggccgagaccugcaaggugugcuccaaccgcgucuucugcgacaccaugaacagccugacgcugcccuccgaggugaaccucugcaacaucgacaucuucaaccccaaguacgacugcaagaucaugaccagcaagaccgacgucuccagcuccgugaucaccagccugggcgccaucguguccugcuacgggaagacgaagugcaccgccagcaacaagaacaagggcaucaucaagaccuucuccaacgggugcgacuacgucagcaacaagggcguggacaccguguccgucggcaacacgcuguacuacgugaacaagcaggaggggcagagccucuacgugaagggcgagccgaucaucaacuucuacgacccccuggucuuccccagcgacgaguucgacgcguccaucagccaggugaacgagaagaucaaccagucccuggccuucauccgcaagagcgacgagcuccugcacaacgugaacgucgggaaguccaccaccaacaucaugaucaccaccaucaucaucgugaucaucgugauccugcuccugcugaucgccgucggccucuuccuguacugcaaggcccggagcacgcccgugacccuguccaaggaccagcugagcgggaucaacaacaucgccuucuccaacugaggacuaguguccaccugucccuccugggcugcuggauugucucguuuuccugccaaauaaacaggaucagcgcuuuacagaucuaaaaaaaaaaaaaaaaaaaaaaaaaaaaaaaaaaaaaaaaaaaaaaaaaaaaaaaaaaaaaaaaugcaucccccccccccccccccccccccccccccccaaaggcucuuuucagagccaccagaauu

SEQ ID NO: 17721 - RNA, 1916 nt, Artificial Sequence
  mRNA product Design c-1 comprising derived and/or modified sequence from HRSV(Memphis-37)__AIY60640.1__F_DSCav1_mut6 (opt2)
gggagaguccgcucagccagguugcagaagcggcuuagcguguguccuaaucuucucucugcguguagguaggccugugccgcaaacaagcuuaccauggagcuccccauccucaagaccaacgccaucaccaccauccucgccgccgucacccucugcuucgccuccucccagaacaucaccgaggaguucuaccaguccaccugcuccgccgucuccaagggcuaccucggcgcccuccgcaccggcugguacaccuccgucaucaccaucgagcucuccaacaucaaggagaacaagugcaacggcaccgacgccaaggucaagcucaucaagcaggagcucgacaaguacaagaacgccgucaccgaccuccagaugcucaugugcuccacccccgccgccggcuccggcuccgccaucgccuccggcaucgccgucugcaagguccuccaccucgagggcgaggucaacaagaucaagaacgcccuccucuccaccaacaaggccgucgucucccucuccaacggcgucuccguccucaccuucaagguccucgaccucaagaacuacaucgacaagcagcuccuccccauccucaacaagcaguccugcuccauccccaaccccgagaccgucauggaguuccagcagaagaacaaccgccuccucgagaucacccgcgaguucuccgucaacgccggcgucaccacccccgucuccaccuacaugcucaccaacuccgagcuccucucccucaucaacgacaugcccaucaccaacgaccagaagaagcucauguccaacaacguccagaucguccgccagcaguccuacuccaucaugugcaucaucaaggaggagguccucgccuacgucguccagcucccccucuacggcgucaucgacacccccugcuggaagcuccacaccuccccccucugcaccaccaacaccaaggagggcuccaacaucugccucacccgcaccgaccgcggcugguacugcgacaacgccggcuccgucuccuucuucccccaggccgagaccugcaaggucugcuccaaccgcgucuucugcgacaccaugaacucccucacccuccccuccgaggucaaccucugcaacaucgacaucuucaaccccaaguacgacugcaagaucaugaccuccaagaccgacgucuccuccuccgucaucaccucccucggcgccaucgucuccugcuacggcaagaccaagugcaccgccuccaacaagaacaagggcaucaucaagaccuucuccaacggcugcgacuacgucuccaacaagggcgucgacaccgucuccgucggcaacacccucuacuacgucaacaagcaggagggccagucccucuacgucaagggcgagcccaucaucaacuucuacgacccccucgucuuccccuccgacgaguucgacgccuccaucucccaggucaacgagaagaucaaccagucccucgccuucauccgcaaguccgacgagcuccuccacaacgucaacgucggcaaguccaccaccaacaucaugaucaccaccaucaucaucgucaucaucgucauccuccuccuccucaucgccgucggccucuuccucuacugcaaggcccgcuccacccccgucacccucuccaaggaccagcucuccggcaucaacaacaucgccuucuccaacugaggacuaguguccaccugucccuccugggcugcuggauugucucguuuuccugccaaauaaacaggaucagcgcuuuacagaucuaaaaaaaaaaaaaaaaaaaaaaaaaaaaaaaaaaaaaaaaaaaaaaaaaaaaaaaaaaaaaaaaugcaucccccccccccccccccccccccccccccccaaaggcucuuuucagagccaccagaauu

SEQ ID NO: 17722 - RNA, 1916 nt, Artificial Sequence
  mRNA product Design c-1 comprising derived and/or modified sequence from HRSV(Memphis-37)__AIY60640.1__F_DSCav1_mut6 (opt3)
gggagaguccgcucagccagguugcagaagcggcuuagcguguguccuaaucuucucucugcguguagguaggccugugccgcaaacaagcuuaccauggagcugcccauccucaagaccaacgccauuacaacuauacuugcugcagugacgcugugcuucgccagcucccagaauaucaccgaagaguuuuaccaaucuacauguucagcggucaguaaaggcuauuugggggcuuuaagaacuggaugguacaccagcguuauuacaaucgaacuguccaacauuaaggagaauaaaugcaacgguaccgacgccaaggugaaacuaaucaagcaggaacucgauaaguauaaaaaugcaguaacugaccugcagaugcuuauguguucuacuccugccgcuggcucggggucagcaauagccagcggaaucgcugugugcaagguccugcacuuggagggcgaggugaacaaaauuaagaaugcccuccugaguaccaacaaagcgguugugucccugucuaauggugucagcgugcucacguucaagguauuagaucugaagaacuacaucgacaaacagcuuuugccaauucugaauaagcaauccuguucaaucccgaaccccgaaacuguuauggaguuucagcagaaaaauaacaggcuacucgaaauaacccgggaguucagugugaaugcaggggucacaacuccugugagcaccuauaugcugacaaacucugagcuucuguccuugauuaacgauaugccaaucaccaaugaccagaagaaacucaugucaaacaaugugcaaauuguccgccagcagagcuacaguaucaugugcaucauuaaggaagagguucuggccuaugugguacaguuaccccuguacggagugauagauacgccuuguuggaaacuccauacuucuccacuuugcacaaccaacacuaaggaaggcuccaauaucugucugacacgaaccgaccguggcugguacugcgauaacgcugggagcgucucguuuuucccccaagccgagacguguaaggugugcucuaauagaguuuucugcgacaccaugaacuccuugacacuaccuucagaagugaaucuguguaacauugauaucuucaauccaaaauaugacugcaagauaaugacaaguaaaaccgaugucagcuccucugugauuacaagccucggagcaaucguaucauguuacgguaagacuaaaugcaccgcuaguaacaagaauaagggcaucauuaaaacauuuuccaacgggugugacuauguuagcaauaagggaguggacaccgucucugugggcaacacucuguacuaugucaacaaacaggagggucagucacuuuacgugaagggggagccgaucauuaauuucuaugauccccugguuuuuccuagugacgaauuugaugccagcauaucccaagugaacgagaaaaucaaucagucuuuggcguuuauuaggaagucggacgaacuccugcacaacguaaaugucggaaagagcacgacaaacaucaugaucaccacuauuauaaucgugauuaucguuauuuuacugcuacucaucgccgugggccuguuccuuuacugcaaagcacgguccaccccagucacauugucaaaggaucagcugaguggcauaaauaacaucgcuuucucuaauugaggacuaguguccaccugucccuccugggcugcuggauugucucguuuuccugccaaauaaacaggaucagcgcuuuacagaucuaaaaaaaaaaaaaaaaaaaaaaaaaaaaaaaaaaaaaaaaaaaaaaaaaaaaaaaaaaaaaaaaugcaucccccccccccccccccccccccccccccccaaaggcucuuuucagagccaccagaauu

SEQ ID NO: 17723 - RNA, 1916 nt, Artificial Sequence
  mRNA product Design c-1 comprising derived and/or modified sequence from HRSV(Memphis-37)__AIY60640.1__F_DSCav1_mut6 (opt4)
gggagaguccgcucagccagguugcagaagcggcuuagcguguguccuaaucuucucucugcguguagguaggccugugccgcaaacaagcuuaccauggagcugcccauccugaagaccaacgccaucaccaccauccuggccgccgugacccugugcuucgccagcagccagaacaucaccgaggaguucuaccagagcaccugcagcgccgugagcaagggcuaccugggcgcccugagaaccggcugguacaccagcgugaucaccaucgagcugagcaacaucaaggagaacaagugcaacggcaccgacgccaaggugaagcugaucaagcaggagcuggacaaguacaagaacgccgugaccgaccugcagaugcugaugugcagcacccccgccgccggcagcggcagcgccaucgccagcggcaucgccgugugcaaggugcugcaccuggagggcgaggugaacaagaucaagaacgcccugcugagcaccaacaaggccguggugagccugagcaacggcgugagcgugcugaccuucaaggugcuggaccugaagaacuacaucgacaagcagcugcugcccauccugaacaagcagagcugcagcauccccaaccccgagaccgugauggaguuccagcagaagaacaacagacugcuggagaucaccagagaguucagcgugaacgccggcgugaccacccccgugagcaccuacaugcugaccaacagcgagcugcugagccugaucaacgacaugcccaucaccaacgaccagaagaagcugaugagcaacaacgugcagaucgugagacagcagagcuacagcaucaugugcaucaucaaggaggaggugcuggccuacguggugcagcugccccuguacggcgugaucgacacccccugcuggaagcugcacaccagcccccugugcaccaccaacaccaaggagggcagcaacaucugccugaccagaaccgacagaggcugguacugcgacaacgccggcagcgugagcuucuucccccaggccgagaccugcaaggugugcagcaacagaguguucugcgacaccaugaacagccugacccugcccagcgaggugaaccugugcaacaucgacaucuucaaccccaaguacgacugcaagaucaugaccagcaagaccgacgugagcagcagcgugaucaccagccugggcgccaucgugagcugcuacggcaagaccaagugcaccgccagcaacaagaacaagggcaucaucaagaccuucagcaacggcugcgacuacgugagcaacaagggcguggacaccgugagcgugggcaacacccuguacuacgugaacaagcaggagggccagagccuguacgugaagggcgagcccaucaucaacuucuacgacccccugguguuccccagcgacgaguucgacgccagcaucagccaggugaacgagaagaucaaccagagccuggccuucaucagaaagagcgacgagcugcugcacaacgugaacgugggcaagagcaccaccaacaucaugaucaccaccaucaucaucgugaucaucgugauccugcugcugcugaucgccgugggccuguuccuguacugcaaggccagaagcacccccgugacccugagcaaggaccagcugagcggcaucaacaacaucgccuucagcaacugaggacuaguguccaccugucccuccugggcugcuggauugucucguuuuccugccaaauaaacaggaucagcgcuuuacagaucuaaaaaaaaaaaaaaaaaaaaaaaaaaaaaaaaaaaaaaaaaaaaaaaaaaaaaaaaaaaaaaaaugcaucccccccccccccccccccccccccccccccaaaggcucuuuucagagccaccagaauu

SEQ ID NO: 17724 - RNA, 1916 nt, Artificial Sequence
  mRNA product Design c-1 comprising derived and/or modified sequence from HRSV(Memphis-37)__AIY60640.1__F_DSCav1_mut6 (opt5)
gggagaguccgcucagccagguugcagaagcggcuuagcguguguccuaaucuucucucugcguguagguaggccugugccgcaaacaagcuuaccauggagcugcccauccucaagaccaacgccauuacaacgauccuggcugccgugacccuuugcuucgcgagcucccagaauauuacagaagaguuuuaccaaucuaccuguagcgcugucuccaaaggcuaucugggggcccucagaacaggaugguacaccucuguuaucacaauugaacugagcaacaucaaggagaauaaaugcaacggcaccgacgccaaggugaaacuuaucaagcaggaacuggauaaguauaaaaaugcugugacggaccuccagaugcugauguguuccaccccugccgcugggucuggaagcgccauugcguccggcaucgccgucugcaaggugcugcaccucgagggggagguuaacaaaauuaagaaugcucugcuuagcacaaacaaagccguggucucucuguccaauggagugagcguucucaccuucaaggugcuggaucuuaagaacuacaucgacaaacagcugcucccgauucugaauaagcaaucuuguuccauccccaacccugaaacagucauggaguuucagcagaaaaauaaccggcugcucgaaauuacccgcgaguucagcgugaaugcuggcgugacgacacccgucucuaccuauaugcugacaaacuccgagcuucugagccucaucaacgauaugccuaucaccaaugaccagaagaaacugauguccaacaauguucaaauugugagacagcagucuuacagcaucaugugcauuaucaaggaagaggugcuugccuaugucgugcagcugccccucuacggcguuauugauaccccuuguuggaaacugcauacauccccgcugugcacgaccaacacaaaggaagggagcaauaucugucucacccggacagaccgcggaugguacugcgauaacgcgggcucuguguccuuuuucccccaagccgagaccuguaaggucugcagcaauagaguguuuugcgacacgaugaacucucugacacuuccuagcgaaguuaaucuguguaacaucgauauuuucaaucccaaauaugacugcaagaucaugaccuccaaaaccgaugugucuagcuccgucauuacaagccucggggcuaucgugucuuguuacggaaagaccaaaugcacagccuccaacaagaauaagggcauuaucaaaacguuuagcaacgggugugacuaugucucuaauaagggaguggacaccguuuccgugggcaacacacuguacuaugucaacaaacaggagggccagagccuuuacgugaagggggagccuaucauuaauuucuaugauccccugguuuuuccguccgacgaauuugaugcuucuaucagccaagugaacgagaaaauuaaucagucccucgccuucauccggaagucugacgaacugcugcacaacgucaaugugggaaagagcaccacaaacauuaugaucaccacgauuaucaucgugauuaucguuauucuccugcuucugaucgccgucggccucuuccuguacugcaaagcucgcuccaccccugugacacugagcaaggaucagcuuucugggauuaauaacaucgcguucuccaauugaggacuaguguccaccugucccuccugggcugcuggauugucucguuuuccugccaaauaaacaggaucagcgcuuuacagaucuaaaaaaaaaaaaaaaaaaaaaaaaaaaaaaaaaaaaaaaaaaaaaaaaaaaaaaaaaaaaaaaaugcaucccccccccccccccccccccccccccccccaaaggcucuuuucagagccaccagaauu

SEQ ID NO: 17725 - RNA, 1916 nt, Artificial Sequence
  mRNA product Design c-1 comprising derived and/or modified sequence from HRSV(Memphis-37)__AIY60640.1__F_DSCav1_mut6 (opt6)
gggagaguccgcucagccagguugcagaagcggcuuagcguguguccuaaucuucucucugcguguagguaggccugugccgcaaacaagcuuaccauggaacuaccaauuuuaaaaacaaacgcaauuacaacuauacucgcagcaguaacauuauguuucgccucaucccaaaacauaacagaagaauuuuaccaaucaacaugcagcgcaguaucaaaaggauaucucggagcauuacgaacagguugguacacaucuguaaucacuauagaacuaucaaacauaaaagaaaacaaaugcaauggaaccgacgcaaaaguaaaauuaauaaaacaagaacucgauaaauacaaaaaugcaguaacagaccuccaaaugcucauguguucaacaccagccgcaggaucagguuccgccauagcaucuggcauagcaguaugcaaaguacuccacuuagaaggagaaguuaacaaaauaaaaaacgcacuauuaucaacaaacaaagcaguaguaucccucucaaacggagucucaguauuaacauucaaaguauuagaccuaaaaaacuacauagacaaacaacuacuuccaauacucaacaaacaaucaugcucaauaccaaacccagaaaccguaauggaauuucaacaaaaaaacaaccgacuacuagaaaucacacgagaauuuucaguaaacgccggugucacaacuccaguaucaacuuauauguuaaccaacucagaacuauuaucauuaauaaacgauaugcccauaacuaacgaccaaaaaaaauuaaugucaaacaacguacaaauaguacgccaacaaaguuacucaauaaugugcaucauaaaagaagaaguauuagcguacguuguacaacuaccucuauacggagucauagacacaccaugcuggaaacuucacacaucaccacuauguacaacaaacacaaaagaaggcaguaacauaugccuaacaagaacagaccguggaugguauugugacaacgcuggaucuguaucauucuucccucaagcagaaaccuguaaaguuugcucaaacagagucuucugugacacaaugaacucucuaacacuaccuuccgaagugaaccucuguaacauagacauauucaauccaaaauaugauugcaaaauaaugacuucaaaaacagauguaucauccucuguuauaacaucauuaggcgccauaguuucaugcuacggaaaaacuaaaugcacagcaucaaacaaaaacaaaggaauaauaaaaaccuucucaaauggaugcgacuacguaagcaacaaaggcguagacacaguaucaguagguaauacauuauacuacguaaacaaacaagaaggacaaucacuuuauguuaaaggagaaccuauaauaaacuucuacgacccacuuguauuuccauccgaugaauuugacgcaucuauaucacaagucaacgaaaaaauaaaccaaucauuagcauucauucgaaaauccgaugaacuacuccauaacguaaaugucggaaaaucaacaaccaacauaaugaucacaacaauaaucauagugauaauaguaauacuccuacuacuaaucgcaguaggucuauuccuauauuguaaagcaagaucuacuccaguuacacucucuaaagaccaauuaagcgguaucaacaacaucgccuucagcaauuaaggacuaguguccaccugucccuccugggcugcuggauugucucguuuuccugccaaauaaacaggaucagcgcuuuacagaucuaaaaaaaaaaaaaaaaaaaaaaaaaaaaaaaaaaaaaaaaaaaaaaaaaaaaaaaaaaaaaaaaugcaucccccccccccccccccccccccccccccccaaaggcucuuuucagagccaccagaauu

SEQ ID NO: 17726 - RNA, 1916 nt, Artificial Sequence
  mRNA product Design c-1 comprising derived and/or modified sequence from HRSV(Memphis-37)__AIY60640.1__F_DSCav1_mut6 (opt11)
gggagaguccgcucagccagguugcagaagcggcuuagcguguguccuaaucuucucucugcguguagguaggccugugccgcaaacaagcuuaccauggagcugcccauccucaagaccaacgccaucaccacgauccuggccgcggugacccugugcuucgcgagcucccaaaacaucaccgaggaguucuaccagagcacgugcuccgccgucagcaagggcuaccucggggcccugcgcaccggcugguacaccuccgugaucaccaucgagcugagcaacaucaaggaaaacaagugcaacgggacggacgcaaaggugaagcucaucaagcaggagcuggauaaguacaagaacgcggucacggaccugcagaugcucaugugcuccaccccggccgccggcagcggguccgccaucgcguccggcaucgccgugugcaagguguugcaccuggagggcgaggucaacaagaucaagaacgcccuccuuuccaccaauaaggcuguugugagccuguccaacggggucagcgugcucaccuucaaggugcuggaccugaagaacuacaucgacaagcagcuccugcccauccugaacaagcaguccugcagcauccccaaccccgagacagucauggaguuccagcagaagaacaaccggcuccuggagaucacccgcgaguucuccguuaacgccggggugaccaccccgguaagcacauacaugcugaccaacagcgagcuccugagccugaucaacgacaugcccaucaccaacgaccagaagaagcucaugagcaacaacgugcagaucgugcggcagcaguccuacagcaucaugugcaucaucaaggaggagguccuggcguacguggugcaacugccccucuacggggucaucgacacccccugcuggaagcugcacacguccccgcugugcaccaccaacaccaaggagggcagcaacaucugccucacgcgcaccgaccgggggugguacugcgacaacgcaggcuccgugagcuucuucccccaggccgagaccugcaaggugugcuccaaccgcgucuucugcgacaccaugaacagccugacgcugcccuccgaggugaaccucugcaacaucgacaucuucaaccccaaguacgacuguaagaucaugaccagcaagaccgaugucuccagcuccgugaucaccagccugggcgccauaguguccuguuaugggaagacgaagugcaccgccagcaacaagaacaaaggcaucaucaagaccuucuccaacgggugcgacuacgucagcaacaagggcguggacacaguguccgucggcaacacgcuguacuacgugaacaagcaggaggggcagagccucuacgugaagggcgagccgaucaucaacuucuacgauccccuggucuuccccagcgacgaguucgacgcguccaucagccaagugaacgagaagaucaaccagucccuggccuucauccgcaagagcgacgagcuccugcacaacgugaacgucgggaaguccaccaccaacaucaugaucaccaccaucaucaucgugaucaucgucauccugcuccugcugaucgccgucggccucuuccuguacugcaaggcccggagcacgcccgugacccuguccaaggaccagcugucgggcaucaacaacaucgccuucuccaacugaggacuaguguccaccugucccuccugggcugcuggauugucucguuuuccugccaaauaaacaggaucagcgcuuuacagaucuaaaaaaaaaaaaaaaaaaaaaaaaaaaaaaaaaaaaaaaaaaaaaaaaaaaaaaaaaaaaaaaaugcaucccccccccccccccccccccccccccccccaaaggcucuuuucagagccaccagaauu

SEQ ID NO: 17727 - RNA, 2006 nt, Artificial Sequence
  mRNA product Design c-2 comprising derived and/or modified sequence from HRSV(Memphis-37)__AIY60640.1__F_DSCav1_mut6 (opt1)
gggagacuccugucgggcggaaguaggaggaguagaguuuaaaaacaguacucuuuuuccgguucgggacguaguugaagcaacgacaagccggauaaccgcucuugagacaggaagcuuaccauggagcugcccauccucaagaccaacgccaucaccacgauccuggccgcggugacccugugcuucgccagcucccagaacaucaccgaggaguucuaccagagcacgugcuccgccgucagcaagggcuaccucggcgcccugcgcaccgggugguacaccagcgugaucaccaucgagcuguccaacaucaaggagaacaagugcaacggcaccgacgccaaggugaagcucaucaagcaggagcuggacaaguacaagaacgcggucacggaccugcagaugcugaugugcagcaccccggccgccggcuccgggagcgcgaucgccuccggcaucgccgucugcaaggugcugcaccucgagggcgaggugaacaagaucaagaacgcccugcuguccaccaacaaggccgucgugagccucuccaacggggugagcguccugaccuucaaggugcuggaccucaagaacuacaucgacaagcagcugcugcccauccugaacaagcagagcugcuccauccccaaccccgagaccgucauggaguuccagcagaagaacaaccgccuccuggagaucacgcgggaguucagcgugaacgcgggcgugaccacccccgucuccaccuacaugcugacgaacagcgagcuccugucccugaucaacgacaugccgaucaccaacgaccagaagaagcucaugagcaacaacgugcagaucgugcgccagcaguccuacagcaucaugugcaucaucaaggaggagguccuggccuacguggugcagcugccccucuacggggucaucgacacccccugcuggaagcugcacaccagcccccugugcacgaccaacaccaaggagggcuccaacaucugccucacccggacggaccgcgggugguacugcgacaacgccggcagcguguccuucuucccgcaggccgagaccugcaaggucugcagcaaccggguguucugcgacaccaugaacucccugacccugcccagcgaggugaaccucugcaacaucgacaucuucaaccccaaguacgacugcaagaucaugacguccaagaccgacgucagcuccagcgugaucaccucccugggcgccaucgugagcugcuacgggaagaccaagugcacggcgagcaacaagaacaagggcaucaucaagaccuucuccaacgggugcgacuacgucagcaacaagggcguggacaccguguccgucggcaacacccuguacuacgugaacaagcaggagggccagagccucuacgugaagggggagcccaucaucaacuucuacgacccgcuggucuuccccuccgacgaguucgacgccagcaucucccaggugaacgagaagaucaaccagagccuggccuucauccggaaguccgacgagcuccugcacaacgugaacgucggcaagagcaccacgaacaucaugaucaccaccaucaucaucgugaucaucgugauccugcugcuccugaucgccgucgggcuguuccucuacugcaaggcccgcuccacccccgugacgcugagcaaggaccagcuguccgggaucaacaacaucgcguucagcaacugaggacuaguggaagcauuuuccuggcugauuaaaagaaauuacucagcuauggucaucuguuccuguuagaaggcuaugcagcauauuauauacuaugcgcauguuaugaaaugcauaauaaaaaauuuuaaaaaaucuaaaagaucuaaaaaaaaaaaaaaaaaaaaaaaaaaaaaaaaaaaaaaaaaaaaaaaaaaaaaaaaaaaaaaaaugcaucccccccccccccccccccccccccccccccaaaggcucuuuucagagccaccagaauu

SEQ ID NO: 17728 - RNA, 2006 nt, Artificial Sequence
  mRNA product Design c-2 comprising derived and/or modified sequence from HRSV(Memphis-37)__AIY60640.1__F_DSCav1_mut6 (opt1)
gggagacuccugucgggcggaaguaggaggaguagaguuuaaaaacaguacucuuuuuccgguucgggacguaguugaagcaacgacaagccggauaaccgcucuugagacaggaagcuuaccauggagcugcccauccucaagaccaacgccaucaccacgauccuggccgcggugacccugugcuucgccagcucccagaacaucaccgaggaguucuaccagagcacgugcuccgccgucagcaagggcuaccucggggcccugcgcaccggcugguacaccuccgugaucaccaucgagcugagcaacaucaaggagaacaagugcaacgggaccgacgccaaggugaagcucaucaagcaggagcuggacaaguacaagaacgcggucacggaccugcagaugcucaugugcuccaccccggccgccggcagcggguccgccaucgcgagcggcaucgccgugugcaaggugcugcaccuggagggcgaggucaacaagaucaagaacgcccuccuguccaccaacaaggccguggugagccuguccaacggggucagcgugcucaccuucaaggugcuggaccugaagaacuacaucgacaagcagcuccugcccauccugaacaagcaguccugcagcauccccaaccccgagacggucauggaguuccagcagaagaacaaccggcuccuggagaucacccgcgaguucuccgugaacgccggcgugaccaccccggucagcacguacaugcugaccaacuccgagcuccugagccugaucaacgacaugcccaucaccaacgaccagaagaagcucaugagcaacaacgugcagaucgugcggcagcaguccuacagcaucaugugcaucaucaaggaggagguccuggcguacguggugcagcugccccucuacggggucaucgacacccccugcuggaagcugcacacguccccgcugugcaccaccaacaccaaggagggcagcaacaucugccucacgcgcaccgaccgggggugguacugcgacaacgccggcuccgugagcuucuucccccaggccgagaccugcaaggugugcuccaaccgcgucuucugcgacaccaugaacagccugacgcugcccuccgaggugaaccucugcaacaucgacaucuucaaccccaaguacgacugcaagaucaugaccagcaagaccgacgucuccagcuccgugaucaccagccugggcgccaucguguccugcuacgggaagacgaagugcaccgccagcaacaagaacaagggcaucaucaagaccuucuccaacgggugcgacuacgucagcaacaagggcguggacaccguguccgucggcaacacgcuguacuacgugaacaagcaggaggggcagagccucuacgugaagggcgagccgaucaucaacuucuacgacccccuggucuuccccagcgacgaguucgacgcguccaucagccaggugaacgagaagaucaaccagucccuggccuucauccgcaagagcgacgagcuccugcacaacgugaacgucgggaaguccaccaccaacaucaugaucaccaccaucaucaucgugaucaucgugauccugcuccugcugaucgccgucggccucuuccuguacugcaaggcccggagcacgcccgugacccuguccaaggaccagcugagcgggaucaacaacaucgccuucuccaacugaggacuaguggaagcauuuuccuggcugauuaaaagaaauuacucagcuauggucaucuguuccuguuagaaggcuaugcagcauauuauauacuaugcgcauguuaugaaaugcauaauaaaaaauuuuaaaaaaucuaaaagaucuaaaaaaaaaaaaaaaaaaaaaaaaaaaaaaaaaaaaaaaaaaaaaaaaaaaaaaaaaaaaaaaaugcaucccccccccccccccccccccccccccccccaaaggcucuuuucagagccaccagaauu

SEQ ID NO: 17729 - RNA, 2006 nt, Artificial Sequence
  mRNA product Design c-2 comprising derived and/or modified sequence from HRSV(Memphis-37)__AIY60640.1__F_DSCav1_mut6 (opt2)
gggagacuccugucgggcggaaguaggaggaguagaguuuaaaaacaguacucuuuuuccgguucgggacguaguugaagcaacgacaagccggauaaccgcucuugagacaggaagcuuaccauggagcuccccauccucaagaccaacgccaucaccaccauccucgccgccgucacccucugcuucgccuccucccagaacaucaccgaggaguucuaccaguccaccugcuccgccgucuccaagggcuaccucggcgcccuccgcaccggcugguacaccuccgucaucaccaucgagcucuccaacaucaaggagaacaagugcaacggcaccgacgccaaggucaagcucaucaagcaggagcucgacaaguacaagaacgccgucaccgaccuccagaugcucaugugcuccacccccgccgccggcuccggcuccgccaucgccuccggcaucgccgucugcaagguccuccaccucgagggcgaggucaacaagaucaagaacgcccuccucuccaccaacaaggccgucgucucccucuccaacggcgucuccguccucaccuucaagguccucgaccucaagaacuacaucgacaagcagcuccuccccauccucaacaagcaguccugcuccauccccaaccccgagaccgucauggaguuccagcagaagaacaaccgccuccucgagaucacccgcgaguucuccgucaacgccggcgucaccacccccgucuccaccuacaugcucaccaacuccgagcuccucucccucaucaacgacaugcccaucaccaacgaccagaagaagcucauguccaacaacguccagaucguccgccagcaguccuacuccaucaugugcaucaucaaggaggagguccucgccuacgucguccagcucccccucuacggcgucaucgacacccccugcuggaagcuccacaccuccccccucugcaccaccaacaccaaggagggcuccaacaucugccucacccgcaccgaccgcggcugguacugcgacaacgccggcuccgucuccuucuucccccaggccgagaccugcaaggucugcuccaaccgcgucuucugcgacaccaugaacucccucacccuccccuccgaggucaaccucugcaacaucgacaucuucaaccccaaguacgacugcaagaucaugaccuccaagaccgacgucuccuccuccgucaucaccucccucggcgccaucgucuccugcuacggcaagaccaagugcaccgccuccaacaagaacaagggcaucaucaagaccuucuccaacggcugcgacuacgucuccaacaagggcgucgacaccgucuccgucggcaacacccucuacuacgucaacaagcaggagggccagucccucuacgucaagggcgagcccaucaucaacuucuacgacccccucgucuuccccuccgacgaguucgacgccuccaucucccaggucaacgagaagaucaaccagucccucgccuucauccgcaaguccgacgagcuccuccacaacgucaacgucggcaaguccaccaccaacaucaugaucaccaccaucaucaucgucaucaucgucauccuccuccuccucaucgccgucggccucuuccucuacugcaaggcccgcuccacccccgucacccucuccaaggaccagcucuccggcaucaacaacaucgccuucuccaacugaggacuaguggaagcauuuuccuggcugauuaaaagaaauuacucagcuauggucaucuguuccuguuagaaggcuaugcagcauauuauauacuaugcgcauguuaugaaaugcauaauaaaaaauuuuaaaaaaucuaaaagaucuaaaaaaaaaaaaaaaaaaaaaaaaaaaaaaaaaaaaaaaaaaaaaaaaaaaaaaaaaaaaaaaaugcaucccccccccccccccccccccccccccccccaaaggcucuuuucagagccaccagaauu

SEQ ID NO: 17730 - RNA, 2006 nt, Artificial Sequence
  mRNA product Design c-2 comprising derived and/or modified sequence from HRSV(Memphis-37)__AIY60640.1__F_DSCav1_mut6 (opt3)
gggagacuccugucgggcggaaguaggaggaguagaguuuaaaaacaguacucuuuuuccgguucgggacguaguugaagcaacgacaagccggauaaccgcucuugagacaggaagcuuaccauggagcugcccauccucaagaccaacgccauuacaacuauacuugcugcagugacgcugugcuucgccagcucccagaauaucaccgaagaguuuuaccaaucuacauguucagcggucaguaaaggcuauuugggggcuuuaagaacuggaugguacaccagcguuauuacaaucgaacuguccaacauuaaggagaauaaaugcaacgguaccgacgccaaggugaaacuaaucaagcaggaacucgauaaguauaaaaaugcaguaacugaccugcagaugcuuauguguucuacuccugccgcuggcucggggucagcaauagccagcggaaucgcugugugcaagguccugcacuuggagggcgaggugaacaaaauuaagaaugcccuccugaguaccaacaaagcgguugugucccugucuaauggugucagcgugcucacguucaagguauuagaucugaagaacuacaucgacaaacagcuuuugccaauucugaauaagcaauccuguucaaucccgaaccccgaaacuguuauggaguuucagcagaaaaauaacaggcuacucgaaauaacccgggaguucagugugaaugcaggggucacaacuccugugagcaccuauaugcugacaaacucugagcuucuguccuugauuaacgauaugccaaucaccaaugaccagaagaaacucaugucaaacaaugugcaaauuguccgccagcagagcuacaguaucaugugcaucauuaaggaagagguucuggccuaugugguacaguuaccccuguacggagugauagauacgccuuguuggaaacuccauacuucuccacuuugcacaaccaacacuaaggaaggcuccaauaucugucugacacgaaccgaccguggcugguacugcgauaacgcugggagcgucucguuuuucccccaagccgagacguguaaggugugcucuaauagaguuuucugcgacaccaugaacuccuugacacuaccuucagaagugaaucuguguaacauugauaucuucaauccaaaauaugacugcaagauaaugacaaguaaaaccgaugucagcuccucugugauuacaagccucggagcaaucguaucauguuacgguaagacuaaaugcaccgcuaguaacaagaauaagggcaucauuaaaacauuuuccaacgggugugacuauguuagcaauaagggaguggacaccgucucugugggcaacacucuguacuaugucaacaaacaggagggucagucacuuuacgugaagggggagccgaucauuaauuucuaugauccccugguuuuuccuagugacgaauuugaugccagcauaucccaagugaacgagaaaaucaaucagucuuuggcguuuauuaggaagucggacgaacuccugcacaacguaaaugucggaaagagcacgacaaacaucaugaucaccacuauuauaaucgugauuaucguuauuuuacugcuacucaucgccgugggccuguuccuuuacugcaaagcacgguccaccccagucacauugucaaaggaucagcugaguggcauaaauaacaucgcuuucucuaauugaggacuaguggaagcauuuuccuggcugauuaaaagaaauuacucagcuauggucaucuguuccuguuagaaggcuaugcagcauauuauauacuaugcgcauguuaugaaaugcauaauaaaaaauuuuaaaaaaucuaaaagaucuaaaaaaaaaaaaaaaaaaaaaaaaaaaaaaaaaaaaaaaaaaaaaaaaaaaaaaaaaaaaaaaaugcaucccccccccccccccccccccccccccccccaaaggcucuuuucagagccaccagaauu

SEQ ID NO: 17731 - RNA, 2006 nt, Artificial Sequence
  mRNA product Design c-2 comprising derived and/or modified sequence from HRSV(Memphis-37)__AIY60640.1__F_DSCav1_mut6 (opt4)
gggagacuccugucgggcggaaguaggaggaguagaguuuaaaaacaguacucuuuuuccgguucgggacguaguugaagcaacgacaagccggauaaccgcucuugagacaggaagcuuaccauggagcugcccauccugaagaccaacgccaucaccaccauccuggccgccgugacccugugcuucgccagcagccagaacaucaccgaggaguucuaccagagcaccugcagcgccgugagcaagggcuaccugggcgcccugagaaccggcugguacaccagcgugaucaccaucgagcugagcaacaucaaggagaacaagugcaacggcaccgacgccaaggugaagcugaucaagcaggagcuggacaaguacaagaacgccgugaccgaccugcagaugcugaugugcagcacccccgccgccggcagcggcagcgccaucgccagcggcaucgccgugugcaaggugcugcaccuggagggcgaggugaacaagaucaagaacgcccugcugagcaccaacaaggccguggugagccugagcaacggcgugagcgugcugaccuucaaggugcuggaccugaagaacuacaucgacaagcagcugcugcccauccugaacaagcagagcugcagcauccccaaccccgagaccgugauggaguuccagcagaagaacaacagacugcuggagaucaccagagaguucagcgugaacgccggcgugaccacccccgugagcaccuacaugcugaccaacagcgagcugcugagccugaucaacgacaugcccaucaccaacgaccagaagaagcugaugagcaacaacgugcagaucgugagacagcagagcuacagcaucaugugcaucaucaaggaggaggugcuggccuacguggugcagcugccccuguacggcgugaucgacacccccugcuggaagcugcacaccagcccccugugcaccaccaacaccaaggagggcagcaacaucugccugaccagaaccgacagaggcugguacugcgacaacgccggcagcgugagcuucuucccccaggccgagaccugcaaggugugcagcaacagaguguucugcgacaccaugaacagccugacccugcccagcgaggugaaccugugcaacaucgacaucuucaaccccaaguacgacugcaagaucaugaccagcaagaccgacgugagcagcagcgugaucaccagccugggcgccaucgugagcugcuacggcaagaccaagugcaccgccagcaacaagaacaagggcaucaucaagaccuucagcaacggcugcgacuacgugagcaacaagggcguggacaccgugagcgugggcaacacccuguacuacgugaacaagcaggagggccagagccuguacgugaagggcgagcccaucaucaacuucuacgacccccugguguuccccagcgacgaguucgacgccagcaucagccaggugaacgagaagaucaaccagagccuggccuucaucagaaagagcgacgagcugcugcacaacgugaacgugggcaagagcaccaccaacaucaugaucaccaccaucaucaucgugaucaucgugauccugcugcugcugaucgccgugggccuguuccuguacugcaaggccagaagcacccccgugacccugagcaaggaccagcugagcggcaucaacaacaucgccuucagcaacugaggacuaguggaagcauuuuccuggcugauuaaaagaaauuacucagcuauggucaucuguuccuguuagaaggcuaugcagcauauuauauacuaugcgcauguuaugaaaugcauaauaaaaaauuuuaaaaaaucuaaaagaucuaaaaaaaaaaaaaaaaaaaaaaaaaaaaaaaaaaaaaaaaaaaaaaaaaaaaaaaaaaaaaaaaugcaucccccccccccccccccccccccccccccccaaaggcucuuuucagagccaccagaauu

SEQ ID NO: 17732 - RNA, 2006 nt, Artificial Sequence
  mRNA product Design c-2 comprising derived and/or modified sequence from HRSV(Memphis-37)__AIY60640.1__F_DSCav1_mut6 (opt5)
gggagacuccugucgggcggaaguaggaggaguagaguuuaaaaacaguacucuuuuuccgguucgggacguaguugaagcaacgacaagccggauaaccgcucuugagacaggaagcuuaccauggagcugcccauccucaagaccaacgccauuacaacgauccuggcugccgugacccuuugcuucgcgagcucccagaauauuacagaagaguuuuaccaaucuaccuguagcgcugucuccaaaggcuaucugggggcccucagaacaggaugguacaccucuguuaucacaauugaacugagcaacaucaaggagaauaaaugcaacggcaccgacgccaaggugaaacuuaucaagcaggaacuggauaaguauaaaaaugcugugacggaccuccagaugcugauguguuccaccccugccgcugggucuggaagcgccauugcguccggcaucgccgucugcaaggugcugcaccucgagggggagguuaacaaaauuaagaaugcucugcuuagcacaaacaaagccguggucucucuguccaauggagugagcguucucaccuucaaggugcuggaucuuaagaacuacaucgacaaacagcugcucccgauucugaauaagcaaucuuguuccauccccaacccugaaacagucauggaguuucagcagaaaaauaaccggcugcucgaaauuacccgcgaguucagcgugaaugcuggcgugacgacacccgucucuaccuauaugcugacaaacuccgagcuucugagccucaucaacgauaugccuaucaccaaugaccagaagaaacugauguccaacaauguucaaauugugagacagcagucuuacagcaucaugugcauuaucaaggaagaggugcuugccuaugucgugcagcugccccucuacggcguuauugauaccccuuguuggaaacugcauacauccccgcugugcacgaccaacacaaaggaagggagcaauaucugucucacccggacagaccgcggaugguacugcgauaacgcgggcucuguguccuuuuucccccaagccgagaccuguaaggucugcagcaauagaguguuuugcgacacgaugaacucucugacacuuccuagcgaaguuaaucuguguaacaucgauauuuucaaucccaaauaugacugcaagaucaugaccuccaaaaccgaugugucuagcuccgucauuacaagccucggggcuaucgugucuuguuacggaaagaccaaaugcacagccuccaacaagaauaagggcauuaucaaaacguuuagcaacgggugugacuaugucucuaauaagggaguggacaccguuuccgugggcaacacacuguacuaugucaacaaacaggagggccagagccuuuacgugaagggggagccuaucauuaauuucuaugauccccugguuuuuccguccgacgaauuugaugcuucuaucagccaagugaacgagaaaauuaaucagucccucgccuucauccggaagucugacgaacugcugcacaacgucaaugugggaaagagcaccacaaacauuaugaucaccacgauuaucaucgugauuaucguuauucuccugcuucugaucgccgucggccucuuccuguacugcaaagcucgcuccaccccugugacacugagcaaggaucagcuuucugggauuaauaacaucgcguucuccaauugaggacuaguggaagcauuuuccuggcugauuaaaagaaauuacucagcuauggucaucuguuccuguuagaaggcuaugcagcauauuauauacuaugcgcauguuaugaaaugcauaauaaaaaauuuuaaaaaaucuaaaagaucuaaaaaaaaaaaaaaaaaaaaaaaaaaaaaaaaaaaaaaaaaaaaaaaaaaaaaaaaaaaaaaaaugcaucccccccccccccccccccccccccccccccaaaggcucuuuucagagccaccagaauu

SEQ ID NO: 17733 - RNA, 2006 nt, Artificial Sequence
  mRNA product Design c-2 comprising derived and/or modified sequence from HRSV(Memphis-37)__AIY60640.1__F_DSCav1_mut6 (opt6)
gggagacuccugucgggcggaaguaggaggaguagaguuuaaaaacaguacucuuuuuccgguucgggacguaguugaagcaacgacaagccggauaaccgcucuugagacaggaagcuuaccauggaacuaccaauuuuaaaaacaaacgcaauuacaacuauacucgcagcaguaacauuauguuucgccucaucccaaaacauaacagaagaauuuuaccaaucaacaugcagcgcaguaucaaaaggauaucucggagcauuacgaacagguugguacacaucuguaaucacuauagaacuaucaaacauaaaagaaaacaaaugcaauggaaccgacgcaaaaguaaaauuaauaaaacaagaacucgauaaauacaaaaaugcaguaacagaccuccaaaugcucauguguucaacaccagccgcaggaucagguuccgccauagcaucuggcauagcaguaugcaaaguacuccacuuagaaggagaaguuaacaaaauaaaaaacgcacuauuaucaacaaacaaagcaguaguaucccucucaaacggagucucaguauuaacauucaaaguauuagaccuaaaaaacuacauagacaaacaacuacuuccaauacucaacaaacaaucaugcucaauaccaaacccagaaaccguaauggaauuucaacaaaaaaacaaccgacuacuagaaaucacacgagaauuuucaguaaacgccggugucacaacuccaguaucaacuuauauguuaaccaacucagaacuauuaucauuaauaaacgauaugcccauaacuaacgaccaaaaaaaauuaaugucaaacaacguacaaauaguacgccaacaaaguuacucaauaaugugcaucauaaaagaagaaguauuagcguacguuguacaacuaccucuauacggagucauagacacaccaugcuggaaacuucacacaucaccacuauguacaacaaacacaaaagaaggcaguaacauaugccuaacaagaacagaccguggaugguauugugacaacgcuggaucuguaucauucuucccucaagcagaaaccuguaaaguuugcucaaacagagucuucugugacacaaugaacucucuaacacuaccuuccgaagugaaccucuguaacauagacauauucaauccaaaauaugauugcaaaauaaugacuucaaaaacagauguaucauccucuguuauaacaucauuaggcgccauaguuucaugcuacggaaaaacuaaaugcacagcaucaaacaaaaacaaaggaauaauaaaaaccuucucaaauggaugcgacuacguaagcaacaaaggcguagacacaguaucaguagguaauacauuauacuacguaaacaaacaagaaggacaaucacuuuauguuaaaggagaaccuauaauaaacuucuacgacccacuuguauuuccauccgaugaauuugacgcaucuauaucacaagucaacgaaaaaauaaaccaaucauuagcauucauucgaaaauccgaugaacuacuccauaacguaaaugucggaaaaucaacaaccaacauaaugaucacaacaauaaucauagugauaauaguaauacuccuacuacuaaucgcaguaggucuauuccuauauuguaaagcaagaucuacuccaguuacacucucuaaagaccaauuaagcgguaucaacaacaucgccuucagcaauuaaggacuaguggaagcauuuuccuggcugauuaaaagaaauuacucagcuauggucaucuguuccuguuagaaggcuaugcagcauauuauauacuaugcgcauguuaugaaaugcauaauaaaaaauuuuaaaaaaucuaaaagaucuaaaaaaaaaaaaaaaaaaaaaaaaaaaaaaaaaaaaaaaaaaaaaaaaaaaaaaaaaaaaaaaaugcaucccccccccccccccccccccccccccccccaaaggcucuuuucagagccaccagaauu

SEQ ID NO: 17734 - RNA, 2006 nt, Artificial Sequence
  mRNA product Design c-2 comprising derived and/or modified sequence from HRSV(Memphis-37)__AIY60640.1__F_DSCav1_mut6 (opt11)
gggagacuccugucgggcggaaguaggaggaguagaguuuaaaaacaguacucuuuuuccgguucgggacguaguugaagcaacgacaagccggauaaccgcucuugagacaggaagcuuaccauggagcugcccauccucaagaccaacgccaucaccacgauccuggccgcggugacccugugcuucgcgagcucccaaaacaucaccgaggaguucuaccagagcacgugcuccgccgucagcaagggcuaccucggggcccugcgcaccggcugguacaccuccgugaucaccaucgagcugagcaacaucaaggaaaacaagugcaacgggacggacgcaaaggugaagcucaucaagcaggagcuggauaaguacaagaacgcggucacggaccugcagaugcucaugugcuccaccccggccgccggcagcggguccgccaucgcguccggcaucgccgugugcaagguguugcaccuggagggcgaggucaacaagaucaagaacgcccuccuuuccaccaauaaggcuguugugagccuguccaacggggucagcgugcucaccuucaaggugcuggaccugaagaacuacaucgacaagcagcuccugcccauccugaacaagcaguccugcagcauccccaaccccgagacagucauggaguuccagcagaagaacaaccggcuccuggagaucacccgcgaguucuccguuaacgccggggugaccaccccgguaagcacauacaugcugaccaacagcgagcuccugagccugaucaacgacaugcccaucaccaacgaccagaagaagcucaugagcaacaacgugcagaucgugcggcagcaguccuacagcaucaugugcaucaucaaggaggagguccuggcguacguggugcaacugccccucuacggggucaucgacacccccugcuggaagcugcacacguccccgcugugcaccaccaacaccaaggagggcagcaacaucugccucacgcgcaccgaccgggggugguacugcgacaacgcaggcuccgugagcuucuucccccaggccgagaccugcaaggugugcuccaaccgcgucuucugcgacaccaugaacagccugacgcugcccuccgaggugaaccucugcaacaucgacaucuucaaccccaaguacgacuguaagaucaugaccagcaagaccgaugucuccagcuccgugaucaccagccugggcgccauaguguccuguuaugggaagacgaagugcaccgccagcaacaagaacaaaggcaucaucaagaccuucuccaacgggugcgacuacgucagcaacaagggcguggacacaguguccgucggcaacacgcuguacuacgugaacaagcaggaggggcagagccucuacgugaagggcgagccgaucaucaacuucuacgauccccuggucuuccccagcgacgaguucgacgcguccaucagccaagugaacgagaagaucaaccagucccuggccuucauccgcaagagcgacgagcuccugcacaacgugaacgucgggaaguccaccaccaacaucaugaucaccaccaucaucaucgugaucaucgucauccugcuccugcugaucgccgucggccucuuccuguacugcaaggcccggagcacgcccgugacccuguccaaggaccagcugucgggcaucaacaacaucgccuucuccaacugaggacuaguggaagcauuuuccuggcugauuaaaagaaauuacucagcuauggucaucuguuccuguuagaaggcuaugcagcauauuauauacuaugcgcauguuaugaaaugcauaauaaaaaauuuuaaaaaaucuaaaagaucuaaaaaaaaaaaaaaaaaaaaaaaaaaaaaaaaaaaaaaaaaaaaaaaaaaaaaaaaaaaaaaaaugcaucccccccccccccccccccccccccccccccaaaggcucuuuucagagccaccagaauu

SEQ ID NO: 17735 - RNA, 1983 nt, Artificial Sequence
  mRNA product Design c-3 comprising derived and/or modified sequence from HRSV(Memphis-37)__AIY60640.1__F_DSCav1_mut6 (opt1)
gggagaguccgcucagccagguugcagaagcggcuuagcguguguccuaaucuucucucugcguguagguaggccugugccgcaaacaagcuuaccauggagcugcccauccucaagaccaacgccaucaccacgauccuggccgcggugacccugugcuucgccagcucccagaacaucaccgaggaguucuaccagagcacgugcuccgccgucagcaagggcuaccucggcgcccugcgcaccgggugguacaccagcgugaucaccaucgagcuguccaacaucaaggagaacaagugcaacggcaccgacgccaaggugaagcucaucaagcaggagcuggacaaguacaagaacgcggucacggaccugcagaugcugaugugcagcaccccggccgccggcuccgggagcgcgaucgccuccggcaucgccgucugcaaggugcugcaccucgagggcgaggugaacaagaucaagaacgcccugcuguccaccaacaaggccgucgugagccucuccaacggggugagcguccugaccuucaaggugcuggaccucaagaacuacaucgacaagcagcugcugcccauccugaacaagcagagcugcuccauccccaaccccgagaccgucauggaguuccagcagaagaacaaccgccuccuggagaucacgcgggaguucagcgugaacgcgggcgugaccacccccgucuccaccuacaugcugacgaacagcgagcuccugucccugaucaacgacaugccgaucaccaacgaccagaagaagcucaugagcaacaacgugcagaucgugcgccagcaguccuacagcaucaugugcaucaucaaggaggagguccuggccuacguggugcagcugccccucuacggggucaucgacacccccugcuggaagcugcacaccagcccccugugcacgaccaacaccaaggagggcuccaacaucugccucacccggacggaccgcgggugguacugcgacaacgccggcagcguguccuucuucccgcaggccgagaccugcaaggucugcagcaaccggguguucugcgacaccaugaacucccugacccugcccagcgaggugaaccucugcaacaucgacaucuucaaccccaaguacgacugcaagaucaugacguccaagaccgacgucagcuccagcgugaucaccucccugggcgccaucgugagcugcuacgggaagaccaagugcacggcgagcaacaagaacaagggcaucaucaagaccuucuccaacgggugcgacuacgucagcaacaagggcguggacaccguguccgucggcaacacccuguacuacgugaacaagcaggagggccagagccucuacgugaagggggagcccaucaucaacuucuacgacccgcuggucuuccccuccgacgaguucgacgccagcaucucccaggugaacgagaagaucaaccagagccuggccuucauccggaaguccgacgagcuccugcacaacgugaacgucggcaagagcaccacgaacaucaugaucaccaccaucaucaucgugaucaucgugauccugcugcuccugaucgccgucgggcuguuccucuacugcaaggcccgcuccacccccgugacgcugagcaaggaccagcuguccgggaucaacaacaucgcguucagcaacugaggacuaguacuggcugcaucucccuuuccucuguccuccauccuucucccaggauggugaagggggaccugguacccagugauccccaccccaggauccuaaaucaugacuuaccugcuaauaaaaacucauuggaaaagugagaagaucuaaaaaaaaaaaaaaaaaaaaaaaaaaaaaaaaaaaaaaaaaaaaaaaaaaaaaaaaaaaaaaaaugcaucccccccccccccccccccccccccccccccaaaggcucuuuucagagccaccagaauu

SEQ ID NO: 17736 - RNA, 1983 nt, Artificial Sequence
  mRNA product Design c-3 comprising derived and/or modified sequence from HRSV(Memphis-37)__AIY60640.1__F_DSCav1_mut6 (opt1)
gggagaguccgcucagccagguugcagaagcggcuuagcguguguccuaaucuucucucugcguguagguaggccugugccgcaaacaagcuuaccauggagcugcccauccucaagaccaacgccaucaccacgauccuggccgcggugacccugugcuucgccagcucccagaacaucaccgaggaguucuaccagagcacgugcuccgccgucagcaagggcuaccucggggcccugcgcaccggcugguacaccuccgugaucaccaucgagcugagcaacaucaaggagaacaagugcaacgggaccgacgccaaggugaagcucaucaagcaggagcuggacaaguacaagaacgcggucacggaccugcagaugcucaugugcuccaccccggccgccggcagcggguccgccaucgcgagcggcaucgccgugugcaaggugcugcaccuggagggcgaggucaacaagaucaagaacgcccuccuguccaccaacaaggccguggugagccuguccaacggggucagcgugcucaccuucaaggugcuggaccugaagaacuacaucgacaagcagcuccugcccauccugaacaagcaguccugcagcauccccaaccccgagacggucauggaguuccagcagaagaacaaccggcuccuggagaucacccgcgaguucuccgugaacgccggcgugaccaccccggucagcacguacaugcugaccaacuccgagcuccugagccugaucaacgacaugcccaucaccaacgaccagaagaagcucaugagcaacaacgugcagaucgugcggcagcaguccuacagcaucaugugcaucaucaaggaggagguccuggcguacguggugcagcugccccucuacggggucaucgacacccccugcuggaagcugcacacguccccgcugugcaccaccaacaccaaggagggcagcaacaucugccucacgcgcaccgaccgggggugguacugcgacaacgccggcuccgugagcuucuucccccaggccgagaccugcaaggugugcuccaaccgcgucuucugcgacaccaugaacagccugacgcugcccuccgaggugaaccucugcaacaucgacaucuucaaccccaaguacgacugcaagaucaugaccagcaagaccgacgucuccagcuccgugaucaccagccugggcgccaucguguccugcuacgggaagacgaagugcaccgccagcaacaagaacaagggcaucaucaagaccuucuccaacgggugcgacuacgucagcaacaagggcguggacaccguguccgucggcaacacgcuguacuacgugaacaagcaggaggggcagagccucuacgugaagggcgagccgaucaucaacuucuacgacccccuggucuuccccagcgacgaguucgacgcguccaucagccaggugaacgagaagaucaaccagucccuggccuucauccgcaagagcgacgagcuccugcacaacgugaacgucgggaaguccaccaccaacaucaugaucaccaccaucaucaucgugaucaucgugauccugcuccugcugaucgccgucggccucuuccuguacugcaaggcccggagcacgcccgugacccuguccaaggaccagcugagcgggaucaacaacaucgccuucuccaacugaggacuaguacuggcugcaucucccuuuccucuguccuccauccuucucccaggauggugaagggggaccugguacccagugauccccaccccaggauccuaaaucaugacuuaccugcuaauaaaaacucauuggaaaagugagaagaucuaaaaaaaaaaaaaaaaaaaaaaaaaaaaaaaaaaaaaaaaaaaaaaaaaaaaaaaaaaaaaaaaugcaucccccccccccccccccccccccccccccccaaaggcucuuuucagagccaccagaauu

SEQ ID NO: 17737 - RNA, 1983 nt, Artificial Sequence
  mRNA product Design c-3 comprising derived and/or modified sequence from HRSV(Memphis-37)__AIY60640.1__F_DSCav1_mut6 (opt2)
gggagaguccgcucagccagguugcagaagcggcuuagcguguguccuaaucuucucucugcguguagguaggccugugccgcaaacaagcuuaccauggagcuccccauccucaagaccaacgccaucaccaccauccucgccgccgucacccucugcuucgccuccucccagaacaucaccgaggaguucuaccaguccaccugcuccgccgucuccaagggcuaccucggcgcccuccgcaccggcugguacaccuccgucaucaccaucgagcucuccaacaucaaggagaacaagugcaacggcaccgacgccaaggucaagcucaucaagcaggagcucgacaaguacaagaacgccgucaccgaccuccagaugcucaugugcuccacccccgccgccggcuccggcuccgccaucgccuccggcaucgccgucugcaagguccuccaccucgagggcgaggucaacaagaucaagaacgcccuccucuccaccaacaaggccgucgucucccucuccaacggcgucuccguccucaccuucaagguccucgaccucaagaacuacaucgacaagcagcuccuccccauccucaacaagcaguccugcuccauccccaaccccgagaccgucauggaguuccagcagaagaacaaccgccuccucgagaucacccgcgaguucuccgucaacgccggcgucaccacccccgucuccaccuacaugcucaccaacuccgagcuccucucccucaucaacgacaugcccaucaccaacgaccagaagaagcucauguccaacaacguccagaucguccgccagcaguccuacuccaucaugugcaucaucaaggaggagguccucgccuacgucguccagcucccccucuacggcgucaucgacacccccugcuggaagcuccacaccuccccccucugcaccaccaacaccaaggagggcuccaacaucugccucacccgcaccgaccgcggcugguacugcgacaacgccggcuccgucuccuucuucccccaggccgagaccugcaaggucugcuccaaccgcgucuucugcgacaccaugaacucccucacccuccccuccgaggucaaccucugcaacaucgacaucuucaaccccaaguacgacugcaagaucaugaccuccaagaccgacgucuccuccuccgucaucaccucccucggcgccaucgucuccugcuacggcaagaccaagugcaccgccuccaacaagaacaagggcaucaucaagaccuucuccaacggcugcgacuacgucuccaacaagggcgucgacaccgucuccgucggcaacacccucuacuacgucaacaagcaggagggccagucccucuacgucaagggcgagcccaucaucaacuucuacgacccccucgucuuccccuccgacgaguucgacgccuccaucucccaggucaacgagaagaucaaccagucccucgccuucauccgcaaguccgacgagcuccuccacaacgucaacgucggcaaguccaccaccaacaucaugaucaccaccaucaucaucgucaucaucgucauccuccuccuccucaucgccgucggccucuuccucuacugcaaggcccgcuccacccccgucacccucuccaaggaccagcucuccggcaucaacaacaucgccuucuccaacugaggacuaguacuggcugcaucucccuuuccucuguccuccauccuucucccaggauggugaagggggaccugguacccagugauccccaccccaggauccuaaaucaugacuuaccugcuaauaaaaacucauuggaaaagugagaagaucuaaaaaaaaaaaaaaaaaaaaaaaaaaaaaaaaaaaaaaaaaaaaaaaaaaaaaaaaaaaaaaaaugcaucccccccccccccccccccccccccccccccaaaggcucuuuucagagccaccagaauu

SEQ ID NO: 17738 - RNA, 1983 nt, Artificial Sequence
  mRNA product Design c-3 comprising derived and/or modified sequence from HRSV(Memphis-37)__AIY60640.1__F_DSCav1_mut6 (opt3)
gggagaguccgcucagccagguugcagaagcggcuuagcguguguccuaaucuucucucugcguguagguaggccugugccgcaaacaagcuuaccauggagcugcccauccucaagaccaacgccauuacaacuauacuugcugcagugacgcugugcuucgccagcucccagaauaucaccgaagaguuuuaccaaucuacauguucagcggucaguaaaggcuauuugggggcuuuaagaacuggaugguacaccagcguuauuacaaucgaacuguccaacauuaaggagaauaaaugcaacgguaccgacgccaaggugaaacuaaucaagcaggaacucgauaaguauaaaaaugcaguaacugaccugcagaugcuuauguguucuacuccugccgcuggcucggggucagcaauagccagcggaaucgcugugugcaagguccugcacuuggagggcgaggugaacaaaauuaagaaugcccuccugaguaccaacaaagcgguugugucccugucuaauggugucagcgugcucacguucaagguauuagaucugaagaacuacaucgacaaacagcuuuugccaauucugaauaagcaauccuguucaaucccgaaccccgaaacuguuauggaguuucagcagaaaaauaacaggcuacucgaaauaacccgggaguucagugugaaugcaggggucacaacuccugugagcaccuauaugcugacaaacucugagcuucuguccuugauuaacgauaugccaaucaccaaugaccagaagaaacucaugucaaacaaugugcaaauuguccgccagcagagcuacaguaucaugugcaucauuaaggaagagguucuggccuaugugguacaguuaccccuguacggagugauagauacgccuuguuggaaacuccauacuucuccacuuugcacaaccaacacuaaggaaggcuccaauaucugucugacacgaaccgaccguggcugguacugcgauaacgcugggagcgucucguuuuucccccaagccgagacguguaaggugugcucuaauagaguuuucugcgacaccaugaacuccuugacacuaccuucagaagugaaucuguguaacauugauaucuucaauccaaaauaugacugcaagauaaugacaaguaaaaccgaugucagcuccucugugauuacaagccucggagcaaucguaucauguuacgguaagacuaaaugcaccgcuaguaacaagaauaagggcaucauuaaaacauuuuccaacgggugugacuauguuagcaauaagggaguggacaccgucucugugggcaacacucuguacuaugucaacaaacaggagggucagucacuuuacgugaagggggagccgaucauuaauuucuaugauccccugguuuuuccuagugacgaauuugaugccagcauaucccaagugaacgagaaaaucaaucagucuuuggcguuuauuaggaagucggacgaacuccugcacaacguaaaugucggaaagagcacgacaaacaucaugaucaccacuauuauaaucgugauuaucguuauuuuacugcuacucaucgccgugggccuguuccuuuacugcaaagcacgguccaccccagucacauugucaaaggaucagcugaguggcauaaauaacaucgcuuucucuaauugaggacuaguacuggcugcaucucccuuuccucuguccuccauccuucucccaggauggugaagggggaccugguacccagugauccccaccccaggauccuaaaucaugacuuaccugcuaauaaaaacucauuggaaaagugagaagaucuaaaaaaaaaaaaaaaaaaaaaaaaaaaaaaaaaaaaaaaaaaaaaaaaaaaaaaaaaaaaaaaaugcaucccccccccccccccccccccccccccccccaaaggcucuuuucagagccaccagaauu

SEQ ID NO: 17739 - RNA, 1983 nt, Artificial Sequence
  mRNA product Design c-3 comprising derived and/or modified sequence from HRSV(Memphis-37)__AIY60640.1__F_DSCav1_mut6 (opt4)
gggagaguccgcucagccagguugcagaagcggcuuagcguguguccuaaucuucucucugcguguagguaggccugugccgcaaacaagcuuaccauggagcugcccauccugaagaccaacgccaucaccaccauccuggccgccgugacccugugcuucgccagcagccagaacaucaccgaggaguucuaccagagcaccugcagcgccgugagcaagggcuaccugggcgcccugagaaccggcugguacaccagcgugaucaccaucgagcugagcaacaucaaggagaacaagugcaacggcaccgacgccaaggugaagcugaucaagcaggagcuggacaaguacaagaacgccgugaccgaccugcagaugcugaugugcagcacccccgccgccggcagcggcagcgccaucgccagcggcaucgccgugugcaaggugcugcaccuggagggcgaggugaacaagaucaagaacgcccugcugagcaccaacaaggccguggugagccugagcaacggcgugagcgugcugaccuucaaggugcuggaccugaagaacuacaucgacaagcagcugcugcccauccugaacaagcagagcugcagcauccccaaccccgagaccgugauggaguuccagcagaagaacaacagacugcuggagaucaccagagaguucagcgugaacgccggcgugaccacccccgugagcaccuacaugcugaccaacagcgagcugcugagccugaucaacgacaugcccaucaccaacgaccagaagaagcugaugagcaacaacgugcagaucgugagacagcagagcuacagcaucaugugcaucaucaaggaggaggugcuggccuacguggugcagcugccccuguacggcgugaucgacacccccugcuggaagcugcacaccagcccccugugcaccaccaacaccaaggagggcagcaacaucugccugaccagaaccgacagaggcugguacugcgacaacgccggcagcgugagcuucuucccccaggccgagaccugcaaggugugcagcaacagaguguucugcgacaccaugaacagccugacccugcccagcgaggugaaccugugcaacaucgacaucuucaaccccaaguacgacugcaagaucaugaccagcaagaccgacgugagcagcagcgugaucaccagccugggcgccaucgugagcugcuacggcaagaccaagugcaccgccagcaacaagaacaagggcaucaucaagaccuucagcaacggcugcgacuacgugagcaacaagggcguggacaccgugagcgugggcaacacccuguacuacgugaacaagcaggagggccagagccuguacgugaagggcgagcccaucaucaacuucuacgacccccugguguuccccagcgacgaguucgacgccagcaucagccaggugaacgagaagaucaaccagagccuggccuucaucagaaagagcgacgagcugcugcacaacgugaacgugggcaagagcaccaccaacaucaugaucaccaccaucaucaucgugaucaucgugauccugcugcugcugaucgccgugggccuguuccuguacugcaaggccagaagcacccccgugacccugagcaaggaccagcugagcggcaucaacaacaucgccuucagcaacugaggacuaguacuggcugcaucucccuuuccucuguccuccauccuucucccaggauggugaagggggaccugguacccagugauccccaccccaggauccuaaaucaugacuuaccugcuaauaaaaacucauuggaaaagugagaagaucuaaaaaaaaaaaaaaaaaaaaaaaaaaaaaaaaaaaaaaaaaaaaaaaaaaaaaaaaaaaaaaaaugcaucccccccccccccccccccccccccccccccaaaggcucuuuucagagccaccagaauu

SEQ ID NO: 17740 - RNA, 1983 nt, Artificial Sequence
  mRNA product Design c-3 comprising derived and/or modified sequence from HRSV(Memphis-37)__AIY60640.1__F_DSCav1_mut6 (opt5)
gggagaguccgcucagccagguugcagaagcggcuuagcguguguccuaaucuucucucugcguguagguaggccugugccgcaaacaagcuuaccauggagcugcccauccucaagaccaacgccauuacaacgauccuggcugccgugacccuuugcuucgcgagcucccagaauauuacagaagaguuuuaccaaucuaccuguagcgcugucuccaaaggcuaucugggggcccucagaacaggaugguacaccucuguuaucacaauugaacugagcaacaucaaggagaauaaaugcaacggcaccgacgccaaggugaaacuuaucaagcaggaacuggauaaguauaaaaaugcugugacggaccuccagaugcugauguguuccaccccugccgcugggucuggaagcgccauugcguccggcaucgccgucugcaaggugcugcaccucgagggggagguuaacaaaauuaagaaugcucugcuuagcacaaacaaagccguggucucucuguccaauggagugagcguucucaccuucaaggugcuggaucuuaagaacuacaucgacaaacagcugcucccgauucugaauaagcaaucuuguuccauccccaacccugaaacagucauggaguuucagcagaaaaauaaccggcugcucgaaauuacccgcgaguucagcgugaaugcuggcgugacgacacccgucucuaccuauaugcugacaaacuccgagcuucugagccucaucaacgauaugccuaucaccaaugaccagaagaaacugauguccaacaauguucaaauugugagacagcagucuuacagcaucaugugcauuaucaaggaagaggugcuugccuaugucgugcagcugccccucuacggcguuauugauaccccuuguuggaaacugcauacauccccgcugugcacgaccaacacaaaggaagggagcaauaucugucucacccggacagaccgcggaugguacugcgauaacgcgggcucuguguccuuuuucccccaagccgagaccuguaaggucugcagcaauagaguguuuugcgacacgaugaacucucugacacuuccuagcgaaguuaaucuguguaacaucgauauuuucaaucccaaauaugacugcaagaucaugaccuccaaaaccgaugugucuagcuccgucauuacaagccucggggcuaucgugucuuguuacggaaagaccaaaugcacagccuccaacaagaauaagggcauuaucaaaacguuuagcaacgggugugacuaugucucuaauaagggaguggacaccguuuccgugggcaacacacuguacuaugucaacaaacaggagggccagagccuuuacgugaagggggagccuaucauuaauuucuaugauccccugguuuuuccguccgacgaauuugaugcuucuaucagccaagugaacgagaaaauuaaucagucccucgccuucauccggaagucugacgaacugcugcacaacgucaaugugggaaagagcaccacaaacauuaugaucaccacgauuaucaucgugauuaucguuauucuccugcuucugaucgccgucggccucuuccuguacugcaaagcucgcuccaccccugugacacugagcaaggaucagcuuucugggauuaauaacaucgcguucuccaauugaggacuaguacuggcugcaucucccuuuccucuguccuccauccuucucccaggauggugaagggggaccugguacccagugauccccaccccaggauccuaaaucaugacuuaccugcuaauaaaaacucauuggaaaagugagaagaucuaaaaaaaaaaaaaaaaaaaaaaaaaaaaaaaaaaaaaaaaaaaaaaaaaaaaaaaaaaaaaaaaugcaucccccccccccccccccccccccccccccccaaaggcucuuuucagagccaccagaauu

SEQ ID NO: 17741 - RNA, 1983 nt, Artificial Sequence
  mRNA product Design c-3 comprising derived and/or modified sequence from HRSV(Memphis-37)__AIY60640.1__F_DSCav1_mut6 (opt6)
gggagaguccgcucagccagguugcagaagcggcuuagcguguguccuaaucuucucucugcguguagguaggccugugccgcaaacaagcuuaccauggaacuaccaauuuuaaaaacaaacgcaauuacaacuauacucgcagcaguaacauuauguuucgccucaucccaaaacauaacagaagaauuuuaccaaucaacaugcagcgcaguaucaaaaggauaucucggagcauuacgaacagguugguacacaucuguaaucacuauagaacuaucaaacauaaaagaaaacaaaugcaauggaaccgacgcaaaaguaaaauuaauaaaacaagaacucgauaaauacaaaaaugcaguaacagaccuccaaaugcucauguguucaacaccagccgcaggaucagguuccgccauagcaucuggcauagcaguaugcaaaguacuccacuuagaaggagaaguuaacaaaauaaaaaacgcacuauuaucaacaaacaaagcaguaguaucccucucaaacggagucucaguauuaacauucaaaguauuagaccuaaaaaacuacauagacaaacaacuacuuccaauacucaacaaacaaucaugcucaauaccaaacccagaaaccguaauggaauuucaacaaaaaaacaaccgacuacuagaaaucacacgagaauuuucaguaaacgccggugucacaacuccaguaucaacuuauauguuaaccaacucagaacuauuaucauuaauaaacgauaugcccauaacuaacgaccaaaaaaaauuaaugucaaacaacguacaaauaguacgccaacaaaguuacucaauaaugugcaucauaaaagaagaaguauuagcguacguuguacaacuaccucuauacggagucauagacacaccaugcuggaaacuucacacaucaccacuauguacaacaaacacaaaagaaggcaguaacauaugccuaacaagaacagaccguggaugguauugugacaacgcuggaucuguaucauucuucccucaagcagaaaccuguaaaguuugcucaaacagagucuucugugacacaaugaacucucuaacacuaccuuccgaagugaaccucuguaacauagacauauucaauccaaaauaugauugcaaaauaaugacuucaaaaacagauguaucauccucuguuauaacaucauuaggcgccauaguuucaugcuacggaaaaacuaaaugcacagcaucaaacaaaaacaaaggaauaauaaaaaccuucucaaauggaugcgacuacguaagcaacaaaggcguagacacaguaucaguagguaauacauuauacuacguaaacaaacaagaaggacaaucacuuuauguuaaaggagaaccuauaauaaacuucuacgacccacuuguauuuccauccgaugaauuugacgcaucuauaucacaagucaacgaaaaaauaaaccaaucauuagcauucauucgaaaauccgaugaacuacuccauaacguaaaugucggaaaaucaacaaccaacauaaugaucacaacaauaaucauagugauaauaguaauacuccuacuacuaaucgcaguaggucuauuccuauauuguaaagcaagaucuacuccaguuacacucucuaaagaccaauuaagcgguaucaacaacaucgccuucagcaauuaaggacuaguacuggcugcaucucccuuuccucuguccuccauccuucucccaggauggugaagggggaccugguacccagugauccccaccccaggauccuaaaucaugacuuaccugcuaauaaaaacucauuggaaaagugagaagaucuaaaaaaaaaaaaaaaaaaaaaaaaaaaaaaaaaaaaaaaaaaaaaaaaaaaaaaaaaaaaaaaaugcaucccccccccccccccccccccccccccccccaaaggcucuuuucagagccaccagaauu

SEQ ID NO: 17742 - RNA, 1983 nt, Artificial Sequence
  mRNA product Design c-3 comprising derived and/or modified sequence from HRSV(Memphis-37)__AIY60640.1__F_DSCav1_mut6 (opt11)
gggagaguccgcucagccagguugcagaagcggcuuagcguguguccuaaucuucucucugcguguagguaggccugugccgcaaacaagcuuaccauggagcugcccauccucaagaccaacgccaucaccacgauccuggccgcggugacccugugcuucgcgagcucccaaaacaucaccgaggaguucuaccagagcacgugcuccgccgucagcaagggcuaccucggggcccugcgcaccggcugguacaccuccgugaucaccaucgagcugagcaacaucaaggaaaacaagugcaacgggacggacgcaaaggugaagcucaucaagcaggagcuggauaaguacaagaacgcggucacggaccugcagaugcucaugugcuccaccccggccgccggcagcggguccgccaucgcguccggcaucgccgugugcaagguguugcaccuggagggcgaggucaacaagaucaagaacgcccuccuuuccaccaauaaggcuguugugagccuguccaacggggucagcgugcucaccuucaaggugcuggaccugaagaacuacaucgacaagcagcuccugcccauccugaacaagcaguccugcagcauccccaaccccgagacagucauggaguuccagcagaagaacaaccggcuccuggagaucacccgcgaguucuccguuaacgccggggugaccaccccgguaagcacauacaugcugaccaacagcgagcuccugagccugaucaacgacaugcccaucaccaacgaccagaagaagcucaugagcaacaacgugcagaucgugcggcagcaguccuacagcaucaugugcaucaucaaggaggagguccuggcguacguggugcaacugccccucuacggggucaucgacacccccugcuggaagcugcacacguccccgcugugcaccaccaacaccaaggagggcagcaacaucugccucacgcgcaccgaccgggggugguacugcgacaacgcaggcuccgugagcuucuucccccaggccgagaccugcaaggugugcuccaaccgcgucuucugcgacaccaugaacagccugacgcugcccuccgaggugaaccucugcaacaucgacaucuucaaccccaaguacgacuguaagaucaugaccagcaagaccgaugucuccagcuccgugaucaccagccugggcgccauaguguccuguuaugggaagacgaagugcaccgccagcaacaagaacaaaggcaucaucaagaccuucuccaacgggugcgacuacgucagcaacaagggcguggacacaguguccgucggcaacacgcuguacuacgugaacaagcaggaggggcagagccucuacgugaagggcgagccgaucaucaacuucuacgauccccuggucuuccccagcgacgaguucgacgcguccaucagccaagugaacgagaagaucaaccagucccuggccuucauccgcaagagcgacgagcuccugcacaacgugaacgucgggaaguccaccaccaacaucaugaucaccaccaucaucaucgugaucaucgucauccugcuccugcugaucgccgucggccucuuccuguacugcaaggcccggagcacgcccgugacccuguccaaggaccagcugucgggcaucaacaacaucgccuucuccaacugaggacuaguacuggcugcaucucccuuuccucuguccuccauccuucucccaggauggugaagggggaccugguacccagugauccccaccccaggauccuaaaucaugacuuaccugcuaauaaaaacucauuggaaaagugagaagaucuaaaaaaaaaaaaaaaaaaaaaaaaaaaaaaaaaaaaaaaaaaaaaaaaaaaaaaaaaaaaaaaaugcaucccccccccccccccccccccccccccccccaaaggcucuuuucagagccaccagaauu

SEQ ID NO: 17743 - RNA, 1979 nt, Artificial Sequence
  mRNA product Design c-4 comprising derived and/or modified sequence from HRSV(Memphis-37)__AIY60640.1__F_DSCav1_mut6 (opt1)
gggagaguccgcucagccagguugcagaagcggcuuagcguguguccuaaucuucucucugcguguagguaggccugugccgcaaacaagcuuaccauggagcugcccauccucaagaccaacgccaucaccacgauccuggccgcggugacccugugcuucgccagcucccagaacaucaccgaggaguucuaccagagcacgugcuccgccgucagcaagggcuaccucggcgcccugcgcaccgggugguacaccagcgugaucaccaucgagcuguccaacaucaaggagaacaagugcaacggcaccgacgccaaggugaagcucaucaagcaggagcuggacaaguacaagaacgcggucacggaccugcagaugcugaugugcagcaccccggccgccggcuccgggagcgcgaucgccuccggcaucgccgucugcaaggugcugcaccucgagggcgaggugaacaagaucaagaacgcccugcuguccaccaacaaggccgucgugagccucuccaacggggugagcguccugaccuucaaggugcuggaccucaagaacuacaucgacaagcagcugcugcccauccugaacaagcagagcugcuccauccccaaccccgagaccgucauggaguuccagcagaagaacaaccgccuccuggagaucacgcgggaguucagcgugaacgcgggcgugaccacccccgucuccaccuacaugcugacgaacagcgagcuccugucccugaucaacgacaugccgaucaccaacgaccagaagaagcucaugagcaacaacgugcagaucgugcgccagcaguccuacagcaucaugugcaucaucaaggaggagguccuggccuacguggugcagcugccccucuacggggucaucgacacccccugcuggaagcugcacaccagcccccugugcacgaccaacaccaaggagggcuccaacaucugccucacccggacggaccgcgggugguacugcgacaacgccggcagcguguccuucuucccgcaggccgagaccugcaaggucugcagcaaccggguguucugcgacaccaugaacucccugacccugcccagcgaggugaaccucugcaacaucgacaucuucaaccccaaguacgacugcaagaucaugacguccaagaccgacgucagcuccagcgugaucaccucccugggcgccaucgugagcugcuacgggaagaccaagugcacggcgagcaacaagaacaagggcaucaucaagaccuucuccaacgggugcgacuacgucagcaacaagggcguggacaccguguccgucggcaacacccuguacuacgugaacaagcaggagggccagagccucuacgugaagggggagcccaucaucaacuucuacgacccgcuggucuuccccuccgacgaguucgacgccagcaucucccaggugaacgagaagaucaaccagagccuggccuucauccggaaguccgacgagcuccugcacaacgugaacgucggcaagagcaccacgaacaucaugaucaccaccaucaucaucgugaucaucgugauccugcugcuccugaucgccgucgggcuguuccucuacugcaaggcccgcuccacccccgugacgcugagcaaggaccagcuguccgggaucaacaacaucgcguucagcaacugaggacuaguggaagcauuuuccuggcugauuaaaagaaauuacucagcuauggucaucuguuccuguuagaaggcuaugcagcauauuauauacuaugcgcauguuaugaaaugcauaauaaaaaauuuuaaaaaaucuaaaagaucuaaaaaaaaaaaaaaaaaaaaaaaaaaaaaaaaaaaaaaaaaaaaaaaaaaaaaaaaaaaaaaaaugcaucccccccccccccccccccccccccccccccaaaggcucuuuucagagccaccagaauu

SEQ ID NO: 17744 - RNA, 1979 nt, Artificial Sequence
  mRNA product Design c-4 comprising derived and/or modified sequence from HRSV(Memphis-37)__AIY60640.1__F_DSCav1_mut6 (opt1)
gggagaguccgcucagccagguugcagaagcggcuuagcguguguccuaaucuucucucugcguguagguaggccugugccgcaaacaagcuuaccauggagcugcccauccucaagaccaacgccaucaccacgauccuggccgcggugacccugugcuucgccagcucccagaacaucaccgaggaguucuaccagagcacgugcuccgccgucagcaagggcuaccucggggcccugcgcaccggcugguacaccuccgugaucaccaucgagcugagcaacaucaaggagaacaagugcaacgggaccgacgccaaggugaagcucaucaagcaggagcuggacaaguacaagaacgcggucacggaccugcagaugcucaugugcuccaccccggccgccggcagcggguccgccaucgcgagcggcaucgccgugugcaaggugcugcaccuggagggcgaggucaacaagaucaagaacgcccuccuguccaccaacaaggccguggugagccuguccaacggggucagcgugcucaccuucaaggugcuggaccugaagaacuacaucgacaagcagcuccugcccauccugaacaagcaguccugcagcauccccaaccccgagacggucauggaguuccagcagaagaacaaccggcuccuggagaucacccgcgaguucuccgugaacgccggcgugaccaccccggucagcacguacaugcugaccaacuccgagcuccugagccugaucaacgacaugcccaucaccaacgaccagaagaagcucaugagcaacaacgugcagaucgugcggcagcaguccuacagcaucaugugcaucaucaaggaggagguccuggcguacguggugcagcugccccucuacggggucaucgacacccccugcuggaagcugcacacguccccgcugugcaccaccaacaccaaggagggcagcaacaucugccucacgcgcaccgaccgggggugguacugcgacaacgccggcuccgugagcuucuucccccaggccgagaccugcaaggugugcuccaaccgcgucuucugcgacaccaugaacagccugacgcugcccuccgaggugaaccucugcaacaucgacaucuucaaccccaaguacgacugcaagaucaugaccagcaagaccgacgucuccagcuccgugaucaccagccugggcgccaucguguccugcuacgggaagacgaagugcaccgccagcaacaagaacaagggcaucaucaagaccuucuccaacgggugcgacuacgucagcaacaagggcguggacaccguguccgucggcaacacgcuguacuacgugaacaagcaggaggggcagagccucuacgugaagggcgagccgaucaucaacuucuacgacccccuggucuuccccagcgacgaguucgacgcguccaucagccaggugaacgagaagaucaaccagucccuggccuucauccgcaagagcgacgagcuccugcacaacgugaacgucgggaaguccaccaccaacaucaugaucaccaccaucaucaucgugaucaucgugauccugcuccugcugaucgccgucggccucuuccuguacugcaaggcccggagcacgcccgugacccuguccaaggaccagcugagcgggaucaacaacaucgccuucuccaacugaggacuaguggaagcauuuuccuggcugauuaaaagaaauuacucagcuauggucaucuguuccuguuagaaggcuaugcagcauauuauauacuaugcgcauguuaugaaaugcauaauaaaaaauuuuaaaaaaucuaaaagaucuaaaaaaaaaaaaaaaaaaaaaaaaaaaaaaaaaaaaaaaaaaaaaaaaaaaaaaaaaaaaaaaaugcaucccccccccccccccccccccccccccccccaaaggcucuuuucagagccaccagaauu

SEQ ID NO: 17745 - RNA, 1979 nt, Artificial Sequence
  mRNA product Design c-4 comprising derived and/or modified sequence from HRSV(Memphis-37)__AIY60640.1__F_DSCav1_mut6 (opt2)
gggagaguccgcucagccagguugcagaagcggcuuagcguguguccuaaucuucucucugcguguagguaggccugugccgcaaacaagcuuaccauggagcuccccauccucaagaccaacgccaucaccaccauccucgccgccgucacccucugcuucgccuccucccagaacaucaccgaggaguucuaccaguccaccugcuccgccgucuccaagggcuaccucggcgcccuccgcaccggcugguacaccuccgucaucaccaucgagcucuccaacaucaaggagaacaagugcaacggcaccgacgccaaggucaagcucaucaagcaggagcucgacaaguacaagaacgccgucaccgaccuccagaugcucaugugcuccacccccgccgccggcuccggcuccgccaucgccuccggcaucgccgucugcaagguccuccaccucgagggcgaggucaacaagaucaagaacgcccuccucuccaccaacaaggccgucgucucccucuccaacggcgucuccguccucaccuucaagguccucgaccucaagaacuacaucgacaagcagcuccuccccauccucaacaagcaguccugcuccauccccaaccccgagaccgucauggaguuccagcagaagaacaaccgccuccucgagaucacccgcgaguucuccgucaacgccggcgucaccacccccgucuccaccuacaugcucaccaacuccgagcuccucucccucaucaacgacaugcccaucaccaacgaccagaagaagcucauguccaacaacguccagaucguccgccagcaguccuacuccaucaugugcaucaucaaggaggagguccucgccuacgucguccagcucccccucuacggcgucaucgacacccccugcuggaagcuccacaccuccccccucugcaccaccaacaccaaggagggcuccaacaucugccucacccgcaccgaccgcggcugguacugcgacaacgccggcuccgucuccuucuucccccaggccgagaccugcaaggucugcuccaaccgcgucuucugcgacaccaugaacucccucacccuccccuccgaggucaaccucugcaacaucgacaucuucaaccccaaguacgacugcaagaucaugaccuccaagaccgacgucuccuccuccgucaucaccucccucggcgccaucgucuccugcuacggcaagaccaagugcaccgccuccaacaagaacaagggcaucaucaagaccuucuccaacggcugcgacuacgucuccaacaagggcgucgacaccgucuccgucggcaacacccucuacuacgucaacaagcaggagggccagucccucuacgucaagggcgagcccaucaucaacuucuacgacccccucgucuuccccuccgacgaguucgacgccuccaucucccaggucaacgagaagaucaaccagucccucgccuucauccgcaaguccgacgagcuccuccacaacgucaacgucggcaaguccaccaccaacaucaugaucaccaccaucaucaucgucaucaucgucauccuccuccuccucaucgccgucggccucuuccucuacugcaaggcccgcuccacccccgucacccucuccaaggaccagcucuccggcaucaacaacaucgccuucuccaacugaggacuaguggaagcauuuuccuggcugauuaaaagaaauuacucagcuauggucaucuguuccuguuagaaggcuaugcagcauauuauauacuaugcgcauguuaugaaaugcauaauaaaaaauuuuaaaaaaucuaaaagaucuaaaaaaaaaaaaaaaaaaaaaaaaaaaaaaaaaaaaaaaaaaaaaaaaaaaaaaaaaaaaaaaaugcaucccccccccccccccccccccccccccccccaaaggcucuuuucagagccaccagaauu

SEQ ID NO: 17746 - RNA, 1979 nt, Artificial Sequence
  mRNA product Design c-4 comprising derived and/or modified sequence from HRSV(Memphis-37)__AIY60640.1__F_DSCav1_mut6 (opt3)
gggagaguccgcucagccagguugcagaagcggcuuagcguguguccuaaucuucucucugcguguagguaggccugugccgcaaacaagcuuaccauggagcugcccauccucaagaccaacgccauuacaacuauacuugcugcagugacgcugugcuucgccagcucccagaauaucaccgaagaguuuuaccaaucuacauguucagcggucaguaaaggcuauuugggggcuuuaagaacuggaugguacaccagcguuauuacaaucgaacuguccaacauuaaggagaauaaaugcaacgguaccgacgccaaggugaaacuaaucaagcaggaacucgauaaguauaaaaaugcaguaacugaccugcagaugcuuauguguucuacuccugccgcuggcucggggucagcaauagccagcggaaucgcugugugcaagguccugcacuuggagggcgaggugaacaaaauuaagaaugcccuccugaguaccaacaaagcgguugugucccugucuaauggugucagcgugcucacguucaagguauuagaucugaagaacuacaucgacaaacagcuuuugccaauucugaauaagcaauccuguucaaucccgaaccccgaaacuguuauggaguuucagcagaaaaauaacaggcuacucgaaauaacccgggaguucagugugaaugcaggggucacaacuccugugagcaccuauaugcugacaaacucugagcuucuguccuugauuaacgauaugccaaucaccaaugaccagaagaaacucaugucaaacaaugugcaaauuguccgccagcagagcuacaguaucaugugcaucauuaaggaagagguucuggccuaugugguacaguuaccccuguacggagugauagauacgccuuguuggaaacuccauacuucuccacuuugcacaaccaacacuaaggaaggcuccaauaucugucugacacgaaccgaccguggcugguacugcgauaacgcugggagcgucucguuuuucccccaagccgagacguguaaggugugcucuaauagaguuuucugcgacaccaugaacuccuugacacuaccuucagaagugaaucuguguaacauugauaucuucaauccaaaauaugacugcaagauaaugacaaguaaaaccgaugucagcuccucugugauuacaagccucggagcaaucguaucauguuacgguaagacuaaaugcaccgcuaguaacaagaauaagggcaucauuaaaacauuuuccaacgggugugacuauguuagcaauaagggaguggacaccgucucugugggcaacacucuguacuaugucaacaaacaggagggucagucacuuuacgugaagggggagccgaucauuaauuucuaugauccccugguuuuuccuagugacgaauuugaugccagcauaucccaagugaacgagaaaaucaaucagucuuuggcguuuauuaggaagucggacgaacuccugcacaacguaaaugucggaaagagcacgacaaacaucaugaucaccacuauuauaaucgugauuaucguuauuuuacugcuacucaucgccgugggccuguuccuuuacugcaaagcacgguccaccccagucacauugucaaaggaucagcugaguggcauaaauaacaucgcuuucucuaauugaggacuaguggaagcauuuuccuggcugauuaaaagaaauuacucagcuauggucaucuguuccuguuagaaggcuaugcagcauauuauauacuaugcgcauguuaugaaaugcauaauaaaaaauuuuaaaaaaucuaaaagaucuaaaaaaaaaaaaaaaaaaaaaaaaaaaaaaaaaaaaaaaaaaaaaaaaaaaaaaaaaaaaaaaaugcaucccccccccccccccccccccccccccccccaaaggcucuuuucagagccaccagaauu

SEQ ID NO: 17747 - RNA, 1979 nt, Artificial Sequence
  mRNA product Design c-4 comprising derived and/or modified sequence from HRSV(Memphis-37)__AIY60640.1__F_DSCav1_mut6 (opt4)
gggagaguccgcucagccagguugcagaagcggcuuagcguguguccuaaucuucucucugcguguagguaggccugugccgcaaacaagcuuaccauggagcugcccauccugaagaccaacgccaucaccaccauccuggccgccgugacccugugcuucgccagcagccagaacaucaccgaggaguucuaccagagcaccugcagcgccgugagcaagggcuaccugggcgcccugagaaccggcugguacaccagcgugaucaccaucgagcugagcaacaucaaggagaacaagugcaacggcaccgacgccaaggugaagcugaucaagcaggagcuggacaaguacaagaacgccgugaccgaccugcagaugcugaugugcagcacccccgccgccggcagcggcagcgccaucgccagcggcaucgccgugugcaaggugcugcaccuggagggcgaggugaacaagaucaagaacgcccugcugagcaccaacaaggccguggugagccugagcaacggcgugagcgugcugaccuucaaggugcuggaccugaagaacuacaucgacaagcagcugcugcccauccugaacaagcagagcugcagcauccccaaccccgagaccgugauggaguuccagcagaagaacaacagacugcuggagaucaccagagaguucagcgugaacgccggcgugaccacccccgugagcaccuacaugcugaccaacagcgagcugcugagccugaucaacgacaugcccaucaccaacgaccagaagaagcugaugagcaacaacgugcagaucgugagacagcagagcuacagcaucaugugcaucaucaaggaggaggugcuggccuacguggugcagcugccccuguacggcgugaucgacacccccugcuggaagcugcacaccagcccccugugcaccaccaacaccaaggagggcagcaacaucugccugaccagaaccgacagaggcugguacugcgacaacgccggcagcgugagcuucuucccccaggccgagaccugcaaggugugcagcaacagaguguucugcgacaccaugaacagccugacccugcccagcgaggugaaccugugcaacaucgacaucuucaaccccaaguacgacugcaagaucaugaccagcaagaccgacgugagcagcagcgugaucaccagccugggcgccaucgugagcugcuacggcaagaccaagugcaccgccagcaacaagaacaagggcaucaucaagaccuucagcaacggcugcgacuacgugagcaacaagggcguggacaccgugagcgugggcaacacccuguacuacgugaacaagcaggagggccagagccuguacgugaagggcgagcccaucaucaacuucuacgacccccugguguuccccagcgacgaguucgacgccagcaucagccaggugaacgagaagaucaaccagagccuggccuucaucagaaagagcgacgagcugcugcacaacgugaacgugggcaagagcaccaccaacaucaugaucaccaccaucaucaucgugaucaucgugauccugcugcugcugaucgccgugggccuguuccuguacugcaaggccagaagcacccccgugacccugagcaaggaccagcugagcggcaucaacaacaucgccuucagcaacugaggacuaguggaagcauuuuccuggcugauuaaaagaaauuacucagcuauggucaucuguuccuguuagaaggcuaugcagcauauuauauacuaugcgcauguuaugaaaugcauaauaaaaaauuuuaaaaaaucuaaaagaucuaaaaaaaaaaaaaaaaaaaaaaaaaaaaaaaaaaaaaaaaaaaaaaaaaaaaaaaaaaaaaaaaugcaucccccccccccccccccccccccccccccccaaaggcucuuuucagagccaccagaauu

SEQ ID NO: 17748 - RNA, 1979 nt, Artificial Sequence
  mRNA product Design c-4 comprising derived and/or modified sequence from HRSV(Memphis-37)__AIY60640.1__F_DSCav1_mut6 (opt5)
gggagaguccgcucagccagguugcagaagcggcuuagcguguguccuaaucuucucucugcguguagguaggccugugccgcaaacaagcuuaccauggagcugcccauccucaagaccaacgccauuacaacgauccuggcugccgugacccuuugcuucgcgagcucccagaauauuacagaagaguuuuaccaaucuaccuguagcgcugucuccaaaggcuaucugggggcccucagaacaggaugguacaccucuguuaucacaauugaacugagcaacaucaaggagaauaaaugcaacggcaccgacgccaaggugaaacuuaucaagcaggaacuggauaaguauaaaaaugcugugacggaccuccagaugcugauguguuccaccccugccgcugggucuggaagcgccauugcguccggcaucgccgucugcaaggugcugcaccucgagggggagguuaacaaaauuaagaaugcucugcuuagcacaaacaaagccguggucucucuguccaauggagugagcguucucaccuucaaggugcuggaucuuaagaacuacaucgacaaacagcugcucccgauucugaauaagcaaucuuguuccauccccaacccugaaacagucauggaguuucagcagaaaaauaaccggcugcucgaaauuacccgcgaguucagcgugaaugcuggcgugacgacacccgucucuaccuauaugcugacaaacuccgagcuucugagccucaucaacgauaugccuaucaccaaugaccagaagaaacugauguccaacaauguucaaauugugagacagcagucuuacagcaucaugugcauuaucaaggaagaggugcuugccuaugucgugcagcugccccucuacggcguuauugauaccccuuguuggaaacugcauacauccccgcugugcacgaccaacacaaaggaagggagcaauaucugucucacccggacagaccgcggaugguacugcgauaacgcgggcucuguguccuuuuucccccaagccgagaccuguaaggucugcagcaauagaguguuuugcgacacgaugaacucucugacacuuccuagcgaaguuaaucuguguaacaucgauauuuucaaucccaaauaugacugcaagaucaugaccuccaaaaccgaugugucuagcuccgucauuacaagccucggggcuaucgugucuuguuacggaaagaccaaaugcacagccuccaacaagaauaagggcauuaucaaaacguuuagcaacgggugugacuaugucucuaauaagggaguggacaccguuuccgugggcaacacacuguacuaugucaacaaacaggagggccagagccuuuacgugaagggggagccuaucauuaauuucuaugauccccugguuuuuccguccgacgaauuugaugcuucuaucagccaagugaacgagaaaauuaaucagucccucgccuucauccggaagucugacgaacugcugcacaacgucaaugugggaaagagcaccacaaacauuaugaucaccacgauuaucaucgugauuaucguuauucuccugcuucugaucgccgucggccucuuccuguacugcaaagcucgcuccaccccugugacacugagcaaggaucagcuuucugggauuaauaacaucgcguucuccaauugaggacuaguggaagcauuuuccuggcugauuaaaagaaauuacucagcuauggucaucuguuccuguuagaaggcuaugcagcauauuauauacuaugcgcauguuaugaaaugcauaauaaaaaauuuuaaaaaaucuaaaagaucuaaaaaaaaaaaaaaaaaaaaaaaaaaaaaaaaaaaaaaaaaaaaaaaaaaaaaaaaaaaaaaaaugcaucccccccccccccccccccccccccccccccaaaggcucuuuucagagccaccagaauu

SEQ ID NO: 17749 - RNA, 1979 nt, Artificial Sequence
  mRNA product Design c-4 comprising derived and/or modified sequence from HRSV(Memphis-37)__AIY60640.1__F_DSCav1_mut6 (opt6)
gggagaguccgcucagccagguugcagaagcggcuuagcguguguccuaaucuucucucugcguguagguaggccugugccgcaaacaagcuuaccauggaacuaccaauuuuaaaaacaaacgcaauuacaacuauacucgcagcaguaacauuauguuucgccucaucccaaaacauaacagaagaauuuuaccaaucaacaugcagcgcaguaucaaaaggauaucucggagcauuacgaacagguugguacacaucuguaaucacuauagaacuaucaaacauaaaagaaaacaaaugcaauggaaccgacgcaaaaguaaaauuaauaaaacaagaacucgauaaauacaaaaaugcaguaacagaccuccaaaugcucauguguucaacaccagccgcaggaucagguuccgccauagcaucuggcauagcaguaugcaaaguacuccacuuagaaggagaaguuaacaaaauaaaaaacgcacuauuaucaacaaacaaagcaguaguaucccucucaaacggagucucaguauuaacauucaaaguauuagaccuaaaaaacuacauagacaaacaacuacuuccaauacucaacaaacaaucaugcucaauaccaaacccagaaaccguaauggaauuucaacaaaaaaacaaccgacuacuagaaaucacacgagaauuuucaguaaacgccggugucacaacuccaguaucaacuuauauguuaaccaacucagaacuauuaucauuaauaaacgauaugcccauaacuaacgaccaaaaaaaauuaaugucaaacaacguacaaauaguacgccaacaaaguuacucaauaaugugcaucauaaaagaagaaguauuagcguacguuguacaacuaccucuauacggagucauagacacaccaugcuggaaacuucacacaucaccacuauguacaacaaacacaaaagaaggcaguaacauaugccuaacaagaacagaccguggaugguauugugacaacgcuggaucuguaucauucuucccucaagcagaaaccuguaaaguuugcucaaacagagucuucugugacacaaugaacucucuaacacuaccuuccgaagugaaccucuguaacauagacauauucaauccaaaauaugauugcaaaauaaugacuucaaaaacagauguaucauccucuguuauaacaucauuaggcgccauaguuucaugcuacggaaaaacuaaaugcacagcaucaaacaaaaacaaaggaauaauaaaaaccuucucaaauggaugcgacuacguaagcaacaaaggcguagacacaguaucaguagguaauacauuauacuacguaaacaaacaagaaggacaaucacuuuauguuaaaggagaaccuauaauaaacuucuacgacccacuuguauuuccauccgaugaauuugacgcaucuauaucacaagucaacgaaaaaauaaaccaaucauuagcauucauucgaaaauccgaugaacuacuccauaacguaaaugucggaaaaucaacaaccaacauaaugaucacaacaauaaucauagugauaauaguaauacuccuacuacuaaucgcaguaggucuauuccuauauuguaaagcaagaucuacuccaguuacacucucuaaagaccaauuaagcgguaucaacaacaucgccuucagcaauuaaggacuaguggaagcauuuuccuggcugauuaaaagaaauuacucagcuauggucaucuguuccuguuagaaggcuaugcagcauauuauauacuaugcgcauguuaugaaaugcauaauaaaaaauuuuaaaaaaucuaaaagaucuaaaaaaaaaaaaaaaaaaaaaaaaaaaaaaaaaaaaaaaaaaaaaaaaaaaaaaaaaaaaaaaaugcaucccccccccccccccccccccccccccccccaaaggcucuuuucagagccaccagaauu

SEQ ID NO: 17750 - RNA, 1979 nt, Artificial Sequence
  mRNA product Design c-4 comprising derived and/or modified sequence from HRSV(Memphis-37)__AIY60640.1__F_DSCav1_mut6 (opt11)
gggagaguccgcucagccagguugcagaagcggcuuagcguguguccuaaucuucucucugcguguagguaggccugugccgcaaacaagcuuaccauggagcugcccauccucaagaccaacgccaucaccacgauccuggccgcggugacccugugcuucgcgagcucccaaaacaucaccgaggaguucuaccagagcacgugcuccgccgucagcaagggcuaccucggggcccugcgcaccggcugguacaccuccgugaucaccaucgagcugagcaacaucaaggaaaacaagugcaacgggacggacgcaaaggugaagcucaucaagcaggagcuggauaaguacaagaacgcggucacggaccugcagaugcucaugugcuccaccccggccgccggcagcggguccgccaucgcguccggcaucgccgugugcaagguguugcaccuggagggcgaggucaacaagaucaagaacgcccuccuuuccaccaauaaggcuguugugagccuguccaacggggucagcgugcucaccuucaaggugcuggaccugaagaacuacaucgacaagcagcuccugcccauccugaacaagcaguccugcagcauccccaaccccgagacagucauggaguuccagcagaagaacaaccggcuccuggagaucacccgcgaguucuccguuaacgccggggugaccaccccgguaagcacauacaugcugaccaacagcgagcuccugagccugaucaacgacaugcccaucaccaacgaccagaagaagcucaugagcaacaacgugcagaucgugcggcagcaguccuacagcaucaugugcaucaucaaggaggagguccuggcguacguggugcaacugccccucuacggggucaucgacacccccugcuggaagcugcacacguccccgcugugcaccaccaacaccaaggagggcagcaacaucugccucacgcgcaccgaccgggggugguacugcgacaacgcaggcuccgugagcuucuucccccaggccgagaccugcaaggugugcuccaaccgcgucuucugcgacaccaugaacagccugacgcugcccuccgaggugaaccucugcaacaucgacaucuucaaccccaaguacgacuguaagaucaugaccagcaagaccgaugucuccagcuccgugaucaccagccugggcgccauaguguccuguuaugggaagacgaagugcaccgccagcaacaagaacaaaggcaucaucaagaccuucuccaacgggugcgacuacgucagcaacaagggcguggacacaguguccgucggcaacacgcuguacuacgugaacaagcaggaggggcagagccucuacgugaagggcgagccgaucaucaacuucuacgauccccuggucuuccccagcgacgaguucgacgcguccaucagccaagugaacgagaagaucaaccagucccuggccuucauccgcaagagcgacgagcuccugcacaacgugaacgucgggaaguccaccaccaacaucaugaucaccaccaucaucaucgugaucaucgucauccugcuccugcugaucgccgucggccucuuccuguacugcaaggcccggagcacgcccgugacccuguccaaggaccagcugucgggcaucaacaacaucgccuucuccaacugaggacuaguggaagcauuuuccuggcugauuaaaagaaauuacucagcuauggucaucuguuccuguuagaaggcuaugcagcauauuauauacuaugcgcauguuaugaaaugcauaauaaaaaauuuuaaaaaaucuaaaagaucuaaaaaaaaaaaaaaaaaaaaaaaaaaaaaaaaaaaaaaaaaaaaaaaaaaaaaaaaaaaaaaaaugcaucccccccccccccccccccccccccccccccaaaggcucuuuucagagccaccagaauu

SEQ ID NO: 17751 - RNA, 1897 nt, Artificial Sequence
  mRNA product Design c-5 comprising derived and/or modified sequence from HRSV(Memphis-37)__AIY60640.1__F_DSCav1_mut6 (opt1)
gggagagcggcucggccauuuugucccagucaguccggaggcugcggcugcagaaguaccgccugcggaguaacugcaaagaagcuuaccauggagcugcccauccucaagaccaacgccaucaccacgauccuggccgcggugacccugugcuucgccagcucccagaacaucaccgaggaguucuaccagagcacgugcuccgccgucagcaagggcuaccucggcgcccugcgcaccgggugguacaccagcgugaucaccaucgagcuguccaacaucaaggagaacaagugcaacggcaccgacgccaaggugaagcucaucaagcaggagcuggacaaguacaagaacgcggucacggaccugcagaugcugaugugcagcaccccggccgccggcuccgggagcgcgaucgccuccggcaucgccgucugcaaggugcugcaccucgagggcgaggugaacaagaucaagaacgcccugcuguccaccaacaaggccgucgugagccucuccaacggggugagcguccugaccuucaaggugcuggaccucaagaacuacaucgacaagcagcugcugcccauccugaacaagcagagcugcuccauccccaaccccgagaccgucauggaguuccagcagaagaacaaccgccuccuggagaucacgcgggaguucagcgugaacgcgggcgugaccacccccgucuccaccuacaugcugacgaacagcgagcuccugucccugaucaacgacaugccgaucaccaacgaccagaagaagcucaugagcaacaacgugcagaucgugcgccagcaguccuacagcaucaugugcaucaucaaggaggagguccuggccuacguggugcagcugccccucuacggggucaucgacacccccugcuggaagcugcacaccagcccccugugcacgaccaacaccaaggagggcuccaacaucugccucacccggacggaccgcgggugguacugcgacaacgccggcagcguguccuucuucccgcaggccgagaccugcaaggucugcagcaaccggguguucugcgacaccaugaacucccugacccugcccagcgaggugaaccucugcaacaucgacaucuucaaccccaaguacgacugcaagaucaugacguccaagaccgacgucagcuccagcgugaucaccucccugggcgccaucgugagcugcuacgggaagaccaagugcacggcgagcaacaagaacaagggcaucaucaagaccuucuccaacgggugcgacuacgucagcaacaagggcguggacaccguguccgucggcaacacccuguacuacgugaacaagcaggagggccagagccucuacgugaagggggagcccaucaucaacuucuacgacccgcuggucuuccccuccgacgaguucgacgccagcaucucccaggugaacgagaagaucaaccagagccuggccuucauccggaaguccgacgagcuccugcacaacgugaacgucggcaagagcaccacgaacaucaugaucaccaccaucaucaucgugaucaucgugauccugcugcuccugaucgccgucgggcuguuccucuacugcaaggcccgcuccacccccgugacgcugagcaaggaccagcuguccgggaucaacaacaucgcguucagcaacugaggacuagucccuguucccagagcccacuuuuuuuucuuuuuuugaaauaaaauagccugucuuucagaucuaaaaaaaaaaaaaaaaaaaaaaaaaaaaaaaaaaaaaaaaaaaaaaaaaaaaaaaaaaaaaaaaugcaucccccccccccccccccccccccccccccccaaaggcucuuuucagagccaccagaauu

SEQ ID NO: 17752 - RNA, 1897 nt, Artificial Sequence
  mRNA product Design c-5 comprising derived and/or modified sequence from HRSV(Memphis-37)__AIY60640.1__F_DSCav1_mut6 (opt1)
gggagagcggcucggccauuuugucccagucaguccggaggcugcggcugcagaaguaccgccugcggaguaacugcaaagaagcuuaccauggagcugcccauccucaagaccaacgccaucaccacgauccuggccgcggugacccugugcuucgccagcucccagaacaucaccgaggaguucuaccagagcacgugcuccgccgucagcaagggcuaccucggggcccugcgcaccggcugguacaccuccgugaucaccaucgagcugagcaacaucaaggagaacaagugcaacgggaccgacgccaaggugaagcucaucaagcaggagcuggacaaguacaagaacgcggucacggaccugcagaugcucaugugcuccaccccggccgccggcagcggguccgccaucgcgagcggcaucgccgugugcaaggugcugcaccuggagggcgaggucaacaagaucaagaacgcccuccuguccaccaacaaggccguggugagccuguccaacggggucagcgugcucaccuucaaggugcuggaccugaagaacuacaucgacaagcagcuccugcccauccugaacaagcaguccugcagcauccccaaccccgagacggucauggaguuccagcagaagaacaaccggcuccuggagaucacccgcgaguucuccgugaacgccggcgugaccaccccggucagcacguacaugcugaccaacuccgagcuccugagccugaucaacgacaugcccaucaccaacgaccagaagaagcucaugagcaacaacgugcagaucgugcggcagcaguccuacagcaucaugugcaucaucaaggaggagguccuggcguacguggugcagcugccccucuacggggucaucgacacccccugcuggaagcugcacacguccccgcugugcaccaccaacaccaaggagggcagcaacaucugccucacgcgcaccgaccgggggugguacugcgacaacgccggcuccgugagcuucuucccccaggccgagaccugcaaggugugcuccaaccgcgucuucugcgacaccaugaacagccugacgcugcccuccgaggugaaccucugcaacaucgacaucuucaaccccaaguacgacugcaagaucaugaccagcaagaccgacgucuccagcuccgugaucaccagccugggcgccaucguguccugcuacgggaagacgaagugcaccgccagcaacaagaacaagggcaucaucaagaccuucuccaacgggugcgacuacgucagcaacaagggcguggacaccguguccgucggcaacacgcuguacuacgugaacaagcaggaggggcagagccucuacgugaagggcgagccgaucaucaacuucuacgacccccuggucuuccccagcgacgaguucgacgcguccaucagccaggugaacgagaagaucaaccagucccuggccuucauccgcaagagcgacgagcuccugcacaacgugaacgucgggaaguccaccaccaacaucaugaucaccaccaucaucaucgugaucaucgugauccugcuccugcugaucgccgucggccucuuccuguacugcaaggcccggagcacgcccgugacccuguccaaggaccagcugagcgggaucaacaacaucgccuucuccaacugaggacuagucccuguucccagagcccacuuuuuuuucuuuuuuugaaauaaaauagccugucuuucagaucuaaaaaaaaaaaaaaaaaaaaaaaaaaaaaaaaaaaaaaaaaaaaaaaaaaaaaaaaaaaaaaaaugcaucccccccccccccccccccccccccccccccaaaggcucuuuucagagccaccagaauu

SEQ ID NO: 17753 - RNA, 1897 nt, Artificial Sequence
  mRNA product Design c-5 comprising derived and/or modified sequence from HRSV(Memphis-37)__AIY60640.1__F_DSCav1_mut6 (opt2)
gggagagcggcucggccauuuugucccagucaguccggaggcugcggcugcagaaguaccgccugcggaguaacugcaaagaagcuuaccauggagcuccccauccucaagaccaacgccaucaccaccauccucgccgccgucacccucugcuucgccuccucccagaacaucaccgaggaguucuaccaguccaccugcuccgccgucuccaagggcuaccucggcgcccuccgcaccggcugguacaccuccgucaucaccaucgagcucuccaacaucaaggagaacaagugcaacggcaccgacgccaaggucaagcucaucaagcaggagcucgacaaguacaagaacgccgucaccgaccuccagaugcucaugugcuccacccccgccgccggcuccggcuccgccaucgccuccggcaucgccgucugcaagguccuccaccucgagggcgaggucaacaagaucaagaacgcccuccucuccaccaacaaggccgucgucucccucuccaacggcgucuccguccucaccuucaagguccucgaccucaagaacuacaucgacaagcagcuccuccccauccucaacaagcaguccugcuccauccccaaccccgagaccgucauggaguuccagcagaagaacaaccgccuccucgagaucacccgcgaguucuccgucaacgccggcgucaccacccccgucuccaccuacaugcucaccaacuccgagcuccucucccucaucaacgacaugcccaucaccaacgaccagaagaagcucauguccaacaacguccagaucguccgccagcaguccuacuccaucaugugcaucaucaaggaggagguccucgccuacgucguccagcucccccucuacggcgucaucgacacccccugcuggaagcuccacaccuccccccucugcaccaccaacaccaaggagggcuccaacaucugccucacccgcaccgaccgcggcugguacugcgacaacgccggcuccgucuccuucuucccccaggccgagaccugcaaggucugcuccaaccgcgucuucugcgacaccaugaacucccucacccuccccuccgaggucaaccucugcaacaucgacaucuucaaccccaaguacgacugcaagaucaugaccuccaagaccgacgucuccuccuccgucaucaccucccucggcgccaucgucuccugcuacggcaagaccaagugcaccgccuccaacaagaacaagggcaucaucaagaccuucuccaacggcugcgacuacgucuccaacaagggcgucgacaccgucuccgucggcaacacccucuacuacgucaacaagcaggagggccagucccucuacgucaagggcgagcccaucaucaacuucuacgacccccucgucuuccccuccgacgaguucgacgccuccaucucccaggucaacgagaagaucaaccagucccucgccuucauccgcaaguccgacgagcuccuccacaacgucaacgucggcaaguccaccaccaacaucaugaucaccaccaucaucaucgucaucaucgucauccuccuccuccucaucgccgucggccucuuccucuacugcaaggcccgcuccacccccgucacccucuccaaggaccagcucuccggcaucaacaacaucgccuucuccaacugaggacuagucccuguucccagagcccacuuuuuuuucuuuuuuugaaauaaaauagccugucuuucagaucuaaaaaaaaaaaaaaaaaaaaaaaaaaaaaaaaaaaaaaaaaaaaaaaaaaaaaaaaaaaaaaaaugcaucccccccccccccccccccccccccccccccaaaggcucuuuucagagccaccagaauu

SEQ ID NO: 17754 - RNA, 1897 nt, Artificial Sequence
  mRNA product Design c-5 comprising derived and/or modified sequence from HRSV(Memphis-37)__AIY60640.1__F_DSCav1_mut6 (opt3)
gggagagcggcucggccauuuugucccagucaguccggaggcugcggcugcagaaguaccgccugcggaguaacugcaaagaagcuuaccauggagcugcccauccucaagaccaacgccauuacaacuauacuugcugcagugacgcugugcuucgccagcucccagaauaucaccgaagaguuuuaccaaucuacauguucagcggucaguaaaggcuauuugggggcuuuaagaacuggaugguacaccagcguuauuacaaucgaacuguccaacauuaaggagaauaaaugcaacgguaccgacgccaaggugaaacuaaucaagcaggaacucgauaaguauaaaaaugcaguaacugaccugcagaugcuuauguguucuacuccugccgcuggcucggggucagcaauagccagcggaaucgcugugugcaagguccugcacuuggagggcgaggugaacaaaauuaagaaugcccuccugaguaccaacaaagcgguugugucccugucuaauggugucagcgugcucacguucaagguauuagaucugaagaacuacaucgacaaacagcuuuugccaauucugaauaagcaauccuguucaaucccgaaccccgaaacuguuauggaguuucagcagaaaaauaacaggcuacucgaaauaacccgggaguucagugugaaugcaggggucacaacuccugugagcaccuauaugcugacaaacucugagcuucuguccuugauuaacgauaugccaaucaccaaugaccagaagaaacucaugucaaacaaugugcaaauuguccgccagcagagcuacaguaucaugugcaucauuaaggaagagguucuggccuaugugguacaguuaccccuguacggagugauagauacgccuuguuggaaacuccauacuucuccacuuugcacaaccaacacuaaggaaggcuccaauaucugucugacacgaaccgaccguggcugguacugcgauaacgcugggagcgucucguuuuucccccaagccgagacguguaaggugugcucuaauagaguuuucugcgacaccaugaacuccuugacacuaccuucagaagugaaucuguguaacauugauaucuucaauccaaaauaugacugcaagauaaugacaaguaaaaccgaugucagcuccucugugauuacaagccucggagcaaucguaucauguuacgguaagacuaaaugcaccgcuaguaacaagaauaagggcaucauuaaaacauuuuccaacgggugugacuauguuagcaauaagggaguggacaccgucucugugggcaacacucuguacuaugucaacaaacaggagggucagucacuuuacgugaagggggagccgaucauuaauuucuaugauccccugguuuuuccuagugacgaauuugaugccagcauaucccaagugaacgagaaaaucaaucagucuuuggcguuuauuaggaagucggacgaacuccugcacaacguaaaugucggaaagagcacgacaaacaucaugaucaccacuauuauaaucgugauuaucguuauuuuacugcuacucaucgccgugggccuguuccuuuacugcaaagcacgguccaccccagucacauugucaaaggaucagcugaguggcauaaauaacaucgcuuucucuaauugaggacuagucccuguucccagagcccacuuuuuuuucuuuuuuugaaauaaaauagccugucuuucagaucuaaaaaaaaaaaaaaaaaaaaaaaaaaaaaaaaaaaaaaaaaaaaaaaaaaaaaaaaaaaaaaaaugcaucccccccccccccccccccccccccccccccaaaggcucuuuucagagccaccagaauu

SEQ ID NO: 17755 - RNA, 1897 nt, Artificial Sequence
  mRNA product Design c-5 comprising derived and/or modified sequence from HRSV(Memphis-37)__AIY60640.1__F_DSCav1_mut6 (opt4)
gggagagcggcucggccauuuugucccagucaguccggaggcugcggcugcagaaguaccgccugcggaguaacugcaaagaagcuuaccauggagcugcccauccugaagaccaacgccaucaccaccauccuggccgccgugacccugugcuucgccagcagccagaacaucaccgaggaguucuaccagagcaccugcagcgccgugagcaagggcuaccugggcgcccugagaaccggcugguacaccagcgugaucaccaucgagcugagcaacaucaaggagaacaagugcaacggcaccgacgccaaggugaagcugaucaagcaggagcuggacaaguacaagaacgccgugaccgaccugcagaugcugaugugcagcacccccgccgccggcagcggcagcgccaucgccagcggcaucgccgugugcaaggugcugcaccuggagggcgaggugaacaagaucaagaacgcccugcugagcaccaacaaggccguggugagccugagcaacggcgugagcgugcugaccuucaaggugcuggaccugaagaacuacaucgacaagcagcugcugcccauccugaacaagcagagcugcagcauccccaaccccgagaccgugauggaguuccagcagaagaacaacagacugcuggagaucaccagagaguucagcgugaacgccggcgugaccacccccgugagcaccuacaugcugaccaacagcgagcugcugagccugaucaacgacaugcccaucaccaacgaccagaagaagcugaugagcaacaacgugcagaucgugagacagcagagcuacagcaucaugugcaucaucaaggaggaggugcuggccuacguggugcagcugccccuguacggcgugaucgacacccccugcuggaagcugcacaccagcccccugugcaccaccaacaccaaggagggcagcaacaucugccugaccagaaccgacagaggcugguacugcgacaacgccggcagcgugagcuucuucccccaggccgagaccugcaaggugugcagcaacagaguguucugcgacaccaugaacagccugacccugcccagcgaggugaaccugugcaacaucgacaucuucaaccccaaguacgacugcaagaucaugaccagcaagaccgacgugagcagcagcgugaucaccagccugggcgccaucgugagcugcuacggcaagaccaagugcaccgccagcaacaagaacaagggcaucaucaagaccuucagcaacggcugcgacuacgugagcaacaagggcguggacaccgugagcgugggcaacacccuguacuacgugaacaagcaggagggccagagccuguacgugaagggcgagcccaucaucaacuucuacgacccccugguguuccccagcgacgaguucgacgccagcaucagccaggugaacgagaagaucaaccagagccuggccuucaucagaaagagcgacgagcugcugcacaacgugaacgugggcaagagcaccaccaacaucaugaucaccaccaucaucaucgugaucaucgugauccugcugcugcugaucgccgugggccuguuccuguacugcaaggccagaagcacccccgugacccugagcaaggaccagcugagcggcaucaacaacaucgccuucagcaacugaggacuagucccuguucccagagcccacuuuuuuuucuuuuuuugaaauaaaauagccugucuuucagaucuaaaaaaaaaaaaaaaaaaaaaaaaaaaaaaaaaaaaaaaaaaaaaaaaaaaaaaaaaaaaaaaaugcaucccccccccccccccccccccccccccccccaaaggcucuuuucagagccaccagaauu

SEQ ID NO: 17756 - RNA, 1897 nt, Artificial Sequence
  mRNA product Design c-5 comprising derived and/or modified sequence from HRSV(Memphis-37)__AIY60640.1__F_DSCav1_mut6 (opt5)
gggagagcggcucggccauuuugucccagucaguccggaggcugcggcugcagaaguaccgccugcggaguaacugcaaagaagcuuaccauggagcugcccauccucaagaccaacgccauuacaacgauccuggcugccgugacccuuugcuucgcgagcucccagaauauuacagaagaguuuuaccaaucuaccuguagcgcugucuccaaaggcuaucugggggcccucagaacaggaugguacaccucuguuaucacaauugaacugagcaacaucaaggagaauaaaugcaacggcaccgacgccaaggugaaacuuaucaagcaggaacuggauaaguauaaaaaugcugugacggaccuccagaugcugauguguuccaccccugccgcugggucuggaagcgccauugcguccggcaucgccgucugcaaggugcugcaccucgagggggagguuaacaaaauuaagaaugcucugcuuagcacaaacaaagccguggucucucuguccaauggagugagcguucucaccuucaaggugcuggaucuuaagaacuacaucgacaaacagcugcucccgauucugaauaagcaaucuuguuccauccccaacccugaaacagucauggaguuucagcagaaaaauaaccggcugcucgaaauuacccgcgaguucagcgugaaugcuggcgugacgacacccgucucuaccuauaugcugacaaacuccgagcuucugagccucaucaacgauaugccuaucaccaaugaccagaagaaacugauguccaacaauguucaaauugugagacagcagucuuacagcaucaugugcauuaucaaggaagaggugcuugccuaugucgugcagcugccccucuacggcguuauugauaccccuuguuggaaacugcauacauccccgcugugcacgaccaacacaaaggaagggagcaauaucugucucacccggacagaccgcggaugguacugcgauaacgcgggcucuguguccuuuuucccccaagccgagaccuguaaggucugcagcaauagaguguuuugcgacacgaugaacucucugacacuuccuagcgaaguuaaucuguguaacaucgauauuuucaaucccaaauaugacugcaagaucaugaccuccaaaaccgaugugucuagcuccgucauuacaagccucggggcuaucgugucuuguuacggaaagaccaaaugcacagccuccaacaagaauaagggcauuaucaaaacguuuagcaacgggugugacuaugucucuaauaagggaguggacaccguuuccgugggcaacacacuguacuaugucaacaaacaggagggccagagccuuuacgugaagggggagccuaucauuaauuucuaugauccccugguuuuuccguccgacgaauuugaugcuucuaucagccaagugaacgagaaaauuaaucagucccucgccuucauccggaagucugacgaacugcugcacaacgucaaugugggaaagagcaccacaaacauuaugaucaccacgauuaucaucgugauuaucguuauucuccugcuucugaucgccgucggccucuuccuguacugcaaagcucgcuccaccccugugacacugagcaaggaucagcuuucugggauuaauaacaucgcguucuccaauugaggacuagucccuguucccagagcccacuuuuuuuucuuuuuuugaaauaaaauagccugucuuucagaucuaaaaaaaaaaaaaaaaaaaaaaaaaaaaaaaaaaaaaaaaaaaaaaaaaaaaaaaaaaaaaaaaugcaucccccccccccccccccccccccccccccccaaaggcucuuuucagagccaccagaauu

SEQ ID NO: 17757 - RNA, 1897 nt, Artificial Sequence
  mRNA product Design c-5 comprising derived and/or modified sequence from HRSV(Memphis-37)__AIY60640.1__F_DSCav1_mut6 (opt6)
gggagagcggcucggccauuuugucccagucaguccggaggcugcggcugcagaaguaccgccugcggaguaacugcaaagaagcuuaccauggaacuaccaauuuuaaaaacaaacgcaauuacaacuauacucgcagcaguaacauuauguuucgccucaucccaaaacauaacagaagaauuuuaccaaucaacaugcagcgcaguaucaaaaggauaucucggagcauuacgaacagguugguacacaucuguaaucacuauagaacuaucaaacauaaaagaaaacaaaugcaauggaaccgacgcaaaaguaaaauuaauaaaacaagaacucgauaaauacaaaaaugcaguaacagaccuccaaaugcucauguguucaacaccagccgcaggaucagguuccgccauagcaucuggcauagcaguaugcaaaguacuccacuuagaaggagaaguuaacaaaauaaaaaacgcacuauuaucaacaaacaaagcaguaguaucccucucaaacggagucucaguauuaacauucaaaguauuagaccuaaaaaacuacauagacaaacaacuacuuccaauacucaacaaacaaucaugcucaauaccaaacccagaaaccguaauggaauuucaacaaaaaaacaaccgacuacuagaaaucacacgagaauuuucaguaaacgccggugucacaacuccaguaucaacuuauauguuaaccaacucagaacuauuaucauuaauaaacgauaugcccauaacuaacgaccaaaaaaaauuaaugucaaacaacguacaaauaguacgccaacaaaguuacucaauaaugugcaucauaaaagaagaaguauuagcguacguuguacaacuaccucuauacggagucauagacacaccaugcuggaaacuucacacaucaccacuauguacaacaaacacaaaagaaggcaguaacauaugccuaacaagaacagaccguggaugguauugugacaacgcuggaucuguaucauucuucccucaagcagaaaccuguaaaguuugcucaaacagagucuucugugacacaaugaacucucuaacacuaccuuccgaagugaaccucuguaacauagacauauucaauccaaaauaugauugcaaaauaaugacuucaaaaacagauguaucauccucuguuauaacaucauuaggcgccauaguuucaugcuacggaaaaacuaaaugcacagcaucaaacaaaaacaaaggaauaauaaaaaccuucucaaauggaugcgacuacguaagcaacaaaggcguagacacaguaucaguagguaauacauuauacuacguaaacaaacaagaaggacaaucacuuuauguuaaaggagaaccuauaauaaacuucuacgacccacuuguauuuccauccgaugaauuugacgcaucuauaucacaagucaacgaaaaaauaaaccaaucauuagcauucauucgaaaauccgaugaacuacuccauaacguaaaugucggaaaaucaacaaccaacauaaugaucacaacaauaaucauagugauaauaguaauacuccuacuacuaaucgcaguaggucuauuccuauauuguaaagcaagaucuacuccaguuacacucucuaaagaccaauuaagcgguaucaacaacaucgccuucagcaauuaaggacuagucccuguucccagagcccacuuuuuuuucuuuuuuugaaauaaaauagccugucuuucagaucuaaaaaaaaaaaaaaaaaaaaaaaaaaaaaaaaaaaaaaaaaaaaaaaaaaaaaaaaaaaaaaaaugcaucccccccccccccccccccccccccccccccaaaggcucuuuucagagccaccagaauu

SEQ ID NO: 17758 - RNA, 1897 nt, Artificial Sequence
  mRNA product Design c-5 comprising derived and/or modified sequence from HRSV(Memphis-37)__AIY60640.1__F_DSCav1_mut6 (opt11)
gggagagcggcucggccauuuugucccagucaguccggaggcugcggcugcagaaguaccgccugcggaguaacugcaaagaagcuuaccauggagcugcccauccucaagaccaacgccaucaccacgauccuggccgcggugacccugugcuucgcgagcucccaaaacaucaccgaggaguucuaccagagcacgugcuccgccgucagcaagggcuaccucggggcccugcgcaccggcugguacaccuccgugaucaccaucgagcugagcaacaucaaggaaaacaagugcaacgggacggacgcaaaggugaagcucaucaagcaggagcuggauaaguacaagaacgcggucacggaccugcagaugcucaugugcuccaccccggccgccggcagcggguccgccaucgcguccggcaucgccgugugcaagguguugcaccuggagggcgaggucaacaagaucaagaacgcccuccuuuccaccaauaaggcuguugugagccuguccaacggggucagcgugcucaccuucaaggugcuggaccugaagaacuacaucgacaagcagcuccugcccauccugaacaagcaguccugcagcauccccaaccccgagacagucauggaguuccagcagaagaacaaccggcuccuggagaucacccgcgaguucuccguuaacgccggggugaccaccccgguaagcacauacaugcugaccaacagcgagcuccugagccugaucaacgacaugcccaucaccaacgaccagaagaagcucaugagcaacaacgugcagaucgugcggcagcaguccuacagcaucaugugcaucaucaaggaggagguccuggcguacguggugcaacugccccucuacggggucaucgacacccccugcuggaagcugcacacguccccgcugugcaccaccaacaccaaggagggcagcaacaucugccucacgcgcaccgaccgggggugguacugcgacaacgcaggcuccgugagcuucuucccccaggccgagaccugcaaggugugcuccaaccgcgucuucugcgacaccaugaacagccugacgcugcccuccgaggugaaccucugcaacaucgacaucuucaaccccaaguacgacuguaagaucaugaccagcaagaccgaugucuccagcuccgugaucaccagccugggcgccauaguguccuguuaugggaagacgaagugcaccgccagcaacaagaacaaaggcaucaucaagaccuucuccaacgggugcgacuacgucagcaacaagggcguggacacaguguccgucggcaacacgcuguacuacgugaacaagcaggaggggcagagccucuacgugaagggcgagccgaucaucaacuucuacgauccccuggucuuccccagcgacgaguucgacgcguccaucagccaagugaacgagaagaucaaccagucccuggccuucauccgcaagagcgacgagcuccugcacaacgugaacgucgggaaguccaccaccaacaucaugaucaccaccaucaucaucgugaucaucgucauccugcuccugcugaucgccgucggccucuuccuguacugcaaggcccggagcacgcccgugacccuguccaaggaccagcugucgggcaucaacaacaucgccuucuccaacugaggacuagucccuguucccagagcccacuuuuuuuucuuuuuuugaaauaaaauagccugucuuucagaucuaaaaaaaaaaaaaaaaaaaaaaaaaaaaaaaaaaaaaaaaaaaaaaaaaaaaaaaaaaaaaaaaugcaucccccccccccccccccccccccccccccccaaaggcucuuuucagagccaccagaauu

SEQ ID NO: 17759 - RNA, 1906 nt, Artificial Sequence
  mRNA product Design d-1 comprising derived and/or modified sequence from HRSV(Memphis-37)__AIY60640.1__F_DSCav1_mut6 (opt1)
gggagacccgugacccggaaguuguacggcuacgcgacuuucccucccacaaacccucgcgcccuuccuuuccuacuugggcccggcagaaagcuuaccauggagcugcccauccucaagaccaacgccaucaccacgauccuggccgcggugacccugugcuucgccagcucccagaacaucaccgaggaguucuaccagagcacgugcuccgccgucagcaagggcuaccucggcgcccugcgcaccgggugguacaccagcgugaucaccaucgagcuguccaacaucaaggagaacaagugcaacggcaccgacgccaaggugaagcucaucaagcaggagcuggacaaguacaagaacgcggucacggaccugcagaugcugaugugcagcaccccggccgccggcuccgggagcgcgaucgccuccggcaucgccgucugcaaggugcugcaccucgagggcgaggugaacaagaucaagaacgcccugcuguccaccaacaaggccgucgugagccucuccaacggggugagcguccugaccuucaaggugcuggaccucaagaacuacaucgacaagcagcugcugcccauccugaacaagcagagcugcuccauccccaaccccgagaccgucauggaguuccagcagaagaacaaccgccuccuggagaucacgcgggaguucagcgugaacgcgggcgugaccacccccgucuccaccuacaugcugacgaacagcgagcuccugucccugaucaacgacaugccgaucaccaacgaccagaagaagcucaugagcaacaacgugcagaucgugcgccagcaguccuacagcaucaugugcaucaucaaggaggagguccuggccuacguggugcagcugccccucuacggggucaucgacacccccugcuggaagcugcacaccagcccccugugcacgaccaacaccaaggagggcuccaacaucugccucacccggacggaccgcgggugguacugcgacaacgccggcagcguguccuucuucccgcaggccgagaccugcaaggucugcagcaaccggguguucugcgacaccaugaacucccugacccugcccagcgaggugaaccucugcaacaucgacaucuucaaccccaaguacgacugcaagaucaugacguccaagaccgacgucagcuccagcgugaucaccucccugggcgccaucgugagcugcuacgggaagaccaagugcacggcgagcaacaagaacaagggcaucaucaagaccuucuccaacgggugcgacuacgucagcaacaagggcguggacaccguguccgucggcaacacccuguacuacgugaacaagcaggagggccagagccucuacgugaagggggagcccaucaucaacuucuacgacccgcuggucuuccccuccgacgaguucgacgccagcaucucccaggugaacgagaagaucaaccagagccuggccuucauccggaaguccgacgagcuccugcacaacgugaacgucggcaagagcaccacgaacaucaugaucaccaccaucaucaucgugaucaucgugauccugcugcuccugaucgccgucgggcuguuccucuacugcaaggcccgcuccacccccgugacgcugagcaaggaccagcuguccgggaucaacaacaucgcguucagcaacugaggacuagucccuguucccagagcccacuuuuuuuucuuuuuuugaaauaaaauagccugucuuucagaucuaaaaaaaaaaaaaaaaaaaaaaaaaaaaaaaaaaaaaaaaaaaaaaaaaaaaaaaaaaaaaaaaugcaucccccccccccccccccccccccccccccccaaaggcucuuuucagagccaccagaauu

SEQ ID NO: 17760 - RNA, 1906 nt, Artificial Sequence
  mRNA product Design d-1 comprising derived and/or modified sequence from HRSV(Memphis-37)__AIY60640.1__F_DSCav1_mut6 (opt1)
gggagacccgugacccggaaguuguacggcuacgcgacuuucccucccacaaacccucgcgcccuuccuuuccuacuugggcccggcagaaagcuuaccauggagcugcccauccucaagaccaacgccaucaccacgauccuggccgcggugacccugugcuucgccagcucccagaacaucaccgaggaguucuaccagagcacgugcuccgccgucagcaagggcuaccucggggcccugcgcaccggcugguacaccuccgugaucaccaucgagcugagcaacaucaaggagaacaagugcaacgggaccgacgccaaggugaagcucaucaagcaggagcuggacaaguacaagaacgcggucacggaccugcagaugcucaugugcuccaccccggccgccggcagcggguccgccaucgcgagcggcaucgccgugugcaaggugcugcaccuggagggcgaggucaacaagaucaagaacgcccuccuguccaccaacaaggccguggugagccuguccaacggggucagcgugcucaccuucaaggugcuggaccugaagaacuacaucgacaagcagcuccugcccauccugaacaagcaguccugcagcauccccaaccccgagacggucauggaguuccagcagaagaacaaccggcuccuggagaucacccgcgaguucuccgugaacgccggcgugaccaccccggucagcacguacaugcugaccaacuccgagcuccugagccugaucaacgacaugcccaucaccaacgaccagaagaagcucaugagcaacaacgugcagaucgugcggcagcaguccuacagcaucaugugcaucaucaaggaggagguccuggcguacguggugcagcugccccucuacggggucaucgacacccccugcuggaagcugcacacguccccgcugugcaccaccaacaccaaggagggcagcaacaucugccucacgcgcaccgaccgggggugguacugcgacaacgccggcuccgugagcuucuucccccaggccgagaccugcaaggugugcuccaaccgcgucuucugcgacaccaugaacagccugacgcugcccuccgaggugaaccucugcaacaucgacaucuucaaccccaaguacgacugcaagaucaugaccagcaagaccgacgucuccagcuccgugaucaccagccugggcgccaucguguccugcuacgggaagacgaagugcaccgccagcaacaagaacaagggcaucaucaagaccuucuccaacgggugcgacuacgucagcaacaagggcguggacaccguguccgucggcaacacgcuguacuacgugaacaagcaggaggggcagagccucuacgugaagggcgagccgaucaucaacuucuacgacccccuggucuuccccagcgacgaguucgacgcguccaucagccaggugaacgagaagaucaaccagucccuggccuucauccgcaagagcgacgagcuccugcacaacgugaacgucgggaaguccaccaccaacaucaugaucaccaccaucaucaucgugaucaucgugauccugcuccugcugaucgccgucggccucuuccuguacugcaaggcccggagcacgcccgugacccuguccaaggaccagcugagcgggaucaacaacaucgccuucuccaacugaggacuagucccuguucccagagcccacuuuuuuuucuuuuuuugaaauaaaauagccugucuuucagaucuaaaaaaaaaaaaaaaaaaaaaaaaaaaaaaaaaaaaaaaaaaaaaaaaaaaaaaaaaaaaaaaaugcaucccccccccccccccccccccccccccccccaaaggcucuuuucagagccaccagaauu

SEQ ID NO: 17761 - RNA, 1906 nt, Artificial Sequence
  mRNA product Design d-1 comprising derived and/or modified sequence from HRSV(Memphis-37)__AIY60640.1__F_DSCav1_mut6 (opt2)
gggagacccgugacccggaaguuguacggcuacgcgacuuucccucccacaaacccucgcgcccuuccuuuccuacuugggcccggcagaaagcuuaccauggagcuccccauccucaagaccaacgccaucaccaccauccucgccgccgucacccucugcuucgccuccucccagaacaucaccgaggaguucuaccaguccaccugcuccgccgucuccaagggcuaccucggcgcccuccgcaccggcugguacaccuccgucaucaccaucgagcucuccaacaucaaggagaacaagugcaacggcaccgacgccaaggucaagcucaucaagcaggagcucgacaaguacaagaacgccgucaccgaccuccagaugcucaugugcuccacccccgccgccggcuccggcuccgccaucgccuccggcaucgccgucugcaagguccuccaccucgagggcgaggucaacaagaucaagaacgcccuccucuccaccaacaaggccgucgucucccucuccaacggcgucuccguccucaccuucaagguccucgaccucaagaacuacaucgacaagcagcuccuccccauccucaacaagcaguccugcuccauccccaaccccgagaccgucauggaguuccagcagaagaacaaccgccuccucgagaucacccgcgaguucuccgucaacgccggcgucaccacccccgucuccaccuacaugcucaccaacuccgagcuccucucccucaucaacgacaugcccaucaccaacgaccagaagaagcucauguccaacaacguccagaucguccgccagcaguccuacuccaucaugugcaucaucaaggaggagguccucgccuacgucguccagcucccccucuacggcgucaucgacacccccugcuggaagcuccacaccuccccccucugcaccaccaacaccaaggagggcuccaacaucugccucacccgcaccgaccgcggcugguacugcgacaacgccggcuccgucuccuucuucccccaggccgagaccugcaaggucugcuccaaccgcgucuucugcgacaccaugaacucccucacccuccccuccgaggucaaccucugcaacaucgacaucuucaaccccaaguacgacugcaagaucaugaccuccaagaccgacgucuccuccuccgucaucaccucccucggcgccaucgucuccugcuacggcaagaccaagugcaccgccuccaacaagaacaagggcaucaucaagaccuucuccaacggcugcgacuacgucuccaacaagggcgucgacaccgucuccgucggcaacacccucuacuacgucaacaagcaggagggccagucccucuacgucaagggcgagcccaucaucaacuucuacgacccccucgucuuccccuccgacgaguucgacgccuccaucucccaggucaacgagaagaucaaccagucccucgccuucauccgcaaguccgacgagcuccuccacaacgucaacgucggcaaguccaccaccaacaucaugaucaccaccaucaucaucgucaucaucgucauccuccuccuccucaucgccgucggccucuuccucuacugcaaggcccgcuccacccccgucacccucuccaaggaccagcucuccggcaucaacaacaucgccuucuccaacugaggacuagucccuguucccagagcccacuuuuuuuucuuuuuuugaaauaaaauagccugucuuucagaucuaaaaaaaaaaaaaaaaaaaaaaaaaaaaaaaaaaaaaaaaaaaaaaaaaaaaaaaaaaaaaaaaugcaucccccccccccccccccccccccccccccccaaaggcucuuuucagagccaccagaauu

SEQ ID NO: 17762 - RNA, 1906 nt, Artificial Sequence
  mRNA product Design d-1 comprising derived and/or modified sequence from HRSV(Memphis-37)__AIY60640.1__F_DSCav1_mut6 (opt3)
gggagacccgugacccggaaguuguacggcuacgcgacuuucccucccacaaacccucgcgcccuuccuuuccuacuugggcccggcagaaagcuuaccauggagcugcccauccucaagaccaacgccauuacaacuauacuugcugcagugacgcugugcuucgccagcucccagaauaucaccgaagaguuuuaccaaucuacauguucagcggucaguaaaggcuauuugggggcuuuaagaacuggaugguacaccagcguuauuacaaucgaacuguccaacauuaaggagaauaaaugcaacgguaccgacgccaaggugaaacuaaucaagcaggaacucgauaaguauaaaaaugcaguaacugaccugcagaugcuuauguguucuacuccugccgcuggcucggggucagcaauagccagcggaaucgcugugugcaagguccugcacuuggagggcgaggugaacaaaauuaagaaugcccuccugaguaccaacaaagcgguugugucccugucuaauggugucagcgugcucacguucaagguauuagaucugaagaacuacaucgacaaacagcuuuugccaauucugaauaagcaauccuguucaaucccgaaccccgaaacuguuauggaguuucagcagaaaaauaacaggcuacucgaaauaacccgggaguucagugugaaugcaggggucacaacuccugugagcaccuauaugcugacaaacucugagcuucuguccuugauuaacgauaugccaaucaccaaugaccagaagaaacucaugucaaacaaugugcaaauuguccgccagcagagcuacaguaucaugugcaucauuaaggaagagguucuggccuaugugguacaguuaccccuguacggagugauagauacgccuuguuggaaacuccauacuucuccacuuugcacaaccaacacuaaggaaggcuccaauaucugucugacacgaaccgaccguggcugguacugcgauaacgcugggagcgucucguuuuucccccaagccgagacguguaaggugugcucuaauagaguuuucugcgacaccaugaacuccuugacacuaccuucagaagugaaucuguguaacauugauaucuucaauccaaaauaugacugcaagauaaugacaaguaaaaccgaugucagcuccucugugauuacaagccucggagcaaucguaucauguuacgguaagacuaaaugcaccgcuaguaacaagaauaagggcaucauuaaaacauuuuccaacgggugugacuauguuagcaauaagggaguggacaccgucucugugggcaacacucuguacuaugucaacaaacaggagggucagucacuuuacgugaagggggagccgaucauuaauuucuaugauccccugguuuuuccuagugacgaauuugaugccagcauaucccaagugaacgagaaaaucaaucagucuuuggcguuuauuaggaagucggacgaacuccugcacaacguaaaugucggaaagagcacgacaaacaucaugaucaccacuauuauaaucgugauuaucguuauuuuacugcuacucaucgccgugggccuguuccuuuacugcaaagcacgguccaccccagucacauugucaaaggaucagcugaguggcauaaauaacaucgcuuucucuaauugaggacuagucccuguucccagagcccacuuuuuuuucuuuuuuugaaauaaaauagccugucuuucagaucuaaaaaaaaaaaaaaaaaaaaaaaaaaaaaaaaaaaaaaaaaaaaaaaaaaaaaaaaaaaaaaaaugcaucccccccccccccccccccccccccccccccaaaggcucuuuucagagccaccagaauu

SEQ ID NO: 17763 - RNA, 1906 nt, Artificial Sequence
  mRNA product Design d-1 comprising derived and/or modified sequence from HRSV(Memphis-37)__AIY60640.1__F_DSCav1_mut6 (opt4)
gggagacccgugacccggaaguuguacggcuacgcgacuuucccucccacaaacccucgcgcccuuccuuuccuacuugggcccggcagaaagcuuaccauggagcugcccauccugaagaccaacgccaucaccaccauccuggccgccgugacccugugcuucgccagcagccagaacaucaccgaggaguucuaccagagcaccugcagcgccgugagcaagggcuaccugggcgcccugagaaccggcugguacaccagcgugaucaccaucgagcugagcaacaucaaggagaacaagugcaacggcaccgacgccaaggugaagcugaucaagcaggagcuggacaaguacaagaacgccgugaccgaccugcagaugcugaugugcagcacccccgccgccggcagcggcagcgccaucgccagcggcaucgccgugugcaaggugcugcaccuggagggcgaggugaacaagaucaagaacgcccugcugagcaccaacaaggccguggugagccugagcaacggcgugagcgugcugaccuucaaggugcuggaccugaagaacuacaucgacaagcagcugcugcccauccugaacaagcagagcugcagcauccccaaccccgagaccgugauggaguuccagcagaagaacaacagacugcuggagaucaccagagaguucagcgugaacgccggcgugaccacccccgugagcaccuacaugcugaccaacagcgagcugcugagccugaucaacgacaugcccaucaccaacgaccagaagaagcugaugagcaacaacgugcagaucgugagacagcagagcuacagcaucaugugcaucaucaaggaggaggugcuggccuacguggugcagcugccccuguacggcgugaucgacacccccugcuggaagcugcacaccagcccccugugcaccaccaacaccaaggagggcagcaacaucugccugaccagaaccgacagaggcugguacugcgacaacgccggcagcgugagcuucuucccccaggccgagaccugcaaggugugcagcaacagaguguucugcgacaccaugaacagccugacccugcccagcgaggugaaccugugcaacaucgacaucuucaaccccaaguacgacugcaagaucaugaccagcaagaccgacgugagcagcagcgugaucaccagccugggcgccaucgugagcugcuacggcaagaccaagugcaccgccagcaacaagaacaagggcaucaucaagaccuucagcaacggcugcgacuacgugagcaacaagggcguggacaccgugagcgugggcaacacccuguacuacgugaacaagcaggagggccagagccuguacgugaagggcgagcccaucaucaacuucuacgacccccugguguuccccagcgacgaguucgacgccagcaucagccaggugaacgagaagaucaaccagagccuggccuucaucagaaagagcgacgagcugcugcacaacgugaacgugggcaagagcaccaccaacaucaugaucaccaccaucaucaucgugaucaucgugauccugcugcugcugaucgccgugggccuguuccuguacugcaaggccagaagcacccccgugacccugagcaaggaccagcugagcggcaucaacaacaucgccuucagcaacugaggacuagucccuguucccagagcccacuuuuuuuucuuuuuuugaaauaaaauagccugucuuucagaucuaaaaaaaaaaaaaaaaaaaaaaaaaaaaaaaaaaaaaaaaaaaaaaaaaaaaaaaaaaaaaaaaugcaucccccccccccccccccccccccccccccccaaaggcucuuuucagagccaccagaauu

SEQ ID NO: 17764 - RNA, 1906 nt, Artificial Sequence
  mRNA product Design d-1 comprising derived and/or modified sequence from HRSV(Memphis-37)__AIY60640.1__F_DSCav1_mut6 (opt5)
gggagacccgugacccggaaguuguacggcuacgcgacuuucccucccacaaacccucgcgcccuuccuuuccuacuugggcccggcagaaagcuuaccauggagcugcccauccucaagaccaacgccauuacaacgauccuggcugccgugacccuuugcuucgcgagcucccagaauauuacagaagaguuuuaccaaucuaccuguagcgcugucuccaaaggcuaucugggggcccucagaacaggaugguacaccucuguuaucacaauugaacugagcaacaucaaggagaauaaaugcaacggcaccgacgccaaggugaaacuuaucaagcaggaacuggauaaguauaaaaaugcugugacggaccuccagaugcugauguguuccaccccugccgcugggucuggaagcgccauugcguccggcaucgccgucugcaaggugcugcaccucgagggggagguuaacaaaauuaagaaugcucugcuuagcacaaacaaagccguggucucucuguccaauggagugagcguucucaccuucaaggugcuggaucuuaagaacuacaucgacaaacagcugcucccgauucugaauaagcaaucuuguuccauccccaacccugaaacagucauggaguuucagcagaaaaauaaccggcugcucgaaauuacccgcgaguucagcgugaaugcuggcgugacgacacccgucucuaccuauaugcugacaaacuccgagcuucugagccucaucaacgauaugccuaucaccaaugaccagaagaaacugauguccaacaauguucaaauugugagacagcagucuuacagcaucaugugcauuaucaaggaagaggugcuugccuaugucgugcagcugccccucuacggcguuauugauaccccuuguuggaaacugcauacauccccgcugugcacgaccaacacaaaggaagggagcaauaucugucucacccggacagaccgcggaugguacugcgauaacgcgggcucuguguccuuuuucccccaagccgagaccuguaaggucugcagcaauagaguguuuugcgacacgaugaacucucugacacuuccuagcgaaguuaaucuguguaacaucgauauuuucaaucccaaauaugacugcaagaucaugaccuccaaaaccgaugugucuagcuccgucauuacaagccucggggcuaucgugucuuguuacggaaagaccaaaugcacagccuccaacaagaauaagggcauuaucaaaacguuuagcaacgggugugacuaugucucuaauaagggaguggacaccguuuccgugggcaacacacuguacuaugucaacaaacaggagggccagagccuuuacgugaagggggagccuaucauuaauuucuaugauccccugguuuuuccguccgacgaauuugaugcuucuaucagccaagugaacgagaaaauuaaucagucccucgccuucauccggaagucugacgaacugcugcacaacgucaaugugggaaagagcaccacaaacauuaugaucaccacgauuaucaucgugauuaucguuauucuccugcuucugaucgccgucggccucuuccuguacugcaaagcucgcuccaccccugugacacugagcaaggaucagcuuucugggauuaauaacaucgcguucuccaauugaggacuagucccuguucccagagcccacuuuuuuuucuuuuuuugaaauaaaauagccugucuuucagaucuaaaaaaaaaaaaaaaaaaaaaaaaaaaaaaaaaaaaaaaaaaaaaaaaaaaaaaaaaaaaaaaaugcaucccccccccccccccccccccccccccccccaaaggcucuuuucagagccaccagaauu

SEQ ID NO: 17765 - RNA, 1906 nt, Artificial Sequence
  mRNA product Design d-1 comprising derived and/or modified sequence from HRSV(Memphis-37)__AIY60640.1__F_DSCav1_mut6 (opt6)
gggagacccgugacccggaaguuguacggcuacgcgacuuucccucccacaaacccucgcgcccuuccuuuccuacuugggcccggcagaaagcuuaccauggaacuaccaauuuuaaaaacaaacgcaauuacaacuauacucgcagcaguaacauuauguuucgccucaucccaaaacauaacagaagaauuuuaccaaucaacaugcagcgcaguaucaaaaggauaucucggagcauuacgaacagguugguacacaucuguaaucacuauagaacuaucaaacauaaaagaaaacaaaugcaauggaaccgacgcaaaaguaaaauuaauaaaacaagaacucgauaaauacaaaaaugcaguaacagaccuccaaaugcucauguguucaacaccagccgcaggaucagguuccgccauagcaucuggcauagcaguaugcaaaguacuccacuuagaaggagaaguuaacaaaauaaaaaacgcacuauuaucaacaaacaaagcaguaguaucccucucaaacggagucucaguauuaacauucaaaguauuagaccuaaaaaacuacauagacaaacaacuacuuccaauacucaacaaacaaucaugcucaauaccaaacccagaaaccguaauggaauuucaacaaaaaaacaaccgacuacuagaaaucacacgagaauuuucaguaaacgccggugucacaacuccaguaucaacuuauauguuaaccaacucagaacuauuaucauuaauaaacgauaugcccauaacuaacgaccaaaaaaaauuaaugucaaacaacguacaaauaguacgccaacaaaguuacucaauaaugugcaucauaaaagaagaaguauuagcguacguuguacaacuaccucuauacggagucauagacacaccaugcuggaaacuucacacaucaccacuauguacaacaaacacaaaagaaggcaguaacauaugccuaacaagaacagaccguggaugguauugugacaacgcuggaucuguaucauucuucccucaagcagaaaccuguaaaguuugcucaaacagagucuucugugacacaaugaacucucuaacacuaccuuccgaagugaaccucuguaacauagacauauucaauccaaaauaugauugcaaaauaaugacuucaaaaacagauguaucauccucuguuauaacaucauuaggcgccauaguuucaugcuacggaaaaacuaaaugcacagcaucaaacaaaaacaaaggaauaauaaaaaccuucucaaauggaugcgacuacguaagcaacaaaggcguagacacaguaucaguagguaauacauuauacuacguaaacaaacaagaaggacaaucacuuuauguuaaaggagaaccuauaauaaacuucuacgacccacuuguauuuccauccgaugaauuugacgcaucuauaucacaagucaacgaaaaaauaaaccaaucauuagcauucauucgaaaauccgaugaacuacuccauaacguaaaugucggaaaaucaacaaccaacauaaugaucacaacaauaaucauagugauaauaguaauacuccuacuacuaaucgcaguaggucuauuccuauauuguaaagcaagaucuacuccaguuacacucucuaaagaccaauuaagcgguaucaacaacaucgccuucagcaauuaaggacuagucccuguucccagagcccacuuuuuuuucuuuuuuugaaauaaaauagccugucuuucagaucuaaaaaaaaaaaaaaaaaaaaaaaaaaaaaaaaaaaaaaaaaaaaaaaaaaaaaaaaaaaaaaaaugcaucccccccccccccccccccccccccccccccaaaggcucuuuucagagccaccagaauu

SEQ ID NO: 17766 - RNA, 1906 nt, Artificial Sequence
  mRNA product Design d-1 comprising derived and/or modified sequence from HRSV(Memphis-37)__AIY60640.1__F_DSCav1_mut6 (opt11)
gggagacccgugacccggaaguuguacggcuacgcgacuuucccucccacaaacccucgcgcccuuccuuuccuacuugggcccggcagaaagcuuaccauggagcugcccauccucaagaccaacgccaucaccacgauccuggccgcggugacccugugcuucgcgagcucccaaaacaucaccgaggaguucuaccagagcacgugcuccgccgucagcaagggcuaccucggggcccugcgcaccggcugguacaccuccgugaucaccaucgagcugagcaacaucaaggaaaacaagugcaacgggacggacgcaaaggugaagcucaucaagcaggagcuggauaaguacaagaacgcggucacggaccugcagaugcucaugugcuccaccccggccgccggcagcggguccgccaucgcguccggcaucgccgugugcaagguguugcaccuggagggcgaggucaacaagaucaagaacgcccuccuuuccaccaauaaggcuguugugagccuguccaacggggucagcgugcucaccuucaaggugcuggaccugaagaacuacaucgacaagcagcuccugcccauccugaacaagcaguccugcagcauccccaaccccgagacagucauggaguuccagcagaagaacaaccggcuccuggagaucacccgcgaguucuccguuaacgccggggugaccaccccgguaagcacauacaugcugaccaacagcgagcuccugagccugaucaacgacaugcccaucaccaacgaccagaagaagcucaugagcaacaacgugcagaucgugcggcagcaguccuacagcaucaugugcaucaucaaggaggagguccuggcguacguggugcaacugccccucuacggggucaucgacacccccugcuggaagcugcacacguccccgcugugcaccaccaacaccaaggagggcagcaacaucugccucacgcgcaccgaccgggggugguacugcgacaacgcaggcuccgugagcuucuucccccaggccgagaccugcaaggugugcuccaaccgcgucuucugcgacaccaugaacagccugacgcugcccuccgaggugaaccucugcaacaucgacaucuucaaccccaaguacgacuguaagaucaugaccagcaagaccgaugucuccagcuccgugaucaccagccugggcgccauaguguccuguuaugggaagacgaagugcaccgccagcaacaagaacaaaggcaucaucaagaccuucuccaacgggugcgacuacgucagcaacaagggcguggacacaguguccgucggcaacacgcuguacuacgugaacaagcaggaggggcagagccucuacgugaagggcgagccgaucaucaacuucuacgauccccuggucuuccccagcgacgaguucgacgcguccaucagccaagugaacgagaagaucaaccagucccuggccuucauccgcaagagcgacgagcuccugcacaacgugaacgucgggaaguccaccaccaacaucaugaucaccaccaucaucaucgugaucaucgucauccugcuccugcugaucgccgucggccucuuccuguacugcaaggcccggagcacgcccgugacccuguccaaggaccagcugucgggcaucaacaacaucgccuucuccaacugaggacuagucccuguucccagagcccacuuuuuuuucuuuuuuugaaauaaaauagccugucuuucagaucuaaaaaaaaaaaaaaaaaaaaaaaaaaaaaaaaaaaaaaaaaaaaaaaaaaaaaaaaaaaaaaaaugcaucccccccccccccccccccccccccccccccaaaggcucuuuucagagccaccagaauu

SEQ ID NO: 17767 - RNA, 1961 nt, Artificial Sequence
  mRNA product Design d-2 comprising derived and/or modified sequence from HRSV(Memphis-37)__AIY60640.1__F_DSCav1_mut6 (opt1)
gggagagcggcucggccauuuugucccagucaguccggaggcugcggcugcagaaguaccgccugcggaguaacugcaaagaagcuuaccauggagcugcccauccucaagaccaacgccaucaccacgauccuggccgcggugacccugugcuucgccagcucccagaacaucaccgaggaguucuaccagagcacgugcuccgccgucagcaagggcuaccucggcgcccugcgcaccgggugguacaccagcgugaucaccaucgagcuguccaacaucaaggagaacaagugcaacggcaccgacgccaaggugaagcucaucaagcaggagcuggacaaguacaagaacgcggucacggaccugcagaugcugaugugcagcaccccggccgccggcuccgggagcgcgaucgccuccggcaucgccgucugcaaggugcugcaccucgagggcgaggugaacaagaucaagaacgcccugcuguccaccaacaaggccgucgugagccucuccaacggggugagcguccugaccuucaaggugcuggaccucaagaacuacaucgacaagcagcugcugcccauccugaacaagcagagcugcuccauccccaaccccgagaccgucauggaguuccagcagaagaacaaccgccuccuggagaucacgcgggaguucagcgugaacgcgggcgugaccacccccgucuccaccuacaugcugacgaacagcgagcuccugucccugaucaacgacaugccgaucaccaacgaccagaagaagcucaugagcaacaacgugcagaucgugcgccagcaguccuacagcaucaugugcaucaucaaggaggagguccuggccuacguggugcagcugccccucuacggggucaucgacacccccugcuggaagcugcacaccagcccccugugcacgaccaacaccaaggagggcuccaacaucugccucacccggacggaccgcgggugguacugcgacaacgccggcagcguguccuucuucccgcaggccgagaccugcaaggucugcagcaaccggguguucugcgacaccaugaacucccugacccugcccagcgaggugaaccucugcaacaucgacaucuucaaccccaaguacgacugcaagaucaugacguccaagaccgacgucagcuccagcgugaucaccucccugggcgccaucgugagcugcuacgggaagaccaagugcacggcgagcaacaagaacaagggcaucaucaagaccuucuccaacgggugcgacuacgucagcaacaagggcguggacaccguguccgucggcaacacccuguacuacgugaacaagcaggagggccagagccucuacgugaagggggagcccaucaucaacuucuacgacccgcuggucuuccccuccgacgaguucgacgccagcaucucccaggugaacgagaagaucaaccagagccuggccuucauccggaaguccgacgagcuccugcacaacgugaacgucggcaagagcaccacgaacaucaugaucaccaccaucaucaucgugaucaucgugauccugcugcuccugaucgccgucgggcuguuccucuacugcaaggcccgcuccacccccgugacgcugagcaaggaccagcuguccgggaucaacaacaucgcguucagcaacugaggacuaguaauaaggaaacuguaugaaugucugugggcaggaagugaagagauccuucuguaaagguuuuuggaauuaugucugcugaauaauaaacuuuuuugaaauaauaaaucugguagaaaaaugagaucuaaaaaaaaaaaaaaaaaaaaaaaaaaaaaaaaaaaaaaaaaaaaaaaaaaaaaaaaaaaaaaaaugcaucccccccccccccccccccccccccccccccaaaggcucuuuucagagccaccagaauu

SEQ ID NO: 17768 - RNA, 1961 nt, Artificial Sequence
  mRNA product Design d-2 comprising derived and/or modified sequence from HRSV(Memphis-37)__AIY60640.1__F_DSCav1_mut6 (opt1)
gggagagcggcucggccauuuugucccagucaguccggaggcugcggcugcagaaguaccgccugcggaguaacugcaaagaagcuuaccauggagcugcccauccucaagaccaacgccaucaccacgauccuggccgcggugacccugugcuucgccagcucccagaacaucaccgaggaguucuaccagagcacgugcuccgccgucagcaagggcuaccucggggcccugcgcaccggcugguacaccuccgugaucaccaucgagcugagcaacaucaaggagaacaagugcaacgggaccgacgccaaggugaagcucaucaagcaggagcuggacaaguacaagaacgcggucacggaccugcagaugcucaugugcuccaccccggccgccggcagcggguccgccaucgcgagcggcaucgccgugugcaaggugcugcaccuggagggcgaggucaacaagaucaagaacgcccuccuguccaccaacaaggccguggugagccuguccaacggggucagcgugcucaccuucaaggugcuggaccugaagaacuacaucgacaagcagcuccugcccauccugaacaagcaguccugcagcauccccaaccccgagacggucauggaguuccagcagaagaacaaccggcuccuggagaucacccgcgaguucuccgugaacgccggcgugaccaccccggucagcacguacaugcugaccaacuccgagcuccugagccugaucaacgacaugcccaucaccaacgaccagaagaagcucaugagcaacaacgugcagaucgugcggcagcaguccuacagcaucaugugcaucaucaaggaggagguccuggcguacguggugcagcugccccucuacggggucaucgacacccccugcuggaagcugcacacguccccgcugugcaccaccaacaccaaggagggcagcaacaucugccucacgcgcaccgaccgggggugguacugcgacaacgccggcuccgugagcuucuucccccaggccgagaccugcaaggugugcuccaaccgcgucuucugcgacaccaugaacagccugacgcugcccuccgaggugaaccucugcaacaucgacaucuucaaccccaaguacgacugcaagaucaugaccagcaagaccgacgucuccagcuccgugaucaccagccugggcgccaucguguccugcuacgggaagacgaagugcaccgccagcaacaagaacaagggcaucaucaagaccuucuccaacgggugcgacuacgucagcaacaagggcguggacaccguguccgucggcaacacgcuguacuacgugaacaagcaggaggggcagagccucuacgugaagggcgagccgaucaucaacuucuacgacccccuggucuuccccagcgacgaguucgacgcguccaucagccaggugaacgagaagaucaaccagucccuggccuucauccgcaagagcgacgagcuccugcacaacgugaacgucgggaaguccaccaccaacaucaugaucaccaccaucaucaucgugaucaucgugauccugcuccugcugaucgccgucggccucuuccuguacugcaaggcccggagcacgcccgugacccuguccaaggaccagcugagcgggaucaacaacaucgccuucuccaacugaggacuaguaauaaggaaacuguaugaaugucugugggcaggaagugaagagauccuucuguaaagguuuuuggaauuaugucugcugaauaauaaacuuuuuugaaauaauaaaucugguagaaaaaugagaucuaaaaaaaaaaaaaaaaaaaaaaaaaaaaaaaaaaaaaaaaaaaaaaaaaaaaaaaaaaaaaaaaugcaucccccccccccccccccccccccccccccccaaaggcucuuuucagagccaccagaauu

SEQ ID NO: 17769 - RNA, 1961 nt, Artificial Sequence
  mRNA product Design d-2 comprising derived and/or modified sequence from HRSV(Memphis-37)__AIY60640.1__F_DSCav1_mut6 (opt2)
gggagagcggcucggccauuuugucccagucaguccggaggcugcggcugcagaaguaccgccugcggaguaacugcaaagaagcuuaccauggagcuccccauccucaagaccaacgccaucaccaccauccucgccgccgucacccucugcuucgccuccucccagaacaucaccgaggaguucuaccaguccaccugcuccgccgucuccaagggcuaccucggcgcccuccgcaccggcugguacaccuccgucaucaccaucgagcucuccaacaucaaggagaacaagugcaacggcaccgacgccaaggucaagcucaucaagcaggagcucgacaaguacaagaacgccgucaccgaccuccagaugcucaugugcuccacccccgccgccggcuccggcuccgccaucgccuccggcaucgccgucugcaagguccuccaccucgagggcgaggucaacaagaucaagaacgcccuccucuccaccaacaaggccgucgucucccucuccaacggcgucuccguccucaccuucaagguccucgaccucaagaacuacaucgacaagcagcuccuccccauccucaacaagcaguccugcuccauccccaaccccgagaccgucauggaguuccagcagaagaacaaccgccuccucgagaucacccgcgaguucuccgucaacgccggcgucaccacccccgucuccaccuacaugcucaccaacuccgagcuccucucccucaucaacgacaugcccaucaccaacgaccagaagaagcucauguccaacaacguccagaucguccgccagcaguccuacuccaucaugugcaucaucaaggaggagguccucgccuacgucguccagcucccccucuacggcgucaucgacacccccugcuggaagcuccacaccuccccccucugcaccaccaacaccaaggagggcuccaacaucugccucacccgcaccgaccgcggcugguacugcgacaacgccggcuccgucuccuucuucccccaggccgagaccugcaaggucugcuccaaccgcgucuucugcgacaccaugaacucccucacccuccccuccgaggucaaccucugcaacaucgacaucuucaaccccaaguacgacugcaagaucaugaccuccaagaccgacgucuccuccuccgucaucaccucccucggcgccaucgucuccugcuacggcaagaccaagugcaccgccuccaacaagaacaagggcaucaucaagaccuucuccaacggcugcgacuacgucuccaacaagggcgucgacaccgucuccgucggcaacacccucuacuacgucaacaagcaggagggccagucccucuacgucaagggcgagcccaucaucaacuucuacgacccccucgucuuccccuccgacgaguucgacgccuccaucucccaggucaacgagaagaucaaccagucccucgccuucauccgcaaguccgacgagcuccuccacaacgucaacgucggcaaguccaccaccaacaucaugaucaccaccaucaucaucgucaucaucgucauccuccuccuccucaucgccgucggccucuuccucuacugcaaggcccgcuccacccccgucacccucuccaaggaccagcucuccggcaucaacaacaucgccuucuccaacugaggacuaguaauaaggaaacuguaugaaugucugugggcaggaagugaagagauccuucuguaaagguuuuuggaauuaugucugcugaauaauaaacuuuuuugaaauaauaaaucugguagaaaaaugagaucuaaaaaaaaaaaaaaaaaaaaaaaaaaaaaaaaaaaaaaaaaaaaaaaaaaaaaaaaaaaaaaaaugcaucccccccccccccccccccccccccccccccaaaggcucuuuucagagccaccagaauu

SEQ ID NO: 17770 - RNA, 1961 nt, Artificial Sequence
  mRNA product Design d-2 comprising derived and/or modified sequence from HRSV(Memphis-37)__AIY60640.1__F_DSCav1_mut6 (opt3)
gggagagcggcucggccauuuugucccagucaguccggaggcugcggcugcagaaguaccgccugcggaguaacugcaaagaagcuuaccauggagcugcccauccucaagaccaacgccauuacaacuauacuugcugcagugacgcugugcuucgccagcucccagaauaucaccgaagaguuuuaccaaucuacauguucagcggucaguaaaggcuauuugggggcuuuaagaacuggaugguacaccagcguuauuacaaucgaacuguccaacauuaaggagaauaaaugcaacgguaccgacgccaaggugaaacuaaucaagcaggaacucgauaaguauaaaaaugcaguaacugaccugcagaugcuuauguguucuacuccugccgcuggcucggggucagcaauagccagcggaaucgcugugugcaagguccugcacuuggagggcgaggugaacaaaauuaagaaugcccuccugaguaccaacaaagcgguugugucccugucuaauggugucagcgugcucacguucaagguauuagaucugaagaacuacaucgacaaacagcuuuugccaauucugaauaagcaauccuguucaaucccgaaccccgaaacuguuauggaguuucagcagaaaaauaacaggcuacucgaaauaacccgggaguucagugugaaugcaggggucacaacuccugugagcaccuauaugcugacaaacucugagcuucuguccuugauuaacgauaugccaaucaccaaugaccagaagaaacucaugucaaacaaugugcaaauuguccgccagcagagcuacaguaucaugugcaucauuaaggaagagguucuggccuaugugguacaguuaccccuguacggagugauagauacgccuuguuggaaacuccauacuucuccacuuugcacaaccaacacuaaggaaggcuccaauaucugucugacacgaaccgaccguggcugguacugcgauaacgcugggagcgucucguuuuucccccaagccgagacguguaaggugugcucuaauagaguuuucugcgacaccaugaacuccuugacacuaccuucagaagugaaucuguguaacauugauaucuucaauccaaaauaugacugcaagauaaugacaaguaaaaccgaugucagcuccucugugauuacaagccucggagcaaucguaucauguuacgguaagacuaaaugcaccgcuaguaacaagaauaagggcaucauuaaaacauuuuccaacgggugugacuauguuagcaauaagggaguggacaccgucucugugggcaacacucuguacuaugucaacaaacaggagggucagucacuuuacgugaagggggagccgaucauuaauuucuaugauccccugguuuuuccuagugacgaauuugaugccagcauaucccaagugaacgagaaaaucaaucagucuuuggcguuuauuaggaagucggacgaacuccugcacaacguaaaugucggaaagagcacgacaaacaucaugaucaccacuauuauaaucgugauuaucguuauuuuacugcuacucaucgccgugggccuguuccuuuacugcaaagcacgguccaccccagucacauugucaaaggaucagcugaguggcauaaauaacaucgcuuucucuaauugaggacuaguaauaaggaaacuguaugaaugucugugggcaggaagugaagagauccuucuguaaagguuuuuggaauuaugucugcugaauaauaaacuuuuuugaaauaauaaaucugguagaaaaaugagaucuaaaaaaaaaaaaaaaaaaaaaaaaaaaaaaaaaaaaaaaaaaaaaaaaaaaaaaaaaaaaaaaaugcaucccccccccccccccccccccccccccccccaaaggcucuuuucagagccaccagaauu

SEQ ID NO: 17771 - RNA, 1961 nt, Artificial Sequence
  mRNA product Design d-2 comprising derived and/or modified sequence from HRSV(Memphis-37)__AIY60640.1__F_DSCav1_mut6 (opt4)
gggagagcggcucggccauuuugucccagucaguccggaggcugcggcugcagaaguaccgccugcggaguaacugcaaagaagcuuaccauggagcugcccauccugaagaccaacgccaucaccaccauccuggccgccgugacccugugcuucgccagcagccagaacaucaccgaggaguucuaccagagcaccugcagcgccgugagcaagggcuaccugggcgcccugagaaccggcugguacaccagcgugaucaccaucgagcugagcaacaucaaggagaacaagugcaacggcaccgacgccaaggugaagcugaucaagcaggagcuggacaaguacaagaacgccgugaccgaccugcagaugcugaugugcagcacccccgccgccggcagcggcagcgccaucgccagcggcaucgccgugugcaaggugcugcaccuggagggcgaggugaacaagaucaagaacgcccugcugagcaccaacaaggccguggugagccugagcaacggcgugagcgugcugaccuucaaggugcuggaccugaagaacuacaucgacaagcagcugcugcccauccugaacaagcagagcugcagcauccccaaccccgagaccgugauggaguuccagcagaagaacaacagacugcuggagaucaccagagaguucagcgugaacgccggcgugaccacccccgugagcaccuacaugcugaccaacagcgagcugcugagccugaucaacgacaugcccaucaccaacgaccagaagaagcugaugagcaacaacgugcagaucgugagacagcagagcuacagcaucaugugcaucaucaaggaggaggugcuggccuacguggugcagcugccccuguacggcgugaucgacacccccugcuggaagcugcacaccagcccccugugcaccaccaacaccaaggagggcagcaacaucugccugaccagaaccgacagaggcugguacugcgacaacgccggcagcgugagcuucuucccccaggccgagaccugcaaggugugcagcaacagaguguucugcgacaccaugaacagccugacccugcccagcgaggugaaccugugcaacaucgacaucuucaaccccaaguacgacugcaagaucaugaccagcaagaccgacgugagcagcagcgugaucaccagccugggcgccaucgugagcugcuacggcaagaccaagugcaccgccagcaacaagaacaagggcaucaucaagaccuucagcaacggcugcgacuacgugagcaacaagggcguggacaccgugagcgugggcaacacccuguacuacgugaacaagcaggagggccagagccuguacgugaagggcgagcccaucaucaacuucuacgacccccugguguuccccagcgacgaguucgacgccagcaucagccaggugaacgagaagaucaaccagagccuggccuucaucagaaagagcgacgagcugcugcacaacgugaacgugggcaagagcaccaccaacaucaugaucaccaccaucaucaucgugaucaucgugauccugcugcugcugaucgccgugggccuguuccuguacugcaaggccagaagcacccccgugacccugagcaaggaccagcugagcggcaucaacaacaucgccuucagcaacugaggacuaguaauaaggaaacuguaugaaugucugugggcaggaagugaagagauccuucuguaaagguuuuuggaauuaugucugcugaauaauaaacuuuuuugaaauaauaaaucugguagaaaaaugagaucuaaaaaaaaaaaaaaaaaaaaaaaaaaaaaaaaaaaaaaaaaaaaaaaaaaaaaaaaaaaaaaaaugcaucccccccccccccccccccccccccccccccaaaggcucuuuucagagccaccagaauu

SEQ ID NO: 17772 - RNA, 1961 nt, Artificial Sequence
  mRNA product Design d-2 comprising derived and/or modified sequence from HRSV(Memphis-37)__AIY60640.1__F_DSCav1_mut6 (opt5)
gggagagcggcucggccauuuugucccagucaguccggaggcugcggcugcagaaguaccgccugcggaguaacugcaaagaagcuuaccauggagcugcccauccucaagaccaacgccauuacaacgauccuggcugccgugacccuuugcuucgcgagcucccagaauauuacagaagaguuuuaccaaucuaccuguagcgcugucuccaaaggcuaucugggggcccucagaacaggaugguacaccucuguuaucacaauugaacugagcaacaucaaggagaauaaaugcaacggcaccgacgccaaggugaaacuuaucaagcaggaacuggauaaguauaaaaaugcugugacggaccuccagaugcugauguguuccaccccugccgcugggucuggaagcgccauugcguccggcaucgccgucugcaaggugcugcaccucgagggggagguuaacaaaauuaagaaugcucugcuuagcacaaacaaagccguggucucucuguccaauggagugagcguucucaccuucaaggugcuggaucuuaagaacuacaucgacaaacagcugcucccgauucugaauaagcaaucuuguuccauccccaacccugaaacagucauggaguuucagcagaaaaauaaccggcugcucgaaauuacccgcgaguucagcgugaaugcuggcgugacgacacccgucucuaccuauaugcugacaaacuccgagcuucugagccucaucaacgauaugccuaucaccaaugaccagaagaaacugauguccaacaauguucaaauugugagacagcagucuuacagcaucaugugcauuaucaaggaagaggugcuugccuaugucgugcagcugccccucuacggcguuauugauaccccuuguuggaaacugcauacauccccgcugugcacgaccaacacaaaggaagggagcaauaucugucucacccggacagaccgcggaugguacugcgauaacgcgggcucuguguccuuuuucccccaagccgagaccuguaaggucugcagcaauagaguguuuugcgacacgaugaacucucugacacuuccuagcgaaguuaaucuguguaacaucgauauuuucaaucccaaauaugacugcaagaucaugaccuccaaaaccgaugugucuagcuccgucauuacaagccucggggcuaucgugucuuguuacggaaagaccaaaugcacagccuccaacaagaauaagggcauuaucaaaacguuuagcaacgggugugacuaugucucuaauaagggaguggacaccguuuccgugggcaacacacuguacuaugucaacaaacaggagggccagagccuuuacgugaagggggagccuaucauuaauuucuaugauccccugguuuuuccguccgacgaauuugaugcuucuaucagccaagugaacgagaaaauuaaucagucccucgccuucauccggaagucugacgaacugcugcacaacgucaaugugggaaagagcaccacaaacauuaugaucaccacgauuaucaucgugauuaucguuauucuccugcuucugaucgccgucggccucuuccuguacugcaaagcucgcuccaccccugugacacugagcaaggaucagcuuucugggauuaauaacaucgcguucuccaauugaggacuaguaauaaggaaacuguaugaaugucugugggcaggaagugaagagauccuucuguaaagguuuuuggaauuaugucugcugaauaauaaacuuuuuugaaauaauaaaucugguagaaaaaugagaucuaaaaaaaaaaaaaaaaaaaaaaaaaaaaaaaaaaaaaaaaaaaaaaaaaaaaaaaaaaaaaaaaugcaucccccccccccccccccccccccccccccccaaaggcucuuuucagagccaccagaauu

SEQ ID NO: 17773 - RNA, 1961 nt, Artificial Sequence
  mRNA product Design d-2 comprising derived and/or modified sequence from HRSV(Memphis-37)__AIY60640.1__F_DSCav1_mut6 (opt6)
gggagagcggcucggccauuuugucccagucaguccggaggcugcggcugcagaaguaccgccugcggaguaacugcaaagaagcuuaccauggaacuaccaauuuuaaaaacaaacgcaauuacaacuauacucgcagcaguaacauuauguuucgccucaucccaaaacauaacagaagaauuuuaccaaucaacaugcagcgcaguaucaaaaggauaucucggagcauuacgaacagguugguacacaucuguaaucacuauagaacuaucaaacauaaaagaaaacaaaugcaauggaaccgacgcaaaaguaaaauuaauaaaacaagaacucgauaaauacaaaaaugcaguaacagaccuccaaaugcucauguguucaacaccagccgcaggaucagguuccgccauagcaucuggcauagcaguaugcaaaguacuccacuuagaaggagaaguuaacaaaauaaaaaacgcacuauuaucaacaaacaaagcaguaguaucccucucaaacggagucucaguauuaacauucaaaguauuagaccuaaaaaacuacauagacaaacaacuacuuccaauacucaacaaacaaucaugcucaauaccaaacccagaaaccguaauggaauuucaacaaaaaaacaaccgacuacuagaaaucacacgagaauuuucaguaaacgccggugucacaacuccaguaucaacuuauauguuaaccaacucagaacuauuaucauuaauaaacgauaugcccauaacuaacgaccaaaaaaaauuaaugucaaacaacguacaaauaguacgccaacaaaguuacucaauaaugugcaucauaaaagaagaaguauuagcguacguuguacaacuaccucuauacggagucauagacacaccaugcuggaaacuucacacaucaccacuauguacaacaaacacaaaagaaggcaguaacauaugccuaacaagaacagaccguggaugguauugugacaacgcuggaucuguaucauucuucccucaagcagaaaccuguaaaguuugcucaaacagagucuucugugacacaaugaacucucuaacacuaccuuccgaagugaaccucuguaacauagacauauucaauccaaaauaugauugcaaaauaaugacuucaaaaacagauguaucauccucuguuauaacaucauuaggcgccauaguuucaugcuacggaaaaacuaaaugcacagcaucaaacaaaaacaaaggaauaauaaaaaccuucucaaauggaugcgacuacguaagcaacaaaggcguagacacaguaucaguagguaauacauuauacuacguaaacaaacaagaaggacaaucacuuuauguuaaaggagaaccuauaauaaacuucuacgacccacuuguauuuccauccgaugaauuugacgcaucuauaucacaagucaacgaaaaaauaaaccaaucauuagcauucauucgaaaauccgaugaacuacuccauaacguaaaugucggaaaaucaacaaccaacauaaugaucacaacaauaaucauagugauaauaguaauacuccuacuacuaaucgcaguaggucuauuccuauauuguaaagcaagaucuacuccaguuacacucucuaaagaccaauuaagcgguaucaacaacaucgccuucagcaauuaaggacuaguaauaaggaaacuguaugaaugucugugggcaggaagugaagagauccuucuguaaagguuuuuggaauuaugucugcugaauaauaaacuuuuuugaaauaauaaaucugguagaaaaaugagaucuaaaaaaaaaaaaaaaaaaaaaaaaaaaaaaaaaaaaaaaaaaaaaaaaaaaaaaaaaaaaaaaaugcaucccccccccccccccccccccccccccccccaaaggcucuuuucagagccaccagaauu

SEQ ID NO: 17774 - RNA, 1961 nt, Artificial Sequence
  mRNA product Design d-2 comprising derived and/or modified sequence from HRSV(Memphis-37)__AIY60640.1__F_DSCav1_mut6 (opt11)
gggagagcggcucggccauuuugucccagucaguccggaggcugcggcugcagaaguaccgccugcggaguaacugcaaagaagcuuaccauggagcugcccauccucaagaccaacgccaucaccacgauccuggccgcggugacccugugcuucgcgagcucccaaaacaucaccgaggaguucuaccagagcacgugcuccgccgucagcaagggcuaccucggggcccugcgcaccggcugguacaccuccgugaucaccaucgagcugagcaacaucaaggaaaacaagugcaacgggacggacgcaaaggugaagcucaucaagcaggagcuggauaaguacaagaacgcggucacggaccugcagaugcucaugugcuccaccccggccgccggcagcggguccgccaucgcguccggcaucgccgugugcaagguguugcaccuggagggcgaggucaacaagaucaagaacgcccuccuuuccaccaauaaggcuguugugagccuguccaacggggucagcgugcucaccuucaaggugcuggaccugaagaacuacaucgacaagcagcuccugcccauccugaacaagcaguccugcagcauccccaaccccgagacagucauggaguuccagcagaagaacaaccggcuccuggagaucacccgcgaguucuccguuaacgccggggugaccaccccgguaagcacauacaugcugaccaacagcgagcuccugagccugaucaacgacaugcccaucaccaacgaccagaagaagcucaugagcaacaacgugcagaucgugcggcagcaguccuacagcaucaugugcaucaucaaggaggagguccuggcguacguggugcaacugccccucuacggggucaucgacacccccugcuggaagcugcacacguccccgcugugcaccaccaacaccaaggagggcagcaacaucugccucacgcgcaccgaccgggggugguacugcgacaacgcaggcuccgugagcuucuucccccaggccgagaccugcaaggugugcuccaaccgcgucuucugcgacaccaugaacagccugacgcugcccuccgaggugaaccucugcaacaucgacaucuucaaccccaaguacgacuguaagaucaugaccagcaagaccgaugucuccagcuccgugaucaccagccugggcgccauaguguccuguuaugggaagacgaagugcaccgccagcaacaagaacaaaggcaucaucaagaccuucuccaacgggugcgacuacgucagcaacaagggcguggacacaguguccgucggcaacacgcuguacuacgugaacaagcaggaggggcagagccucuacgugaagggcgagccgaucaucaacuucuacgauccccuggucuuccccagcgacgaguucgacgcguccaucagccaagugaacgagaagaucaaccagucccuggccuucauccgcaagagcgacgagcuccugcacaacgugaacgucgggaaguccaccaccaacaucaugaucaccaccaucaucaucgugaucaucgucauccugcuccugcugaucgccgucggccucuuccuguacugcaaggcccggagcacgcccgugacccuguccaaggaccagcugucgggcaucaacaacaucgccuucuccaacugaggacuaguaauaaggaaacuguaugaaugucugugggcaggaagugaagagauccuucuguaaagguuuuuggaauuaugucugcugaauaauaaacuuuuuugaaauaauaaaucugguagaaaaaugagaucuaaaaaaaaaaaaaaaaaaaaaaaaaaaaaaaaaaaaaaaaaaaaaaaaaaaaaaaaaaaaaaaaugcaucccccccccccccccccccccccccccccccaaaggcucuuuucagagccaccagaauu

SEQ ID NO: 17775 - RNA, 2277 nt, Artificial Sequence
  mRNA product Design d-3 comprising derived and/or modified sequence from HRSV(Memphis-37)__AIY60640.1__F_DSCav1_mut6 (opt1)
gggagagggcgcuuggcuugcaaggacccugagcugcggcauugaagcacacccaacccaacucgacugaagucagccucacugaaccggaucugagaaucuucucucucugggcuugccagggcucuccgaaccuagcuagcauccucuucaauuccaacuagaaagcuuaccauggagcugcccauccucaagaccaacgccaucaccacgauccuggccgcggugacccugugcuucgccagcucccagaacaucaccgaggaguucuaccagagcacgugcuccgccgucagcaagggcuaccucggcgcccugcgcaccgggugguacaccagcgugaucaccaucgagcuguccaacaucaaggagaacaagugcaacggcaccgacgccaaggugaagcucaucaagcaggagcuggacaaguacaagaacgcggucacggaccugcagaugcugaugugcagcaccccggccgccggcuccgggagcgcgaucgccuccggcaucgccgucugcaaggugcugcaccucgagggcgaggugaacaagaucaagaacgcccugcuguccaccaacaaggccgucgugagccucuccaacggggugagcguccugaccuucaaggugcuggaccucaagaacuacaucgacaagcagcugcugcccauccugaacaagcagagcugcuccauccccaaccccgagaccgucauggaguuccagcagaagaacaaccgccuccuggagaucacgcgggaguucagcgugaacgcgggcgugaccacccccgucuccaccuacaugcugacgaacagcgagcuccugucccugaucaacgacaugccgaucaccaacgaccagaagaagcucaugagcaacaacgugcagaucgugcgccagcaguccuacagcaucaugugcaucaucaaggaggagguccuggccuacguggugcagcugccccucuacggggucaucgacacccccugcuggaagcugcacaccagcccccugugcacgaccaacaccaaggagggcuccaacaucugccucacccggacggaccgcgggugguacugcgacaacgccggcagcguguccuucuucccgcaggccgagaccugcaaggucugcagcaaccggguguucugcgacaccaugaacucccugacccugcccagcgaggugaaccucugcaacaucgacaucuucaaccccaaguacgacugcaagaucaugacguccaagaccgacgucagcuccagcgugaucaccucccugggcgccaucgugagcugcuacgggaagaccaagugcacggcgagcaacaagaacaagggcaucaucaagaccuucuccaacgggugcgacuacgucagcaacaagggcguggacaccguguccgucggcaacacccuguacuacgugaacaagcaggagggccagagccucuacgugaagggggagcccaucaucaacuucuacgacccgcuggucuuccccuccgacgaguucgacgccagcaucucccaggugaacgagaagaucaaccagagccuggccuucauccggaaguccgacgagcuccugcacaacgugaacgucggcaagagcaccacgaacaucaugaucaccaccaucaucaucgugaucaucgugauccugcugcuccugaucgccgucgggcuguuccucuacugcaaggcccgcuccacccccgugacgcugagcaaggaccagcuguccgggaucaacaacaucgcguucagcaacugaggacuagugaagggaacacccaaauuuaauucagccuuaagcacaauuaauuaagagugaaacguaauuguacaagcaguuggucacccaccauagggcaugaucaacaccgcaaccuuuccuuuuucccccagugauucugaaaaaccccucuucccuucagcuugcuuagauguuccaaauuuaguaagcuuaaggcggccuacagaagaaaaagaaaaaaaaggccacaaaaguucccucucacuuucaguaaauaaaauaaaagcagcaacagaaauaaagaaauaaaugaaauucaaaaugaaauaaauauuguguugugcagcauuaaaaaaucaauaaaaauuaaaaaugagcaagaucuaaaaaaaaaaaaaaaaaaaaaaaaaaaaaaaaaaaaaaaaaaaaaaaaaaaaaaaaaaaaaaaaugcaucccccccccccccccccccccccccccccccaaaggcucuuuucagagccaccagaauu

SEQ ID NO: 17776 - RNA, 2277 nt, Artificial Sequence
  mRNA product Design d-3 comprising derived and/or modified sequence from HRSV(Memphis-37)__AIY60640.1__F_DSCav1_mut6 (opt1)
gggagagggcgcuuggcuugcaaggacccugagcugcggcauugaagcacacccaacccaacucgacugaagucagccucacugaaccggaucugagaaucuucucucucugggcuugccagggcucuccgaaccuagcuagcauccucuucaauuccaacuagaaagcuuaccauggagcugcccauccucaagaccaacgccaucaccacgauccuggccgcggugacccugugcuucgccagcucccagaacaucaccgaggaguucuaccagagcacgugcuccgccgucagcaagggcuaccucggggcccugcgcaccggcugguacaccuccgugaucaccaucgagcugagcaacaucaaggagaacaagugcaacgggaccgacgccaaggugaagcucaucaagcaggagcuggacaaguacaagaacgcggucacggaccugcagaugcucaugugcuccaccccggccgccggcagcggguccgccaucgcgagcggcaucgccgugugcaaggugcugcaccuggagggcgaggucaacaagaucaagaacgcccuccuguccaccaacaaggccguggugagccuguccaacggggucagcgugcucaccuucaaggugcuggaccugaagaacuacaucgacaagcagcuccugcccauccugaacaagcaguccugcagcauccccaaccccgagacggucauggaguuccagcagaagaacaaccggcuccuggagaucacccgcgaguucuccgugaacgccggcgugaccaccccggucagcacguacaugcugaccaacuccgagcuccugagccugaucaacgacaugcccaucaccaacgaccagaagaagcucaugagcaacaacgugcagaucgugcggcagcaguccuacagcaucaugugcaucaucaaggaggagguccuggcguacguggugcagcugccccucuacggggucaucgacacccccugcuggaagcugcacacguccccgcugugcaccaccaacaccaaggagggcagcaacaucugccucacgcgcaccgaccgggggugguacugcgacaacgccggcuccgugagcuucuucccccaggccgagaccugcaaggugugcuccaaccgcgucuucugcgacaccaugaacagccugacgcugcccuccgaggugaaccucugcaacaucgacaucuucaaccccaaguacgacugcaagaucaugaccagcaagaccgacgucuccagcuccgugaucaccagccugggcgccaucguguccugcuacgggaagacgaagugcaccgccagcaacaagaacaagggcaucaucaagaccuucuccaacgggugcgacuacgucagcaacaagggcguggacaccguguccgucggcaacacgcuguacuacgugaacaagcaggaggggcagagccucuacgugaagggcgagccgaucaucaacuucuacgacccccuggucuuccccagcgacgaguucgacgcguccaucagccaggugaacgagaagaucaaccagucccuggccuucauccgcaagagcgacgagcuccugcacaacgugaacgucgggaaguccaccaccaacaucaugaucaccaccaucaucaucgugaucaucgugauccugcuccugcugaucgccgucggccucuuccuguacugcaaggcccggagcacgcccgugacccuguccaaggaccagcugagcgggaucaacaacaucgccuucuccaacugaggacuagugaagggaacacccaaauuuaauucagccuuaagcacaauuaauuaagagugaaacguaauuguacaagcaguuggucacccaccauagggcaugaucaacaccgcaaccuuuccuuuuucccccagugauucugaaaaaccccucuucccuucagcuugcuuagauguuccaaauuuaguaagcuuaaggcggccuacagaagaaaaagaaaaaaaaggccacaaaaguucccucucacuuucaguaaauaaaauaaaagcagcaacagaaauaaagaaauaaaugaaauucaaaaugaaauaaauauuguguugugcagcauuaaaaaaucaauaaaaauuaaaaaugagcaagaucuaaaaaaaaaaaaaaaaaaaaaaaaaaaaaaaaaaaaaaaaaaaaaaaaaaaaaaaaaaaaaaaaugcaucccccccccccccccccccccccccccccccaaaggcucuuuucagagccaccagaauu

SEQ ID NO: 17777 - RNA, 2277 nt, Artificial Sequence
  mRNA product Design d-3 comprising derived and/or modified sequence from HRSV(Memphis-37)__AIY60640.1__F_DSCav1_mut6 (opt2)
gggagagggcgcuuggcuugcaaggacccugagcugcggcauugaagcacacccaacccaacucgacugaagucagccucacugaaccggaucugagaaucuucucucucugggcuugccagggcucuccgaaccuagcuagcauccucuucaauuccaacuagaaagcuuaccauggagcuccccauccucaagaccaacgccaucaccaccauccucgccgccgucacccucugcuucgccuccucccagaacaucaccgaggaguucuaccaguccaccugcuccgccgucuccaagggcuaccucggcgcccuccgcaccggcugguacaccuccgucaucaccaucgagcucuccaacaucaaggagaacaagugcaacggcaccgacgccaaggucaagcucaucaagcaggagcucgacaaguacaagaacgccgucaccgaccuccagaugcucaugugcuccacccccgccgccggcuccggcuccgccaucgccuccggcaucgccgucugcaagguccuccaccucgagggcgaggucaacaagaucaagaacgcccuccucuccaccaacaaggccgucgucucccucuccaacggcgucuccguccucaccuucaagguccucgaccucaagaacuacaucgacaagcagcuccuccccauccucaacaagcaguccugcuccauccccaaccccgagaccgucauggaguuccagcagaagaacaaccgccuccucgagaucacccgcgaguucuccgucaacgccggcgucaccacccccgucuccaccuacaugcucaccaacuccgagcuccucucccucaucaacgacaugcccaucaccaacgaccagaagaagcucauguccaacaacguccagaucguccgccagcaguccuacuccaucaugugcaucaucaaggaggagguccucgccuacgucguccagcucccccucuacggcgucaucgacacccccugcuggaagcuccacaccuccccccucugcaccaccaacaccaaggagggcuccaacaucugccucacccgcaccgaccgcggcugguacugcgacaacgccggcuccgucuccuucuucccccaggccgagaccugcaaggucugcuccaaccgcgucuucugcgacaccaugaacucccucacccuccccuccgaggucaaccucugcaacaucgacaucuucaaccccaaguacgacugcaagaucaugaccuccaagaccgacgucuccuccuccgucaucaccucccucggcgccaucgucuccugcuacggcaagaccaagugcaccgccuccaacaagaacaagggcaucaucaagaccuucuccaacggcugcgacuacgucuccaacaagggcgucgacaccgucuccgucggcaacacccucuacuacgucaacaagcaggagggccagucccucuacgucaagggcgagcccaucaucaacuucuacgacccccucgucuuccccuccgacgaguucgacgccuccaucucccaggucaacgagaagaucaaccagucccucgccuucauccgcaaguccgacgagcuccuccacaacgucaacgucggcaaguccaccaccaacaucaugaucaccaccaucaucaucgucaucaucgucauccuccuccuccucaucgccgucggccucuuccucuacugcaaggcccgcuccacccccgucacccucuccaaggaccagcucuccggcaucaacaacaucgccuucuccaacugaggacuagugaagggaacacccaaauuuaauucagccuuaagcacaauuaauuaagagugaaacguaauuguacaagcaguuggucacccaccauagggcaugaucaacaccgcaaccuuuccuuuuucccccagugauucugaaaaaccccucuucccuucagcuugcuuagauguuccaaauuuaguaagcuuaaggcggccuacagaagaaaaagaaaaaaaaggccacaaaaguucccucucacuuucaguaaauaaaauaaaagcagcaacagaaauaaagaaauaaaugaaauucaaaaugaaauaaauauuguguugugcagcauuaaaaaaucaauaaaaauuaaaaaugagcaagaucuaaaaaaaaaaaaaaaaaaaaaaaaaaaaaaaaaaaaaaaaaaaaaaaaaaaaaaaaaaaaaaaaugcaucccccccccccccccccccccccccccccccaaaggcucuuuucagagccaccagaauu

SEQ ID NO: 17778 - RNA, 2277 nt, Artificial Sequence
  mRNA product Design d-3 comprising derived and/or modified sequence from HRSV(Memphis-37)__AIY60640.1__F_DSCav1_mut6 (opt3)
gggagagggcgcuuggcuugcaaggacccugagcugcggcauugaagcacacccaacccaacucgacugaagucagccucacugaaccggaucugagaaucuucucucucugggcuugccagggcucuccgaaccuagcuagcauccucuucaauuccaacuagaaagcuuaccauggagcugcccauccucaagaccaacgccauuacaacuauacuugcugcagugacgcugugcuucgccagcucccagaauaucaccgaagaguuuuaccaaucuacauguucagcggucaguaaaggcuauuugggggcuuuaagaacuggaugguacaccagcguuauuacaaucgaacuguccaacauuaaggagaauaaaugcaacgguaccgacgccaaggugaaacuaaucaagcaggaacucgauaaguauaaaaaugcaguaacugaccugcagaugcuuauguguucuacuccugccgcuggcucggggucagcaauagccagcggaaucgcugugugcaagguccugcacuuggagggcgaggugaacaaaauuaagaaugcccuccugaguaccaacaaagcgguugugucccugucuaauggugucagcgugcucacguucaagguauuagaucugaagaacuacaucgacaaacagcuuuugccaauucugaauaagcaauccuguucaaucccgaaccccgaaacuguuauggaguuucagcagaaaaauaacaggcuacucgaaauaacccgggaguucagugugaaugcaggggucacaacuccugugagcaccuauaugcugacaaacucugagcuucuguccuugauuaacgauaugccaaucaccaaugaccagaagaaacucaugucaaacaaugugcaaauuguccgccagcagagcuacaguaucaugugcaucauuaaggaagagguucuggccuaugugguacaguuaccccuguacggagugauagauacgccuuguuggaaacuccauacuucuccacuuugcacaaccaacacuaaggaaggcuccaauaucugucugacacgaaccgaccguggcugguacugcgauaacgcugggagcgucucguuuuucccccaagccgagacguguaaggugugcucuaauagaguuuucugcgacaccaugaacuccuugacacuaccuucagaagugaaucuguguaacauugauaucuucaauccaaaauaugacugcaagauaaugacaaguaaaaccgaugucagcuccucugugauuacaagccucggagcaaucguaucauguuacgguaagacuaaaugcaccgcuaguaacaagaauaagggcaucauuaaaacauuuuccaacgggugugacuauguuagcaauaagggaguggacaccgucucugugggcaacacucuguacuaugucaacaaacaggagggucagucacuuuacgugaagggggagccgaucauuaauuucuaugauccccugguuuuuccuagugacgaauuugaugccagcauaucccaagugaacgagaaaaucaaucagucuuuggcguuuauuaggaagucggacgaacuccugcacaacguaaaugucggaaagagcacgacaaacaucaugaucaccacuauuauaaucgugauuaucguuauuuuacugcuacucaucgccgugggccuguuccuuuacugcaaagcacgguccaccccagucacauugucaaaggaucagcugaguggcauaaauaacaucgcuuucucuaauugaggacuagugaagggaacacccaaauuuaauucagccuuaagcacaauuaauuaagagugaaacguaauuguacaagcaguuggucacccaccauagggcaugaucaacaccgcaaccuuuccuuuuucccccagugauucugaaaaaccccucuucccuucagcuugcuuagauguuccaaauuuaguaagcuuaaggcggccuacagaagaaaaagaaaaaaaaggccacaaaaguucccucucacuuucaguaaauaaaauaaaagcagcaacagaaauaaagaaauaaaugaaauucaaaaugaaauaaauauuguguugugcagcauuaaaaaaucaauaaaaauuaaaaaugagcaagaucuaaaaaaaaaaaaaaaaaaaaaaaaaaaaaaaaaaaaaaaaaaaaaaaaaaaaaaaaaaaaaaaaugcaucccccccccccccccccccccccccccccccaaaggcucuuuucagagccaccagaauu

SEQ ID NO: 17779 - RNA, 2277 nt, Artificial Sequence
  mRNA product Design d-3 comprising derived and/or modified sequence from HRSV(Memphis-37)__AIY60640.1__F_DSCav1_mut6 (opt4)
gggagagggcgcuuggcuugcaaggacccugagcugcggcauugaagcacacccaacccaacucgacugaagucagccucacugaaccggaucugagaaucuucucucucugggcuugccagggcucuccgaaccuagcuagcauccucuucaauuccaacuagaaagcuuaccauggagcugcccauccugaagaccaacgccaucaccaccauccuggccgccgugacccugugcuucgccagcagccagaacaucaccgaggaguucuaccagagcaccugcagcgccgugagcaagggcuaccugggcgcccugagaaccggcugguacaccagcgugaucaccaucgagcugagcaacaucaaggagaacaagugcaacggcaccgacgccaaggugaagcugaucaagcaggagcuggacaaguacaagaacgccgugaccgaccugcagaugcugaugugcagcacccccgccgccggcagcggcagcgccaucgccagcggcaucgccgugugcaaggugcugcaccuggagggcgaggugaacaagaucaagaacgcccugcugagcaccaacaaggccguggugagccugagcaacggcgugagcgugcugaccuucaaggugcuggaccugaagaacuacaucgacaagcagcugcugcccauccugaacaagcagagcugcagcauccccaaccccgagaccgugauggaguuccagcagaagaacaacagacugcuggagaucaccagagaguucagcgugaacgccggcgugaccacccccgugagcaccuacaugcugaccaacagcgagcugcugagccugaucaacgacaugcccaucaccaacgaccagaagaagcugaugagcaacaacgugcagaucgugagacagcagagcuacagcaucaugugcaucaucaaggaggaggugcuggccuacguggugcagcugccccuguacggcgugaucgacacccccugcuggaagcugcacaccagcccccugugcaccaccaacaccaaggagggcagcaacaucugccugaccagaaccgacagaggcugguacugcgacaacgccggcagcgugagcuucuucccccaggccgagaccugcaaggugugcagcaacagaguguucugcgacaccaugaacagccugacccugcccagcgaggugaaccugugcaacaucgacaucuucaaccccaaguacgacugcaagaucaugaccagcaagaccgacgugagcagcagcgugaucaccagccugggcgccaucgugagcugcuacggcaagaccaagugcaccgccagcaacaagaacaagggcaucaucaagaccuucagcaacggcugcgacuacgugagcaacaagggcguggacaccgugagcgugggcaacacccuguacuacgugaacaagcaggagggccagagccuguacgugaagggcgagcccaucaucaacuucuacgacccccugguguuccccagcgacgaguucgacgccagcaucagccaggugaacgagaagaucaaccagagccuggccuucaucagaaagagcgacgagcugcugcacaacgugaacgugggcaagagcaccaccaacaucaugaucaccaccaucaucaucgugaucaucgugauccugcugcugcugaucgccgugggccuguuccuguacugcaaggccagaagcacccccgugacccugagcaaggaccagcugagcggcaucaacaacaucgccuucagcaacugaggacuagugaagggaacacccaaauuuaauucagccuuaagcacaauuaauuaagagugaaacguaauuguacaagcaguuggucacccaccauagggcaugaucaacaccgcaaccuuuccuuuuucccccagugauucugaaaaaccccucuucccuucagcuugcuuagauguuccaaauuuaguaagcuuaaggcggccuacagaagaaaaagaaaaaaaaggccacaaaaguucccucucacuuucaguaaauaaaauaaaagcagcaacagaaauaaagaaauaaaugaaauucaaaaugaaauaaauauuguguugugcagcauuaaaaaaucaauaaaaauuaaaaaugagcaagaucuaaaaaaaaaaaaaaaaaaaaaaaaaaaaaaaaaaaaaaaaaaaaaaaaaaaaaaaaaaaaaaaaugcaucccccccccccccccccccccccccccccccaaaggcucuuuucagagccaccagaauu

SEQ ID NO: 17780 - RNA, 2277 nt, Artificial Sequence
  mRNA product Design d-3 comprising derived and/or modified sequence from HRSV(Memphis-37)__AIY60640.1__F_DSCav1_mut6 (opt5)
gggagagggcgcuuggcuugcaaggacccugagcugcggcauugaagcacacccaacccaacucgacugaagucagccucacugaaccggaucugagaaucuucucucucugggcuugccagggcucuccgaaccuagcuagcauccucuucaauuccaacuagaaagcuuaccauggagcugcccauccucaagaccaacgccauuacaacgauccuggcugccgugacccuuugcuucgcgagcucccagaauauuacagaagaguuuuaccaaucuaccuguagcgcugucuccaaaggcuaucugggggcccucagaacaggaugguacaccucuguuaucacaauugaacugagcaacaucaaggagaauaaaugcaacggcaccgacgccaaggugaaacuuaucaagcaggaacuggauaaguauaaaaaugcugugacggaccuccagaugcugauguguuccaccccugccgcugggucuggaagcgccauugcguccggcaucgccgucugcaaggugcugcaccucgagggggagguuaacaaaauuaagaaugcucugcuuagcacaaacaaagccguggucucucuguccaauggagugagcguucucaccuucaaggugcuggaucuuaagaacuacaucgacaaacagcugcucccgauucugaauaagcaaucuuguuccauccccaacccugaaacagucauggaguuucagcagaaaaauaaccggcugcucgaaauuacccgcgaguucagcgugaaugcuggcgugacgacacccgucucuaccuauaugcugacaaacuccgagcuucugagccucaucaacgauaugccuaucaccaaugaccagaagaaacugauguccaacaauguucaaauugugagacagcagucuuacagcaucaugugcauuaucaaggaagaggugcuugccuaugucgugcagcugccccucuacggcguuauugauaccccuuguuggaaacugcauacauccccgcugugcacgaccaacacaaaggaagggagcaauaucugucucacccggacagaccgcggaugguacugcgauaacgcgggcucuguguccuuuuucccccaagccgagaccuguaaggucugcagcaauagaguguuuugcgacacgaugaacucucugacacuuccuagcgaaguuaaucuguguaacaucgauauuuucaaucccaaauaugacugcaagaucaugaccuccaaaaccgaugugucuagcuccgucauuacaagccucggggcuaucgugucuuguuacggaaagaccaaaugcacagccuccaacaagaauaagggcauuaucaaaacguuuagcaacgggugugacuaugucucuaauaagggaguggacaccguuuccgugggcaacacacuguacuaugucaacaaacaggagggccagagccuuuacgugaagggggagccuaucauuaauuucuaugauccccugguuuuuccguccgacgaauuugaugcuucuaucagccaagugaacgagaaaauuaaucagucccucgccuucauccggaagucugacgaacugcugcacaacgucaaugugggaaagagcaccacaaacauuaugaucaccacgauuaucaucgugauuaucguuauucuccugcuucugaucgccgucggccucuuccuguacugcaaagcucgcuccaccccugugacacugagcaaggaucagcuuucugggauuaauaacaucgcguucuccaauugaggacuagugaagggaacacccaaauuuaauucagccuuaagcacaauuaauuaagagugaaacguaauuguacaagcaguuggucacccaccauagggcaugaucaacaccgcaaccuuuccuuuuucccccagugauucugaaaaaccccucuucccuucagcuugcuuagauguuccaaauuuaguaagcuuaaggcggccuacagaagaaaaagaaaaaaaaggccacaaaaguucccucucacuuucaguaaauaaaauaaaagcagcaacagaaauaaagaaauaaaugaaauucaaaaugaaauaaauauuguguugugcagcauuaaaaaaucaauaaaaauuaaaaaugagcaagaucuaaaaaaaaaaaaaaaaaaaaaaaaaaaaaaaaaaaaaaaaaaaaaaaaaaaaaaaaaaaaaaaaugcaucccccccccccccccccccccccccccccccaaaggcucuuuucagagccaccagaauu

SEQ ID NO: 17781 - RNA, 2277 nt, Artificial Sequence
  mRNA product Design d-3 comprising derived and/or modified sequence from HRSV(Memphis-37)__AIY60640.1__F_DSCav1_mut6 (opt6)
gggagagggcgcuuggcuugcaaggacccugagcugcggcauugaagcacacccaacccaacucgacugaagucagccucacugaaccggaucugagaaucuucucucucugggcuugccagggcucuccgaaccuagcuagcauccucuucaauuccaacuagaaagcuuaccauggaacuaccaauuuuaaaaacaaacgcaauuacaacuauacucgcagcaguaacauuauguuucgccucaucccaaaacauaacagaagaauuuuaccaaucaacaugcagcgcaguaucaaaaggauaucucggagcauuacgaacagguugguacacaucuguaaucacuauagaacuaucaaacauaaaagaaaacaaaugcaauggaaccgacgcaaaaguaaaauuaauaaaacaagaacucgauaaauacaaaaaugcaguaacagaccuccaaaugcucauguguucaacaccagccgcaggaucagguuccgccauagcaucuggcauagcaguaugcaaaguacuccacuuagaaggagaaguuaacaaaauaaaaaacgcacuauuaucaacaaacaaagcaguaguaucccucucaaacggagucucaguauuaacauucaaaguauuagaccuaaaaaacuacauagacaaacaacuacuuccaauacucaacaaacaaucaugcucaauaccaaacccagaaaccguaauggaauuucaacaaaaaaacaaccgacuacuagaaaucacacgagaauuuucaguaaacgccggugucacaacuccaguaucaacuuauauguuaaccaacucagaacuauuaucauuaauaaacgauaugcccauaacuaacgaccaaaaaaaauuaaugucaaacaacguacaaauaguacgccaacaaaguuacucaauaaugugcaucauaaaagaagaaguauuagcguacguuguacaacuaccucuauacggagucauagacacaccaugcuggaaacuucacacaucaccacuauguacaacaaacacaaaagaaggcaguaacauaugccuaacaagaacagaccguggaugguauugugacaacgcuggaucuguaucauucuucccucaagcagaaaccuguaaaguuugcucaaacagagucuucugugacacaaugaacucucuaacacuaccuuccgaagugaaccucuguaacauagacauauucaauccaaaauaugauugcaaaauaaugacuucaaaaacagauguaucauccucuguuauaacaucauuaggcgccauaguuucaugcuacggaaaaacuaaaugcacagcaucaaacaaaaacaaaggaauaauaaaaaccuucucaaauggaugcgacuacguaagcaacaaaggcguagacacaguaucaguagguaauacauuauacuacguaaacaaacaagaaggacaaucacuuuauguuaaaggagaaccuauaauaaacuucuacgacccacuuguauuuccauccgaugaauuugacgcaucuauaucacaagucaacgaaaaaauaaaccaaucauuagcauucauucgaaaauccgaugaacuacuccauaacguaaaugucggaaaaucaacaaccaacauaaugaucacaacaauaaucauagugauaauaguaauacuccuacuacuaaucgcaguaggucuauuccuauauuguaaagcaagaucuacuccaguuacacucucuaaagaccaauuaagcgguaucaacaacaucgccuucagcaauuaaggacuagugaagggaacacccaaauuuaauucagccuuaagcacaauuaauuaagagugaaacguaauuguacaagcaguuggucacccaccauagggcaugaucaacaccgcaaccuuuccuuuuucccccagugauucugaaaaaccccucuucccuucagcuugcuuagauguuccaaauuuaguaagcuuaaggcggccuacagaagaaaaagaaaaaaaaggccacaaaaguucccucucacuuucaguaaauaaaauaaaagcagcaacagaaauaaagaaauaaaugaaauucaaaaugaaauaaauauuguguugugcagcauuaaaaaaucaauaaaaauuaaaaaugagcaagaucuaaaaaaaaaaaaaaaaaaaaaaaaaaaaaaaaaaaaaaaaaaaaaaaaaaaaaaaaaaaaaaaaugcaucccccccccccccccccccccccccccccccaaaggcucuuuucagagccaccagaauu

SEQ ID NO: 17782 - RNA, 2277 nt, Artificial Sequence
  mRNA product Design d-3 comprising derived and/or modified sequence from HRSV(Memphis-37)__AIY60640.1__F_DSCav1_mut6 (opt11)
gggagagggcgcuuggcuugcaaggacccugagcugcggcauugaagcacacccaacccaacucgacugaagucagccucacugaaccggaucugagaaucuucucucucugggcuugccagggcucuccgaaccuagcuagcauccucuucaauuccaacuagaaagcuuaccauggagcugcccauccucaagaccaacgccaucaccacgauccuggccgcggugacccugugcuucgcgagcucccaaaacaucaccgaggaguucuaccagagcacgugcuccgccgucagcaagggcuaccucggggcccugcgcaccggcugguacaccuccgugaucaccaucgagcugagcaacaucaaggaaaacaagugcaacgggacggacgcaaaggugaagcucaucaagcaggagcuggauaaguacaagaacgcggucacggaccugcagaugcucaugugcuccaccccggccgccggcagcggguccgccaucgcguccggcaucgccgugugcaagguguugcaccuggagggcgaggucaacaagaucaagaacgcccuccuuuccaccaauaaggcuguugugagccuguccaacggggucagcgugcucaccuucaaggugcuggaccugaagaacuacaucgacaagcagcuccugcccauccugaacaagcaguccugcagcauccccaaccccgagacagucauggaguuccagcagaagaacaaccggcuccuggagaucacccgcgaguucuccguuaacgccggggugaccaccccgguaagcacauacaugcugaccaacagcgagcuccugagccugaucaacgacaugcccaucaccaacgaccagaagaagcucaugagcaacaacgugcagaucgugcggcagcaguccuacagcaucaugugcaucaucaaggaggagguccuggcguacguggugcaacugccccucuacggggucaucgacacccccugcuggaagcugcacacguccccgcugugcaccaccaacaccaaggagggcagcaacaucugccucacgcgcaccgaccgggggugguacugcgacaacgcaggcuccgugagcuucuucccccaggccgagaccugcaaggugugcuccaaccgcgucuucugcgacaccaugaacagccugacgcugcccuccgaggugaaccucugcaacaucgacaucuucaaccccaaguacgacuguaagaucaugaccagcaagaccgaugucuccagcuccgugaucaccagccugggcgccauaguguccuguuaugggaagacgaagugcaccgccagcaacaagaacaaaggcaucaucaagaccuucuccaacgggugcgacuacgucagcaacaagggcguggacacaguguccgucggcaacacgcuguacuacgugaacaagcaggaggggcagagccucuacgugaagggcgagccgaucaucaacuucuacgauccccuggucuuccccagcgacgaguucgacgcguccaucagccaagugaacgagaagaucaaccagucccuggccuucauccgcaagagcgacgagcuccugcacaacgugaacgucgggaaguccaccaccaacaucaugaucaccaccaucaucaucgugaucaucgucauccugcuccugcugaucgccgucggccucuuccuguacugcaaggcccggagcacgcccgugacccuguccaaggaccagcugucgggcaucaacaacaucgccuucuccaacugaggacuagugaagggaacacccaaauuuaauucagccuuaagcacaauuaauuaagagugaaacguaauuguacaagcaguuggucacccaccauagggcaugaucaacaccgcaaccuuuccuuuuucccccagugauucugaaaaaccccucuucccuucagcuugcuuagauguuccaaauuuaguaagcuuaaggcggccuacagaagaaaaagaaaaaaaaggccacaaaaguucccucucacuuucaguaaauaaaauaaaagcagcaacagaaauaaagaaauaaaugaaauucaaaaugaaauaaauauuguguugugcagcauuaaaaaaucaauaaaaauuaaaaaugagcaagaucuaaaaaaaaaaaaaaaaaaaaaaaaaaaaaaaaaaaaaaaaaaaaaaaaaaaaaaaaaaaaaaaaugcaucccccccccccccccccccccccccccccccaaaggcucuuuucagagccaccagaauu

SEQ ID NO: 17783 - RNA, 1960 nt, Artificial Sequence
  mRNA product Design d-4 comprising derived and/or modified sequence from HRSV(Memphis-37)__AIY60640.1__F_DSCav1_mut6 (opt1)
gggagagucccgcagucggcguccagcggcucugcuuguucgugugugugucguugcaggccuuauucaagcuuaccauggagcugcccauccucaagaccaacgccaucaccacgauccuggccgcggugacccugugcuucgccagcucccagaacaucaccgaggaguucuaccagagcacgugcuccgccgucagcaagggcuaccucggcgcccugcgcaccgggugguacaccagcgugaucaccaucgagcuguccaacaucaaggagaacaagugcaacggcaccgacgccaaggugaagcucaucaagcaggagcuggacaaguacaagaacgcggucacggaccugcagaugcugaugugcagcaccccggccgccggcuccgggagcgcgaucgccuccggcaucgccgucugcaaggugcugcaccucgagggcgaggugaacaagaucaagaacgcccugcuguccaccaacaaggccgucgugagccucuccaacggggugagcguccugaccuucaaggugcuggaccucaagaacuacaucgacaagcagcugcugcccauccugaacaagcagagcugcuccauccccaaccccgagaccgucauggaguuccagcagaagaacaaccgccuccuggagaucacgcgggaguucagcgugaacgcgggcgugaccacccccgucuccaccuacaugcugacgaacagcgagcuccugucccugaucaacgacaugccgaucaccaacgaccagaagaagcucaugagcaacaacgugcagaucgugcgccagcaguccuacagcaucaugugcaucaucaaggaggagguccuggccuacguggugcagcugccccucuacggggucaucgacacccccugcuggaagcugcacaccagcccccugugcacgaccaacaccaaggagggcuccaacaucugccucacccggacggaccgcgggugguacugcgacaacgccggcagcguguccuucuucccgcaggccgagaccugcaaggucugcagcaaccggguguucugcgacaccaugaacucccugacccugcccagcgaggugaaccucugcaacaucgacaucuucaaccccaaguacgacugcaagaucaugacguccaagaccgacgucagcuccagcgugaucaccucccugggcgccaucgugagcugcuacgggaagaccaagugcacggcgagcaacaagaacaagggcaucaucaagaccuucuccaacgggugcgacuacgucagcaacaagggcguggacaccguguccgucggcaacacccuguacuacgugaacaagcaggagggccagagccucuacgugaagggggagcccaucaucaacuucuacgacccgcuggucuuccccuccgacgaguucgacgccagcaucucccaggugaacgagaagaucaaccagagccuggccuucauccggaaguccgacgagcuccugcacaacgugaacgucggcaagagcaccacgaacaucaugaucaccaccaucaucaucgugaucaucgugauccugcugcuccugaucgccgucgggcuguuccucuacugcaaggcccgcuccacccccgugacgcugagcaaggaccagcuguccgggaucaacaacaucgcguucagcaacugaggacuaguggaagcauuuuccuggcugauuaaaagaaauuacucagcuauggucaucuguuccuguuagaaggcuaugcagcauauuauauacuaugcgcauguuaugaaaugcauaauaaaaaauuuuaaaaaaucuaaaagaucuaaaaaaaaaaaaaaaaaaaaaaaaaaaaaaaaaaaaaaaaaaaaaaaaaaaaaaaaaaaaaaaaugcaucccccccccccccccccccccccccccccccaaaggcucuuuucagagccaccagaauu

SEQ ID NO: 17784 - RNA, 1960 nt, Artificial Sequence
  mRNA product Design d-4 comprising derived and/or modified sequence from HRSV(Memphis-37)__AIY60640.1__F_DSCav1_mut6 (opt1)
gggagagucccgcagucggcguccagcggcucugcuuguucgugugugugucguugcaggccuuauucaagcuuaccauggagcugcccauccucaagaccaacgccaucaccacgauccuggccgcggugacccugugcuucgccagcucccagaacaucaccgaggaguucuaccagagcacgugcuccgccgucagcaagggcuaccucggggcccugcgcaccggcugguacaccuccgugaucaccaucgagcugagcaacaucaaggagaacaagugcaacgggaccgacgccaaggugaagcucaucaagcaggagcuggacaaguacaagaacgcggucacggaccugcagaugcucaugugcuccaccccggccgccggcagcggguccgccaucgcgagcggcaucgccgugugcaaggugcugcaccuggagggcgaggucaacaagaucaagaacgcccuccuguccaccaacaaggccguggugagccuguccaacggggucagcgugcucaccuucaaggugcuggaccugaagaacuacaucgacaagcagcuccugcccauccugaacaagcaguccugcagcauccccaaccccgagacggucauggaguuccagcagaagaacaaccggcuccuggagaucacccgcgaguucuccgugaacgccggcgugaccaccccggucagcacguacaugcugaccaacuccgagcuccugagccugaucaacgacaugcccaucaccaacgaccagaagaagcucaugagcaacaacgugcagaucgugcggcagcaguccuacagcaucaugugcaucaucaaggaggagguccuggcguacguggugcagcugccccucuacggggucaucgacacccccugcuggaagcugcacacguccccgcugugcaccaccaacaccaaggagggcagcaacaucugccucacgcgcaccgaccgggggugguacugcgacaacgccggcuccgugagcuucuucccccaggccgagaccugcaaggugugcuccaaccgcgucuucugcgacaccaugaacagccugacgcugcccuccgaggugaaccucugcaacaucgacaucuucaaccccaaguacgacugcaagaucaugaccagcaagaccgacgucuccagcuccgugaucaccagccugggcgccaucguguccugcuacgggaagacgaagugcaccgccagcaacaagaacaagggcaucaucaagaccuucuccaacgggugcgacuacgucagcaacaagggcguggacaccguguccgucggcaacacgcuguacuacgugaacaagcaggaggggcagagccucuacgugaagggcgagccgaucaucaacuucuacgacccccuggucuuccccagcgacgaguucgacgcguccaucagccaggugaacgagaagaucaaccagucccuggccuucauccgcaagagcgacgagcuccugcacaacgugaacgucgggaaguccaccaccaacaucaugaucaccaccaucaucaucgugaucaucgugauccugcuccugcugaucgccgucggccucuuccuguacugcaaggcccggagcacgcccgugacccuguccaaggaccagcugagcgggaucaacaacaucgccuucuccaacugaggacuaguggaagcauuuuccuggcugauuaaaagaaauuacucagcuauggucaucuguuccuguuagaaggcuaugcagcauauuauauacuaugcgcauguuaugaaaugcauaauaaaaaauuuuaaaaaaucuaaaagaucuaaaaaaaaaaaaaaaaaaaaaaaaaaaaaaaaaaaaaaaaaaaaaaaaaaaaaaaaaaaaaaaaugcaucccccccccccccccccccccccccccccccaaaggcucuuuucagagccaccagaauu

SEQ ID NO: 17785 - RNA, 1960 nt, Artificial Sequence
  mRNA product Design d-4 comprising derived and/or modified sequence from HRSV(Memphis-37)__AIY60640.1__F_DSCav1_mut6 (opt2)
gggagagucccgcagucggcguccagcggcucugcuuguucgugugugugucguugcaggccuuauucaagcuuaccauggagcuccccauccucaagaccaacgccaucaccaccauccucgccgccgucacccucugcuucgccuccucccagaacaucaccgaggaguucuaccaguccaccugcuccgccgucuccaagggcuaccucggcgcccuccgcaccggcugguacaccuccgucaucaccaucgagcucuccaacaucaaggagaacaagugcaacggcaccgacgccaaggucaagcucaucaagcaggagcucgacaaguacaagaacgccgucaccgaccuccagaugcucaugugcuccacccccgccgccggcuccggcuccgccaucgccuccggcaucgccgucugcaagguccuccaccucgagggcgaggucaacaagaucaagaacgcccuccucuccaccaacaaggccgucgucucccucuccaacggcgucuccguccucaccuucaagguccucgaccucaagaacuacaucgacaagcagcuccuccccauccucaacaagcaguccugcuccauccccaaccccgagaccgucauggaguuccagcagaagaacaaccgccuccucgagaucacccgcgaguucuccgucaacgccggcgucaccacccccgucuccaccuacaugcucaccaacuccgagcuccucucccucaucaacgacaugcccaucaccaacgaccagaagaagcucauguccaacaacguccagaucguccgccagcaguccuacuccaucaugugcaucaucaaggaggagguccucgccuacgucguccagcucccccucuacggcgucaucgacacccccugcuggaagcuccacaccuccccccucugcaccaccaacaccaaggagggcuccaacaucugccucacccgcaccgaccgcggcugguacugcgacaacgccggcuccgucuccuucuucccccaggccgagaccugcaaggucugcuccaaccgcgucuucugcgacaccaugaacucccucacccuccccuccgaggucaaccucugcaacaucgacaucuucaaccccaaguacgacugcaagaucaugaccuccaagaccgacgucuccuccuccgucaucaccucccucggcgccaucgucuccugcuacggcaagaccaagugcaccgccuccaacaagaacaagggcaucaucaagaccuucuccaacggcugcgacuacgucuccaacaagggcgucgacaccgucuccgucggcaacacccucuacuacgucaacaagcaggagggccagucccucuacgucaagggcgagcccaucaucaacuucuacgacccccucgucuuccccuccgacgaguucgacgccuccaucucccaggucaacgagaagaucaaccagucccucgccuucauccgcaaguccgacgagcuccuccacaacgucaacgucggcaaguccaccaccaacaucaugaucaccaccaucaucaucgucaucaucgucauccuccuccuccucaucgccgucggccucuuccucuacugcaaggcccgcuccacccccgucacccucuccaaggaccagcucuccggcaucaacaacaucgccuucuccaacugaggacuaguggaagcauuuuccuggcugauuaaaagaaauuacucagcuauggucaucuguuccuguuagaaggcuaugcagcauauuauauacuaugcgcauguuaugaaaugcauaauaaaaaauuuuaaaaaaucuaaaagaucuaaaaaaaaaaaaaaaaaaaaaaaaaaaaaaaaaaaaaaaaaaaaaaaaaaaaaaaaaaaaaaaaugcaucccccccccccccccccccccccccccccccaaaggcucuuuucagagccaccagaauu

SEQ ID NO: 17786 - RNA, 1960 nt, Artificial Sequence
  mRNA product Design d-4 comprising derived and/or modified sequence from HRSV(Memphis-37)__AIY60640.1__F_DSCav1_mut6 (opt3)
gggagagucccgcagucggcguccagcggcucugcuuguucgugugugugucguugcaggccuuauucaagcuuaccauggagcugcccauccucaagaccaacgccauuacaacuauacuugcugcagugacgcugugcuucgccagcucccagaauaucaccgaagaguuuuaccaaucuacauguucagcggucaguaaaggcuauuugggggcuuuaagaacuggaugguacaccagcguuauuacaaucgaacuguccaacauuaaggagaauaaaugcaacgguaccgacgccaaggugaaacuaaucaagcaggaacucgauaaguauaaaaaugcaguaacugaccugcagaugcuuauguguucuacuccugccgcuggcucggggucagcaauagccagcggaaucgcugugugcaagguccugcacuuggagggcgaggugaacaaaauuaagaaugcccuccugaguaccaacaaagcgguugugucccugucuaauggugucagcgugcucacguucaagguauuagaucugaagaacuacaucgacaaacagcuuuugccaauucugaauaagcaauccuguucaaucccgaaccccgaaacuguuauggaguuucagcagaaaaauaacaggcuacucgaaauaacccgggaguucagugugaaugcaggggucacaacuccugugagcaccuauaugcugacaaacucugagcuucuguccuugauuaacgauaugccaaucaccaaugaccagaagaaacucaugucaaacaaugugcaaauuguccgccagcagagcuacaguaucaugugcaucauuaaggaagagguucuggccuaugugguacaguuaccccuguacggagugauagauacgccuuguuggaaacuccauacuucuccacuuugcacaaccaacacuaaggaaggcuccaauaucugucugacacgaaccgaccguggcugguacugcgauaacgcugggagcgucucguuuuucccccaagccgagacguguaaggugugcucuaauagaguuuucugcgacaccaugaacuccuugacacuaccuucagaagugaaucuguguaacauugauaucuucaauccaaaauaugacugcaagauaaugacaaguaaaaccgaugucagcuccucugugauuacaagccucggagcaaucguaucauguuacgguaagacuaaaugcaccgcuaguaacaagaauaagggcaucauuaaaacauuuuccaacgggugugacuauguuagcaauaagggaguggacaccgucucugugggcaacacucuguacuaugucaacaaacaggagggucagucacuuuacgugaagggggagccgaucauuaauuucuaugauccccugguuuuuccuagugacgaauuugaugccagcauaucccaagugaacgagaaaaucaaucagucuuuggcguuuauuaggaagucggacgaacuccugcacaacguaaaugucggaaagagcacgacaaacaucaugaucaccacuauuauaaucgugauuaucguuauuuuacugcuacucaucgccgugggccuguuccuuuacugcaaagcacgguccaccccagucacauugucaaaggaucagcugaguggcauaaauaacaucgcuuucucuaauugaggacuaguggaagcauuuuccuggcugauuaaaagaaauuacucagcuauggucaucuguuccuguuagaaggcuaugcagcauauuauauacuaugcgcauguuaugaaaugcauaauaaaaaauuuuaaaaaaucuaaaagaucuaaaaaaaaaaaaaaaaaaaaaaaaaaaaaaaaaaaaaaaaaaaaaaaaaaaaaaaaaaaaaaaaugcaucccccccccccccccccccccccccccccccaaaggcucuuuucagagccaccagaauu

SEQ ID NO: 17787 - RNA, 1960 nt, Artificial Sequence
  mRNA product Design d-4 comprising derived and/or modified sequence from HRSV(Memphis-37)__AIY60640.1__F_DSCav1_mut6 (opt4)
gggagagucccgcagucggcguccagcggcucugcuuguucgugugugugucguugcaggccuuauucaagcuuaccauggagcugcccauccugaagaccaacgccaucaccaccauccuggccgccgugacccugugcuucgccagcagccagaacaucaccgaggaguucuaccagagcaccugcagcgccgugagcaagggcuaccugggcgcccugagaaccggcugguacaccagcgugaucaccaucgagcugagcaacaucaaggagaacaagugcaacggcaccgacgccaaggugaagcugaucaagcaggagcuggacaaguacaagaacgccgugaccgaccugcagaugcugaugugcagcacccccgccgccggcagcggcagcgccaucgccagcggcaucgccgugugcaaggugcugcaccuggagggcgaggugaacaagaucaagaacgcccugcugagcaccaacaaggccguggugagccugagcaacggcgugagcgugcugaccuucaaggugcuggaccugaagaacuacaucgacaagcagcugcugcccauccugaacaagcagagcugcagcauccccaaccccgagaccgugauggaguuccagcagaagaacaacagacugcuggagaucaccagagaguucagcgugaacgccggcgugaccacccccgugagcaccuacaugcugaccaacagcgagcugcugagccugaucaacgacaugcccaucaccaacgaccagaagaagcugaugagcaacaacgugcagaucgugagacagcagagcuacagcaucaugugcaucaucaaggaggaggugcuggccuacguggugcagcugccccuguacggcgugaucgacacccccugcuggaagcugcacaccagcccccugugcaccaccaacaccaaggagggcagcaacaucugccugaccagaaccgacagaggcugguacugcgacaacgccggcagcgugagcuucuucccccaggccgagaccugcaaggugugcagcaacagaguguucugcgacaccaugaacagccugacccugcccagcgaggugaaccugugcaacaucgacaucuucaaccccaaguacgacugcaagaucaugaccagcaagaccgacgugagcagcagcgugaucaccagccugggcgccaucgugagcugcuacggcaagaccaagugcaccgccagcaacaagaacaagggcaucaucaagaccuucagcaacggcugcgacuacgugagcaacaagggcguggacaccgugagcgugggcaacacccuguacuacgugaacaagcaggagggccagagccuguacgugaagggcgagcccaucaucaacuucuacgacccccugguguuccccagcgacgaguucgacgccagcaucagccaggugaacgagaagaucaaccagagccuggccuucaucagaaagagcgacgagcugcugcacaacgugaacgugggcaagagcaccaccaacaucaugaucaccaccaucaucaucgugaucaucgugauccugcugcugcugaucgccgugggccuguuccuguacugcaaggccagaagcacccccgugacccugagcaaggaccagcugagcggcaucaacaacaucgccuucagcaacugaggacuaguggaagcauuuuccuggcugauuaaaagaaauuacucagcuauggucaucuguuccuguuagaaggcuaugcagcauauuauauacuaugcgcauguuaugaaaugcauaauaaaaaauuuuaaaaaaucuaaaagaucuaaaaaaaaaaaaaaaaaaaaaaaaaaaaaaaaaaaaaaaaaaaaaaaaaaaaaaaaaaaaaaaaugcaucccccccccccccccccccccccccccccccaaaggcucuuuucagagccaccagaauu

SEQ ID NO: 17788 - RNA, 1960 nt, Artificial Sequence
  mRNA product Design d-4 comprising derived and/or modified sequence from HRSV(Memphis-37)__AIY60640.1__F_DSCav1_mut6 (opt5)
gggagagucccgcagucggcguccagcggcucugcuuguucgugugugugucguugcaggccuuauucaagcuuaccauggagcugcccauccucaagaccaacgccauuacaacgauccuggcugccgugacccuuugcuucgcgagcucccagaauauuacagaagaguuuuaccaaucuaccuguagcgcugucuccaaaggcuaucugggggcccucagaacaggaugguacaccucuguuaucacaauugaacugagcaacaucaaggagaauaaaugcaacggcaccgacgccaaggugaaacuuaucaagcaggaacuggauaaguauaaaaaugcugugacggaccuccagaugcugauguguuccaccccugccgcugggucuggaagcgccauugcguccggcaucgccgucugcaaggugcugcaccucgagggggagguuaacaaaauuaagaaugcucugcuuagcacaaacaaagccguggucucucuguccaauggagugagcguucucaccuucaaggugcuggaucuuaagaacuacaucgacaaacagcugcucccgauucugaauaagcaaucuuguuccauccccaacccugaaacagucauggaguuucagcagaaaaauaaccggcugcucgaaauuacccgcgaguucagcgugaaugcuggcgugacgacacccgucucuaccuauaugcugacaaacuccgagcuucugagccucaucaacgauaugccuaucaccaaugaccagaagaaacugauguccaacaauguucaaauugugagacagcagucuuacagcaucaugugcauuaucaaggaagaggugcuugccuaugucgugcagcugccccucuacggcguuauugauaccccuuguuggaaacugcauacauccccgcugugcacgaccaacacaaaggaagggagcaauaucugucucacccggacagaccgcggaugguacugcgauaacgcgggcucuguguccuuuuucccccaagccgagaccuguaaggucugcagcaauagaguguuuugcgacacgaugaacucucugacacuuccuagcgaaguuaaucuguguaacaucgauauuuucaaucccaaauaugacugcaagaucaugaccuccaaaaccgaugugucuagcuccgucauuacaagccucggggcuaucgugucuuguuacggaaagaccaaaugcacagccuccaacaagaauaagggcauuaucaaaacguuuagcaacgggugugacuaugucucuaauaagggaguggacaccguuuccgugggcaacacacuguacuaugucaacaaacaggagggccagagccuuuacgugaagggggagccuaucauuaauuucuaugauccccugguuuuuccguccgacgaauuugaugcuucuaucagccaagugaacgagaaaauuaaucagucccucgccuucauccggaagucugacgaacugcugcacaacgucaaugugggaaagagcaccacaaacauuaugaucaccacgauuaucaucgugauuaucguuauucuccugcuucugaucgccgucggccucuuccuguacugcaaagcucgcuccaccccugugacacugagcaaggaucagcuuucugggauuaauaacaucgcguucuccaauugaggacuaguggaagcauuuuccuggcugauuaaaagaaauuacucagcuauggucaucuguuccuguuagaaggcuaugcagcauauuauauacuaugcgcauguuaugaaaugcauaauaaaaaauuuuaaaaaaucuaaaagaucuaaaaaaaaaaaaaaaaaaaaaaaaaaaaaaaaaaaaaaaaaaaaaaaaaaaaaaaaaaaaaaaaugcaucccccccccccccccccccccccccccccccaaaggcucuuuucagagccaccagaauu

SEQ ID NO: 17789 - RNA, 1960 nt, Artificial Sequence
  mRNA product Design d-4 comprising derived and/or modified sequence from HRSV(Memphis-37)__AIY60640.1__F_DSCav1_mut6 (opt6)
gggagagucccgcagucggcguccagcggcucugcuuguucgugugugugucguugcaggccuuauucaagcuuaccauggaacuaccaauuuuaaaaacaaacgcaauuacaacuauacucgcagcaguaacauuauguuucgccucaucccaaaacauaacagaagaauuuuaccaaucaacaugcagcgcaguaucaaaaggauaucucggagcauuacgaacagguugguacacaucuguaaucacuauagaacuaucaaacauaaaagaaaacaaaugcaauggaaccgacgcaaaaguaaaauuaauaaaacaagaacucgauaaauacaaaaaugcaguaacagaccuccaaaugcucauguguucaacaccagccgcaggaucagguuccgccauagcaucuggcauagcaguaugcaaaguacuccacuuagaaggagaaguuaacaaaauaaaaaacgcacuauuaucaacaaacaaagcaguaguaucccucucaaacggagucucaguauuaacauucaaaguauuagaccuaaaaaacuacauagacaaacaacuacuuccaauacucaacaaacaaucaugcucaauaccaaacccagaaaccguaauggaauuucaacaaaaaaacaaccgacuacuagaaaucacacgagaauuuucaguaaacgccggugucacaacuccaguaucaacuuauauguuaaccaacucagaacuauuaucauuaauaaacgauaugcccauaacuaacgaccaaaaaaaauuaaugucaaacaacguacaaauaguacgccaacaaaguuacucaauaaugugcaucauaaaagaagaaguauuagcguacguuguacaacuaccucuauacggagucauagacacaccaugcuggaaacuucacacaucaccacuauguacaacaaacacaaaagaaggcaguaacauaugccuaacaagaacagaccguggaugguauugugacaacgcuggaucuguaucauucuucccucaagcagaaaccuguaaaguuugcucaaacagagucuucugugacacaaugaacucucuaacacuaccuuccgaagugaaccucuguaacauagacauauucaauccaaaauaugauugcaaaauaaugacuucaaaaacagauguaucauccucuguuauaacaucauuaggcgccauaguuucaugcuacggaaaaacuaaaugcacagcaucaaacaaaaacaaaggaauaauaaaaaccuucucaaauggaugcgacuacguaagcaacaaaggcguagacacaguaucaguagguaauacauuauacuacguaaacaaacaagaaggacaaucacuuuauguuaaaggagaaccuauaauaaacuucuacgacccacuuguauuuccauccgaugaauuugacgcaucuauaucacaagucaacgaaaaaauaaaccaaucauuagcauucauucgaaaauccgaugaacuacuccauaacguaaaugucggaaaaucaacaaccaacauaaugaucacaacaauaaucauagugauaauaguaauacuccuacuacuaaucgcaguaggucuauuccuauauuguaaagcaagaucuacuccaguuacacucucuaaagaccaauuaagcgguaucaacaacaucgccuucagcaauuaaggacuaguggaagcauuuuccuggcugauuaaaagaaauuacucagcuauggucaucuguuccuguuagaaggcuaugcagcauauuauauacuaugcgcauguuaugaaaugcauaauaaaaaauuuuaaaaaaucuaaaagaucuaaaaaaaaaaaaaaaaaaaaaaaaaaaaaaaaaaaaaaaaaaaaaaaaaaaaaaaaaaaaaaaaugcaucccccccccccccccccccccccccccccccaaaggcucuuuucagagccaccagaauu

SEQ ID NO: 17790 - RNA, 1960 nt, Artificial Sequence
  mRNA product Design d-4 comprising derived and/or modified sequence from HRSV(Memphis-37)__AIY60640.1__F_DSCav1_mut6 (opt11)
gggagagucccgcagucggcguccagcggcucugcuuguucgugugugugucguugcaggccuuauucaagcuuaccauggagcugcccauccucaagaccaacgccaucaccacgauccuggccgcggugacccugugcuucgcgagcucccaaaacaucaccgaggaguucuaccagagcacgugcuccgccgucagcaagggcuaccucggggcccugcgcaccggcugguacaccuccgugaucaccaucgagcugagcaacaucaaggaaaacaagugcaacgggacggacgcaaaggugaagcucaucaagcaggagcuggauaaguacaagaacgcggucacggaccugcagaugcucaugugcuccaccccggccgccggcagcggguccgccaucgcguccggcaucgccgugugcaagguguugcaccuggagggcgaggucaacaagaucaagaacgcccuccuuuccaccaauaaggcuguugugagccuguccaacggggucagcgugcucaccuucaaggugcuggaccugaagaacuacaucgacaagcagcuccugcccauccugaacaagcaguccugcagcauccccaaccccgagacagucauggaguuccagcagaagaacaaccggcuccuggagaucacccgcgaguucuccguuaacgccggggugaccaccccgguaagcacauacaugcugaccaacagcgagcuccugagccugaucaacgacaugcccaucaccaacgaccagaagaagcucaugagcaacaacgugcagaucgugcggcagcaguccuacagcaucaugugcaucaucaaggaggagguccuggcguacguggugcaacugccccucuacggggucaucgacacccccugcuggaagcugcacacguccccgcugugcaccaccaacaccaaggagggcagcaacaucugccucacgcgcaccgaccgggggugguacugcgacaacgcaggcuccgugagcuucuucccccaggccgagaccugcaaggugugcuccaaccgcgucuucugcgacaccaugaacagccugacgcugcccuccgaggugaaccucugcaacaucgacaucuucaaccccaaguacgacuguaagaucaugaccagcaagaccgaugucuccagcuccgugaucaccagccugggcgccauaguguccuguuaugggaagacgaagugcaccgccagcaacaagaacaaaggcaucaucaagaccuucuccaacgggugcgacuacgucagcaacaagggcguggacacaguguccgucggcaacacgcuguacuacgugaacaagcaggaggggcagagccucuacgugaagggcgagccgaucaucaacuucuacgauccccuggucuuccccagcgacgaguucgacgcguccaucagccaagugaacgagaagaucaaccagucccuggccuucauccgcaagagcgacgagcuccugcacaacgugaacgucgggaaguccaccaccaacaucaugaucaccaccaucaucaucgugaucaucgucauccugcuccugcugaucgccgucggccucuuccuguacugcaaggcccggagcacgcccgugacccuguccaaggaccagcugucgggcaucaacaacaucgccuucuccaacugaggacuaguggaagcauuuuccuggcugauuaaaagaaauuacucagcuauggucaucuguuccuguuagaaggcuaugcagcauauuauauacuaugcgcauguuaugaaaugcauaauaaaaaauuuuaaaaaaucuaaaagaucuaaaaaaaaaaaaaaaaaaaaaaaaaaaaaaaaaaaaaaaaaaaaaaaaaaaaaaaaaaaaaaaaugcaucccccccccccccccccccccccccccccccaaaggcucuuuucagagccaccagaauu

SEQ ID NO: 17791 - RNA, 2057 nt, Artificial Sequence
  mRNA product Design d-5 comprising derived and/or modified sequence from HRSV(Memphis-37)__AIY60640.1__F_DSCav1_mut6 (opt1)
gggagagggcgcuuggcuugcaaggacccugagcugcggcauugaagcacacccaacccaacucgacugaagucagccucacugaaccggaucugagaaucuucucucucugggcuugccagggcucuccgaaccuagcuagcauccucuucaauuccaacuagaaagcuuaccauggagcugcccauccucaagaccaacgccaucaccacgauccuggccgcggugacccugugcuucgccagcucccagaacaucaccgaggaguucuaccagagcacgugcuccgccgucagcaagggcuaccucggcgcccugcgcaccgggugguacaccagcgugaucaccaucgagcuguccaacaucaaggagaacaagugcaacggcaccgacgccaaggugaagcucaucaagcaggagcuggacaaguacaagaacgcggucacggaccugcagaugcugaugugcagcaccccggccgccggcuccgggagcgcgaucgccuccggcaucgccgucugcaaggugcugcaccucgagggcgaggugaacaagaucaagaacgcccugcuguccaccaacaaggccgucgugagccucuccaacggggugagcguccugaccuucaaggugcuggaccucaagaacuacaucgacaagcagcugcugcccauccugaacaagcagagcugcuccauccccaaccccgagaccgucauggaguuccagcagaagaacaaccgccuccuggagaucacgcgggaguucagcgugaacgcgggcgugaccacccccgucuccaccuacaugcugacgaacagcgagcuccugucccugaucaacgacaugccgaucaccaacgaccagaagaagcucaugagcaacaacgugcagaucgugcgccagcaguccuacagcaucaugugcaucaucaaggaggagguccuggccuacguggugcagcugccccucuacggggucaucgacacccccugcuggaagcugcacaccagcccccugugcacgaccaacaccaaggagggcuccaacaucugccucacccggacggaccgcgggugguacugcgacaacgccggcagcguguccuucuucccgcaggccgagaccugcaaggucugcagcaaccggguguucugcgacaccaugaacucccugacccugcccagcgaggugaaccucugcaacaucgacaucuucaaccccaaguacgacugcaagaucaugacguccaagaccgacgucagcuccagcgugaucaccucccugggcgccaucgugagcugcuacgggaagaccaagugcacggcgagcaacaagaacaagggcaucaucaagaccuucuccaacgggugcgacuacgucagcaacaagggcguggacaccguguccgucggcaacacccuguacuacgugaacaagcaggagggccagagccucuacgugaagggggagcccaucaucaacuucuacgacccgcuggucuuccccuccgacgaguucgacgccagcaucucccaggugaacgagaagaucaaccagagccuggccuucauccggaaguccgacgagcuccugcacaacgugaacgucggcaagagcaccacgaacaucaugaucaccaccaucaucaucgugaucaucgugauccugcugcuccugaucgccgucgggcuguuccucuacugcaaggcccgcuccacccccgugacgcugagcaaggaccagcuguccgggaucaacaacaucgcguucagcaacugaggacuaguggaagcauuuuccuggcugauuaaaagaaauuacucagcuauggucaucuguuccuguuagaaggcuaugcagcauauuauauacuaugcgcauguuaugaaaugcauaauaaaaaauuuuaaaaaaucuaaaagaucuaaaaaaaaaaaaaaaaaaaaaaaaaaaaaaaaaaaaaaaaaaaaaaaaaaaaaaaaaaaaaaaaugcaucccccccccccccccccccccccccccccccaaaggcucuuuucagagccaccagaauu

SEQ ID NO: 17792 - RNA, 2057 nt, Artificial Sequence
  mRNA product Design d-5 comprising derived and/or modified sequence from HRSV(Memphis-37)__AIY60640.1__F_DSCav1_mut6 (opt1)
gggagagggcgcuuggcuugcaaggacccugagcugcggcauugaagcacacccaacccaacucgacugaagucagccucacugaaccggaucugagaaucuucucucucugggcuugccagggcucuccgaaccuagcuagcauccucuucaauuccaacuagaaagcuuaccauggagcugcccauccucaagaccaacgccaucaccacgauccuggccgcggugacccugugcuucgccagcucccagaacaucaccgaggaguucuaccagagcacgugcuccgccgucagcaagggcuaccucggggcccugcgcaccggcugguacaccuccgugaucaccaucgagcugagcaacaucaaggagaacaagugcaacgggaccgacgccaaggugaagcucaucaagcaggagcuggacaaguacaagaacgcggucacggaccugcagaugcucaugugcuccaccccggccgccggcagcggguccgccaucgcgagcggcaucgccgugugcaaggugcugcaccuggagggcgaggucaacaagaucaagaacgcccuccuguccaccaacaaggccguggugagccuguccaacggggucagcgugcucaccuucaaggugcuggaccugaagaacuacaucgacaagcagcuccugcccauccugaacaagcaguccugcagcauccccaaccccgagacggucauggaguuccagcagaagaacaaccggcuccuggagaucacccgcgaguucuccgugaacgccggcgugaccaccccggucagcacguacaugcugaccaacuccgagcuccugagccugaucaacgacaugcccaucaccaacgaccagaagaagcucaugagcaacaacgugcagaucgugcggcagcaguccuacagcaucaugugcaucaucaaggaggagguccuggcguacguggugcagcugccccucuacggggucaucgacacccccugcuggaagcugcacacguccccgcugugcaccaccaacaccaaggagggcagcaacaucugccucacgcgcaccgaccgggggugguacugcgacaacgccggcuccgugagcuucuucccccaggccgagaccugcaaggugugcuccaaccgcgucuucugcgacaccaugaacagccugacgcugcccuccgaggugaaccucugcaacaucgacaucuucaaccccaaguacgacugcaagaucaugaccagcaagaccgacgucuccagcuccgugaucaccagccugggcgccaucguguccugcuacgggaagacgaagugcaccgccagcaacaagaacaagggcaucaucaagaccuucuccaacgggugcgacuacgucagcaacaagggcguggacaccguguccgucggcaacacgcuguacuacgugaacaagcaggaggggcagagccucuacgugaagggcgagccgaucaucaacuucuacgacccccuggucuuccccagcgacgaguucgacgcguccaucagccaggugaacgagaagaucaaccagucccuggccuucauccgcaagagcgacgagcuccugcacaacgugaacgucgggaaguccaccaccaacaucaugaucaccaccaucaucaucgugaucaucgugauccugcuccugcugaucgccgucggccucuuccuguacugcaaggcccggagcacgcccgugacccuguccaaggaccagcugagcgggaucaacaacaucgccuucuccaacugaggacuaguggaagcauuuuccuggcugauuaaaagaaauuacucagcuauggucaucuguuccuguuagaaggcuaugcagcauauuauauacuaugcgcauguuaugaaaugcauaauaaaaaauuuuaaaaaaucuaaaagaucuaaaaaaaaaaaaaaaaaaaaaaaaaaaaaaaaaaaaaaaaaaaaaaaaaaaaaaaaaaaaaaaaugcaucccccccccccccccccccccccccccccccaaaggcucuuuucagagccaccagaauu

SEQ ID NO: 17793 - RNA, 2057 nt, Artificial Sequence
  mRNA product Design d-5 comprising derived and/or modified sequence from HRSV(Memphis-37)__AIY60640.1__F_DSCav1_mut6 (opt2)
gggagagggcgcuuggcuugcaaggacccugagcugcggcauugaagcacacccaacccaacucgacugaagucagccucacugaaccggaucugagaaucuucucucucugggcuugccagggcucuccgaaccuagcuagcauccucuucaauuccaacuagaaagcuuaccauggagcuccccauccucaagaccaacgccaucaccaccauccucgccgccgucacccucugcuucgccuccucccagaacaucaccgaggaguucuaccaguccaccugcuccgccgucuccaagggcuaccucggcgcccuccgcaccggcugguacaccuccgucaucaccaucgagcucuccaacaucaaggagaacaagugcaacggcaccgacgccaaggucaagcucaucaagcaggagcucgacaaguacaagaacgccgucaccgaccuccagaugcucaugugcuccacccccgccgccggcuccggcuccgccaucgccuccggcaucgccgucugcaagguccuccaccucgagggcgaggucaacaagaucaagaacgcccuccucuccaccaacaaggccgucgucucccucuccaacggcgucuccguccucaccuucaagguccucgaccucaagaacuacaucgacaagcagcuccuccccauccucaacaagcaguccugcuccauccccaaccccgagaccgucauggaguuccagcagaagaacaaccgccuccucgagaucacccgcgaguucuccgucaacgccggcgucaccacccccgucuccaccuacaugcucaccaacuccgagcuccucucccucaucaacgacaugcccaucaccaacgaccagaagaagcucauguccaacaacguccagaucguccgccagcaguccuacuccaucaugugcaucaucaaggaggagguccucgccuacgucguccagcucccccucuacggcgucaucgacacccccugcuggaagcuccacaccuccccccucugcaccaccaacaccaaggagggcuccaacaucugccucacccgcaccgaccgcggcugguacugcgacaacgccggcuccgucuccuucuucccccaggccgagaccugcaaggucugcuccaaccgcgucuucugcgacaccaugaacucccucacccuccccuccgaggucaaccucugcaacaucgacaucuucaaccccaaguacgacugcaagaucaugaccuccaagaccgacgucuccuccuccgucaucaccucccucggcgccaucgucuccugcuacggcaagaccaagugcaccgccuccaacaagaacaagggcaucaucaagaccuucuccaacggcugcgacuacgucuccaacaagggcgucgacaccgucuccgucggcaacacccucuacuacgucaacaagcaggagggccagucccucuacgucaagggcgagcccaucaucaacuucuacgacccccucgucuuccccuccgacgaguucgacgccuccaucucccaggucaacgagaagaucaaccagucccucgccuucauccgcaaguccgacgagcuccuccacaacgucaacgucggcaaguccaccaccaacaucaugaucaccaccaucaucaucgucaucaucgucauccuccuccuccucaucgccgucggccucuuccucuacugcaaggcccgcuccacccccgucacccucuccaaggaccagcucuccggcaucaacaacaucgccuucuccaacugaggacuaguggaagcauuuuccuggcugauuaaaagaaauuacucagcuauggucaucuguuccuguuagaaggcuaugcagcauauuauauacuaugcgcauguuaugaaaugcauaauaaaaaauuuuaaaaaaucuaaaagaucuaaaaaaaaaaaaaaaaaaaaaaaaaaaaaaaaaaaaaaaaaaaaaaaaaaaaaaaaaaaaaaaaugcaucccccccccccccccccccccccccccccccaaaggcucuuuucagagccaccagaauu

SEQ ID NO: 17794 - RNA, 2057 nt, Artificial Sequence
  mRNA product Design d-5 comprising derived and/or modified sequence from HRSV(Memphis-37)__AIY60640.1__F_DSCav1_mut6 (opt3)
gggagagggcgcuuggcuugcaaggacccugagcugcggcauugaagcacacccaacccaacucgacugaagucagccucacugaaccggaucugagaaucuucucucucugggcuugccagggcucuccgaaccuagcuagcauccucuucaauuccaacuagaaagcuuaccauggagcugcccauccucaagaccaacgccauuacaacuauacuugcugcagugacgcugugcuucgccagcucccagaauaucaccgaagaguuuuaccaaucuacauguucagcggucaguaaaggcuauuugggggcuuuaagaacuggaugguacaccagcguuauuacaaucgaacuguccaacauuaaggagaauaaaugcaacgguaccgacgccaaggugaaacuaaucaagcaggaacucgauaaguauaaaaaugcaguaacugaccugcagaugcuuauguguucuacuccugccgcuggcucggggucagcaauagccagcggaaucgcugugugcaagguccugcacuuggagggcgaggugaacaaaauuaagaaugcccuccugaguaccaacaaagcgguugugucccugucuaauggugucagcgugcucacguucaagguauuagaucugaagaacuacaucgacaaacagcuuuugccaauucugaauaagcaauccuguucaaucccgaaccccgaaacuguuauggaguuucagcagaaaaauaacaggcuacucgaaauaacccgggaguucagugugaaugcaggggucacaacuccugugagcaccuauaugcugacaaacucugagcuucuguccuugauuaacgauaugccaaucaccaaugaccagaagaaacucaugucaaacaaugugcaaauuguccgccagcagagcuacaguaucaugugcaucauuaaggaagagguucuggccuaugugguacaguuaccccuguacggagugauagauacgccuuguuggaaacuccauacuucuccacuuugcacaaccaacacuaaggaaggcuccaauaucugucugacacgaaccgaccguggcugguacugcgauaacgcugggagcgucucguuuuucccccaagccgagacguguaaggugugcucuaauagaguuuucugcgacaccaugaacuccuugacacuaccuucagaagugaaucuguguaacauugauaucuucaauccaaaauaugacugcaagauaaugacaaguaaaaccgaugucagcuccucugugauuacaagccucggagcaaucguaucauguuacgguaagacuaaaugcaccgcuaguaacaagaauaagggcaucauuaaaacauuuuccaacgggugugacuauguuagcaauaagggaguggacaccgucucugugggcaacacucuguacuaugucaacaaacaggagggucagucacuuuacgugaagggggagccgaucauuaauuucuaugauccccugguuuuuccuagugacgaauuugaugccagcauaucccaagugaacgagaaaaucaaucagucuuuggcguuuauuaggaagucggacgaacuccugcacaacguaaaugucggaaagagcacgacaaacaucaugaucaccacuauuauaaucgugauuaucguuauuuuacugcuacucaucgccgugggccuguuccuuuacugcaaagcacgguccaccccagucacauugucaaaggaucagcugaguggcauaaauaacaucgcuuucucuaauugaggacuaguggaagcauuuuccuggcugauuaaaagaaauuacucagcuauggucaucuguuccuguuagaaggcuaugcagcauauuauauacuaugcgcauguuaugaaaugcauaauaaaaaauuuuaaaaaaucuaaaagaucuaaaaaaaaaaaaaaaaaaaaaaaaaaaaaaaaaaaaaaaaaaaaaaaaaaaaaaaaaaaaaaaaugcaucccccccccccccccccccccccccccccccaaaggcucuuuucagagccaccagaauu

SEQ ID NO: 17795 - RNA, 2057 nt, Artificial Sequence
  mRNA product Design d-5 comprising derived and/or modified sequence from HRSV(Memphis-37)__AIY60640.1__F_DSCav1_mut6 (opt4)
gggagagggcgcuuggcuugcaaggacccugagcugcggcauugaagcacacccaacccaacucgacugaagucagccucacugaaccggaucugagaaucuucucucucugggcuugccagggcucuccgaaccuagcuagcauccucuucaauuccaacuagaaagcuuaccauggagcugcccauccugaagaccaacgccaucaccaccauccuggccgccgugacccugugcuucgccagcagccagaacaucaccgaggaguucuaccagagcaccugcagcgccgugagcaagggcuaccugggcgcccugagaaccggcugguacaccagcgugaucaccaucgagcugagcaacaucaaggagaacaagugcaacggcaccgacgccaaggugaagcugaucaagcaggagcuggacaaguacaagaacgccgugaccgaccugcagaugcugaugugcagcacccccgccgccggcagcggcagcgccaucgccagcggcaucgccgugugcaaggugcugcaccuggagggcgaggugaacaagaucaagaacgcccugcugagcaccaacaaggccguggugagccugagcaacggcgugagcgugcugaccuucaaggugcuggaccugaagaacuacaucgacaagcagcugcugcccauccugaacaagcagagcugcagcauccccaaccccgagaccgugauggaguuccagcagaagaacaacagacugcuggagaucaccagagaguucagcgugaacgccggcgugaccacccccgugagcaccuacaugcugaccaacagcgagcugcugagccugaucaacgacaugcccaucaccaacgaccagaagaagcugaugagcaacaacgugcagaucgugagacagcagagcuacagcaucaugugcaucaucaaggaggaggugcuggccuacguggugcagcugccccuguacggcgugaucgacacccccugcuggaagcugcacaccagcccccugugcaccaccaacaccaaggagggcagcaacaucugccugaccagaaccgacagaggcugguacugcgacaacgccggcagcgugagcuucuucccccaggccgagaccugcaaggugugcagcaacagaguguucugcgacaccaugaacagccugacccugcccagcgaggugaaccugugcaacaucgacaucuucaaccccaaguacgacugcaagaucaugaccagcaagaccgacgugagcagcagcgugaucaccagccugggcgccaucgugagcugcuacggcaagaccaagugcaccgccagcaacaagaacaagggcaucaucaagaccuucagcaacggcugcgacuacgugagcaacaagggcguggacaccgugagcgugggcaacacccuguacuacgugaacaagcaggagggccagagccuguacgugaagggcgagcccaucaucaacuucuacgacccccugguguuccccagcgacgaguucgacgccagcaucagccaggugaacgagaagaucaaccagagccuggccuucaucagaaagagcgacgagcugcugcacaacgugaacgugggcaagagcaccaccaacaucaugaucaccaccaucaucaucgugaucaucgugauccugcugcugcugaucgccgugggccuguuccuguacugcaaggccagaagcacccccgugacccugagcaaggaccagcugagcggcaucaacaacaucgccuucagcaacugaggacuaguggaagcauuuuccuggcugauuaaaagaaauuacucagcuauggucaucuguuccuguuagaaggcuaugcagcauauuauauacuaugcgcauguuaugaaaugcauaauaaaaaauuuuaaaaaaucuaaaagaucuaaaaaaaaaaaaaaaaaaaaaaaaaaaaaaaaaaaaaaaaaaaaaaaaaaaaaaaaaaaaaaaaugcaucccccccccccccccccccccccccccccccaaaggcucuuuucagagccaccagaauu

SEQ ID NO: 17796 - RNA, 2057 nt, Artificial Sequence
  mRNA product Design d-5 comprising derived and/or modified sequence from HRSV(Memphis-37)__AIY60640.1__F_DSCav1_mut6 (opt5)
gggagagggcgcuuggcuugcaaggacccugagcugcggcauugaagcacacccaacccaacucgacugaagucagccucacugaaccggaucugagaaucuucucucucugggcuugccagggcucuccgaaccuagcuagcauccucuucaauuccaacuagaaagcuuaccauggagcugcccauccucaagaccaacgccauuacaacgauccuggcugccgugacccuuugcuucgcgagcucccagaauauuacagaagaguuuuaccaaucuaccuguagcgcugucuccaaaggcuaucugggggcccucagaacaggaugguacaccucuguuaucacaauugaacugagcaacaucaaggagaauaaaugcaacggcaccgacgccaaggugaaacuuaucaagcaggaacuggauaaguauaaaaaugcugugacggaccuccagaugcugauguguuccaccccugccgcugggucuggaagcgccauugcguccggcaucgccgucugcaaggugcugcaccucgagggggagguuaacaaaauuaagaaugcucugcuuagcacaaacaaagccguggucucucuguccaauggagugagcguucucaccuucaaggugcuggaucuuaagaacuacaucgacaaacagcugcucccgauucugaauaagcaaucuuguuccauccccaacccugaaacagucauggaguuucagcagaaaaauaaccggcugcucgaaauuacccgcgaguucagcgugaaugcuggcgugacgacacccgucucuaccuauaugcugacaaacuccgagcuucugagccucaucaacgauaugccuaucaccaaugaccagaagaaacugauguccaacaauguucaaauugugagacagcagucuuacagcaucaugugcauuaucaaggaagaggugcuugccuaugucgugcagcugccccucuacggcguuauugauaccccuuguuggaaacugcauacauccccgcugugcacgaccaacacaaaggaagggagcaauaucugucucacccggacagaccgcggaugguacugcgauaacgcgggcucuguguccuuuuucccccaagccgagaccuguaaggucugcagcaauagaguguuuugcgacacgaugaacucucugacacuuccuagcgaaguuaaucuguguaacaucgauauuuucaaucccaaauaugacugcaagaucaugaccuccaaaaccgaugugucuagcuccgucauuacaagccucggggcuaucgugucuuguuacggaaagaccaaaugcacagccuccaacaagaauaagggcauuaucaaaacguuuagcaacgggugugacuaugucucuaauaagggaguggacaccguuuccgugggcaacacacuguacuaugucaacaaacaggagggccagagccuuuacgugaagggggagccuaucauuaauuucuaugauccccugguuuuuccguccgacgaauuugaugcuucuaucagccaagugaacgagaaaauuaaucagucccucgccuucauccggaagucugacgaacugcugcacaacgucaaugugggaaagagcaccacaaacauuaugaucaccacgauuaucaucgugauuaucguuauucuccugcuucugaucgccgucggccucuuccuguacugcaaagcucgcuccaccccugugacacugagcaaggaucagcuuucugggauuaauaacaucgcguucuccaauugaggacuaguggaagcauuuuccuggcugauuaaaagaaauuacucagcuauggucaucuguuccuguuagaaggcuaugcagcauauuauauacuaugcgcauguuaugaaaugcauaauaaaaaauuuuaaaaaaucuaaaagaucuaaaaaaaaaaaaaaaaaaaaaaaaaaaaaaaaaaaaaaaaaaaaaaaaaaaaaaaaaaaaaaaaugcaucccccccccccccccccccccccccccccccaaaggcucuuuucagagccaccagaauu

SEQ ID NO: 17797 - RNA, 2057 nt, Artificial Sequence
  mRNA product Design d-5 comprising derived and/or modified sequence from HRSV(Memphis-37)__AIY60640.1__F_DSCav1_mut6 (opt6)
gggagagggcgcuuggcuugcaaggacccugagcugcggcauugaagcacacccaacccaacucgacugaagucagccucacugaaccggaucugagaaucuucucucucugggcuugccagggcucuccgaaccuagcuagcauccucuucaauuccaacuagaaagcuuaccauggaacuaccaauuuuaaaaacaaacgcaauuacaacuauacucgcagcaguaacauuauguuucgccucaucccaaaacauaacagaagaauuuuaccaaucaacaugcagcgcaguaucaaaaggauaucucggagcauuacgaacagguugguacacaucuguaaucacuauagaacuaucaaacauaaaagaaaacaaaugcaauggaaccgacgcaaaaguaaaauuaauaaaacaagaacucgauaaauacaaaaaugcaguaacagaccuccaaaugcucauguguucaacaccagccgcaggaucagguuccgccauagcaucuggcauagcaguaugcaaaguacuccacuuagaaggagaaguuaacaaaauaaaaaacgcacuauuaucaacaaacaaagcaguaguaucccucucaaacggagucucaguauuaacauucaaaguauuagaccuaaaaaacuacauagacaaacaacuacuuccaauacucaacaaacaaucaugcucaauaccaaacccagaaaccguaauggaauuucaacaaaaaaacaaccgacuacuagaaaucacacgagaauuuucaguaaacgccggugucacaacuccaguaucaacuuauauguuaaccaacucagaacuauuaucauuaauaaacgauaugcccauaacuaacgaccaaaaaaaauuaaugucaaacaacguacaaauaguacgccaacaaaguuacucaauaaugugcaucauaaaagaagaaguauuagcguacguuguacaacuaccucuauacggagucauagacacaccaugcuggaaacuucacacaucaccacuauguacaacaaacacaaaagaaggcaguaacauaugccuaacaagaacagaccguggaugguauugugacaacgcuggaucuguaucauucuucccucaagcagaaaccuguaaaguuugcucaaacagagucuucugugacacaaugaacucucuaacacuaccuuccgaagugaaccucuguaacauagacauauucaauccaaaauaugauugcaaaauaaugacuucaaaaacagauguaucauccucuguuauaacaucauuaggcgccauaguuucaugcuacggaaaaacuaaaugcacagcaucaaacaaaaacaaaggaauaauaaaaaccuucucaaauggaugcgacuacguaagcaacaaaggcguagacacaguaucaguagguaauacauuauacuacguaaacaaacaagaaggacaaucacuuuauguuaaaggagaaccuauaauaaacuucuacgacccacuuguauuuccauccgaugaauuugacgcaucuauaucacaagucaacgaaaaaauaaaccaaucauuagcauucauucgaaaauccgaugaacuacuccauaacguaaaugucggaaaaucaacaaccaacauaaugaucacaacaauaaucauagugauaauaguaauacuccuacuacuaaucgcaguaggucuauuccuauauuguaaagcaagaucuacuccaguuacacucucuaaagaccaauuaagcgguaucaacaacaucgccuucagcaauuaaggacuaguggaagcauuuuccuggcugauuaaaagaaauuacucagcuauggucaucuguuccuguuagaaggcuaugcagcauauuauauacuaugcgcauguuaugaaaugcauaauaaaaaauuuuaaaaaaucuaaaagaucuaaaaaaaaaaaaaaaaaaaaaaaaaaaaaaaaaaaaaaaaaaaaaaaaaaaaaaaaaaaaaaaaugcaucccccccccccccccccccccccccccccccaaaggcucuuuucagagccaccagaauu

SEQ ID NO: 17798 - RNA, 2057 nt, Artificial Sequence
  mRNA product Design d-5 comprising derived and/or modified sequence from HRSV(Memphis-37)__AIY60640.1__F_DSCav1_mut6 (opt11)
gggagagggcgcuuggcuugcaaggacccugagcugcggcauugaagcacacccaacccaacucgacugaagucagccucacugaaccggaucugagaaucuucucucucugggcuugccagggcucuccgaaccuagcuagcauccucuucaauuccaacuagaaagcuuaccauggagcugcccauccucaagaccaacgccaucaccacgauccuggccgcggugacccugugcuucgcgagcucccaaaacaucaccgaggaguucuaccagagcacgugcuccgccgucagcaagggcuaccucggggcccugcgcaccggcugguacaccuccgugaucaccaucgagcugagcaacaucaaggaaaacaagugcaacgggacggacgcaaaggugaagcucaucaagcaggagcuggauaaguacaagaacgcggucacggaccugcagaugcucaugugcuccaccccggccgccggcagcggguccgccaucgcguccggcaucgccgugugcaagguguugcaccuggagggcgaggucaacaagaucaagaacgcccuccuuuccaccaauaaggcuguugugagccuguccaacggggucagcgugcucaccuucaaggugcuggaccugaagaacuacaucgacaagcagcuccugcccauccugaacaagcaguccugcagcauccccaaccccgagacagucauggaguuccagcagaagaacaaccggcuccuggagaucacccgcgaguucuccguuaacgccggggugaccaccccgguaagcacauacaugcugaccaacagcgagcuccugagccugaucaacgacaugcccaucaccaacgaccagaagaagcucaugagcaacaacgugcagaucgugcggcagcaguccuacagcaucaugugcaucaucaaggaggagguccuggcguacguggugcaacugccccucuacggggucaucgacacccccugcuggaagcugcacacguccccgcugugcaccaccaacaccaaggagggcagcaacaucugccucacgcgcaccgaccgggggugguacugcgacaacgcaggcuccgugagcuucuucccccaggccgagaccugcaaggugugcuccaaccgcgucuucugcgacaccaugaacagccugacgcugcccuccgaggugaaccucugcaacaucgacaucuucaaccccaaguacgacuguaagaucaugaccagcaagaccgaugucuccagcuccgugaucaccagccugggcgccauaguguccuguuaugggaagacgaagugcaccgccagcaacaagaacaaaggcaucaucaagaccuucuccaacgggugcgacuacgucagcaacaagggcguggacacaguguccgucggcaacacgcuguacuacgugaacaagcaggaggggcagagccucuacgugaagggcgagccgaucaucaacuucuacgauccccuggucuuccccagcgacgaguucgacgcguccaucagccaagugaacgagaagaucaaccagucccuggccuucauccgcaagagcgacgagcuccugcacaacgugaacgucgggaaguccaccaccaacaucaugaucaccaccaucaucaucgugaucaucgucauccugcuccugcugaucgccgucggccucuuccuguacugcaaggcccggagcacgcccgugacccuguccaaggaccagcugucgggcaucaacaacaucgccuucuccaacugaggacuaguggaagcauuuuccuggcugauuaaaagaaauuacucagcuauggucaucuguuccuguuagaaggcuaugcagcauauuauauacuaugcgcauguuaugaaaugcauaauaaaaaauuuuaaaaaaucuaaaagaucuaaaaaaaaaaaaaaaaaaaaaaaaaaaaaaaaaaaaaaaaaaaaaaaaaaaaaaaaaaaaaaaaugcaucccccccccccccccccccccccccccccccaaaggcucuuuucagagccaccagaauu

SEQ ID NO: 17799 - RNA, 1937 nt, Artificial Sequence
  mRNA product Design e-1 comprising derived and/or modified sequence from HRSV(Memphis-37)__AIY60640.1__F_DSCav1_mut6 (opt1)
gggagaauauaagcguuggcggagcgucgguuguagcacucugcgcgcccgcucuucugcugcuguuugucuacuuccuccugcuuccccgccgccgccgccgccaucaagcuuaccauggagcugcccauccucaagaccaacgccaucaccacgauccuggccgcggugacccugugcuucgccagcucccagaacaucaccgaggaguucuaccagagcacgugcuccgccgucagcaagggcuaccucggcgcccugcgcaccgggugguacaccagcgugaucaccaucgagcuguccaacaucaaggagaacaagugcaacggcaccgacgccaaggugaagcucaucaagcaggagcuggacaaguacaagaacgcggucacggaccugcagaugcugaugugcagcaccccggccgccggcuccgggagcgcgaucgccuccggcaucgccgucugcaaggugcugcaccucgagggcgaggugaacaagaucaagaacgcccugcuguccaccaacaaggccgucgugagccucuccaacggggugagcguccugaccuucaaggugcuggaccucaagaacuacaucgacaagcagcugcugcccauccugaacaagcagagcugcuccauccccaaccccgagaccgucauggaguuccagcagaagaacaaccgccuccuggagaucacgcgggaguucagcgugaacgcgggcgugaccacccccgucuccaccuacaugcugacgaacagcgagcuccugucccugaucaacgacaugccgaucaccaacgaccagaagaagcucaugagcaacaacgugcagaucgugcgccagcaguccuacagcaucaugugcaucaucaaggaggagguccuggccuacguggugcagcugccccucuacggggucaucgacacccccugcuggaagcugcacaccagcccccugugcacgaccaacaccaaggagggcuccaacaucugccucacccggacggaccgcgggugguacugcgacaacgccggcagcguguccuucuucccgcaggccgagaccugcaaggucugcagcaaccggguguucugcgacaccaugaacucccugacccugcccagcgaggugaaccucugcaacaucgacaucuucaaccccaaguacgacugcaagaucaugacguccaagaccgacgucagcuccagcgugaucaccucccugggcgccaucgugagcugcuacgggaagaccaagugcacggcgagcaacaagaacaagggcaucaucaagaccuucuccaacgggugcgacuacgucagcaacaagggcguggacaccguguccgucggcaacacccuguacuacgugaacaagcaggagggccagagccucuacgugaagggggagcccaucaucaacuucuacgacccgcuggucuuccccuccgacgaguucgacgccagcaucucccaggugaacgagaagaucaaccagagccuggccuucauccggaaguccgacgagcuccugcacaacgugaacgucggcaagagcaccacgaacaucaugaucaccaccaucaucaucgugaucaucgugauccugcugcuccugaucgccgucgggcuguuccucuacugcaaggcccgcuccacccccgugacgcugagcaaggaccagcuguccgggaucaacaacaucgcguucagcaacugaggacuaguguccaccugucccuccugggcugcuggauugucucguuuuccugccaaauaaacaggaucagcgcuuuacagaucuaaaaaaaaaaaaaaaaaaaaaaaaaaaaaaaaaaaaaaaaaaaaaaaaaaaaaaaaaaaaaaaaugcaucccccccccccccccccccccccccccccccaaaggcucuuuucagagccaccagaauu

SEQ ID NO: 17800 - RNA, 1937 nt, Artificial Sequence
  mRNA product Design e-1 comprising derived and/or modified sequence from HRSV(Memphis-37)__AIY60640.1__F_DSCav1_mut6 (opt1)
gggagaauauaagcguuggcggagcgucgguuguagcacucugcgcgcccgcucuucugcugcuguuugucuacuuccuccugcuuccccgccgccgccgccgccaucaagcuuaccauggagcugcccauccucaagaccaacgccaucaccacgauccuggccgcggugacccugugcuucgccagcucccagaacaucaccgaggaguucuaccagagcacgugcuccgccgucagcaagggcuaccucggggcccugcgcaccggcugguacaccuccgugaucaccaucgagcugagcaacaucaaggagaacaagugcaacgggaccgacgccaaggugaagcucaucaagcaggagcuggacaaguacaagaacgcggucacggaccugcagaugcucaugugcuccaccccggccgccggcagcggguccgccaucgcgagcggcaucgccgugugcaaggugcugcaccuggagggcgaggucaacaagaucaagaacgcccuccuguccaccaacaaggccguggugagccuguccaacggggucagcgugcucaccuucaaggugcuggaccugaagaacuacaucgacaagcagcuccugcccauccugaacaagcaguccugcagcauccccaaccccgagacggucauggaguuccagcagaagaacaaccggcuccuggagaucacccgcgaguucuccgugaacgccggcgugaccaccccggucagcacguacaugcugaccaacuccgagcuccugagccugaucaacgacaugcccaucaccaacgaccagaagaagcucaugagcaacaacgugcagaucgugcggcagcaguccuacagcaucaugugcaucaucaaggaggagguccuggcguacguggugcagcugccccucuacggggucaucgacacccccugcuggaagcugcacacguccccgcugugcaccaccaacaccaaggagggcagcaacaucugccucacgcgcaccgaccgggggugguacugcgacaacgccggcuccgugagcuucuucccccaggccgagaccugcaaggugugcuccaaccgcgucuucugcgacaccaugaacagccugacgcugcccuccgaggugaaccucugcaacaucgacaucuucaaccccaaguacgacugcaagaucaugaccagcaagaccgacgucuccagcuccgugaucaccagccugggcgccaucguguccugcuacgggaagacgaagugcaccgccagcaacaagaacaagggcaucaucaagaccuucuccaacgggugcgacuacgucagcaacaagggcguggacaccguguccgucggcaacacgcuguacuacgugaacaagcaggaggggcagagccucuacgugaagggcgagccgaucaucaacuucuacgacccccuggucuuccccagcgacgaguucgacgcguccaucagccaggugaacgagaagaucaaccagucccuggccuucauccgcaagagcgacgagcuccugcacaacgugaacgucgggaaguccaccaccaacaucaugaucaccaccaucaucaucgugaucaucgugauccugcuccugcugaucgccgucggccucuuccuguacugcaaggcccggagcacgcccgugacccuguccaaggaccagcugagcgggaucaacaacaucgccuucuccaacugaggacuaguguccaccugucccuccugggcugcuggauugucucguuuuccugccaaauaaacaggaucagcgcuuuacagaucuaaaaaaaaaaaaaaaaaaaaaaaaaaaaaaaaaaaaaaaaaaaaaaaaaaaaaaaaaaaaaaaaugcaucccccccccccccccccccccccccccccccaaaggcucuuuucagagccaccagaauu

SEQ ID NO: 17801 - RNA, 1937 nt, Artificial Sequence
  mRNA product Design e-1 comprising derived and/or modified sequence from HRSV(Memphis-37)__AIY60640.1__F_DSCav1_mut6 (opt2)
gggagaauauaagcguuggcggagcgucgguuguagcacucugcgcgcccgcucuucugcugcuguuugucuacuuccuccugcuuccccgccgccgccgccgccaucaagcuuaccauggagcuccccauccucaagaccaacgccaucaccaccauccucgccgccgucacccucugcuucgccuccucccagaacaucaccgaggaguucuaccaguccaccugcuccgccgucuccaagggcuaccucggcgcccuccgcaccggcugguacaccuccgucaucaccaucgagcucuccaacaucaaggagaacaagugcaacggcaccgacgccaaggucaagcucaucaagcaggagcucgacaaguacaagaacgccgucaccgaccuccagaugcucaugugcuccacccccgccgccggcuccggcuccgccaucgccuccggcaucgccgucugcaagguccuccaccucgagggcgaggucaacaagaucaagaacgcccuccucuccaccaacaaggccgucgucucccucuccaacggcgucuccguccucaccuucaagguccucgaccucaagaacuacaucgacaagcagcuccuccccauccucaacaagcaguccugcuccauccccaaccccgagaccgucauggaguuccagcagaagaacaaccgccuccucgagaucacccgcgaguucuccgucaacgccggcgucaccacccccgucuccaccuacaugcucaccaacuccgagcuccucucccucaucaacgacaugcccaucaccaacgaccagaagaagcucauguccaacaacguccagaucguccgccagcaguccuacuccaucaugugcaucaucaaggaggagguccucgccuacgucguccagcucccccucuacggcgucaucgacacccccugcuggaagcuccacaccuccccccucugcaccaccaacaccaaggagggcuccaacaucugccucacccgcaccgaccgcggcugguacugcgacaacgccggcuccgucuccuucuucccccaggccgagaccugcaaggucugcuccaaccgcgucuucugcgacaccaugaacucccucacccuccccuccgaggucaaccucugcaacaucgacaucuucaaccccaaguacgacugcaagaucaugaccuccaagaccgacgucuccuccuccgucaucaccucccucggcgccaucgucuccugcuacggcaagaccaagugcaccgccuccaacaagaacaagggcaucaucaagaccuucuccaacggcugcgacuacgucuccaacaagggcgucgacaccgucuccgucggcaacacccucuacuacgucaacaagcaggagggccagucccucuacgucaagggcgagcccaucaucaacuucuacgacccccucgucuuccccuccgacgaguucgacgccuccaucucccaggucaacgagaagaucaaccagucccucgccuucauccgcaaguccgacgagcuccuccacaacgucaacgucggcaaguccaccaccaacaucaugaucaccaccaucaucaucgucaucaucgucauccuccuccuccucaucgccgucggccucuuccucuacugcaaggcccgcuccacccccgucacccucuccaaggaccagcucuccggcaucaacaacaucgccuucuccaacugaggacuaguguccaccugucccuccugggcugcuggauugucucguuuuccugccaaauaaacaggaucagcgcuuuacagaucuaaaaaaaaaaaaaaaaaaaaaaaaaaaaaaaaaaaaaaaaaaaaaaaaaaaaaaaaaaaaaaaaugcaucccccccccccccccccccccccccccccccaaaggcucuuuucagagccaccagaauu

SEQ ID NO: 17802 - RNA, 1937 nt, Artificial Sequence
  mRNA product Design e-1 comprising derived and/or modified sequence from HRSV(Memphis-37)__AIY60640.1__F_DSCav1_mut6 (opt3)
gggagaauauaagcguuggcggagcgucgguuguagcacucugcgcgcccgcucuucugcugcuguuugucuacuuccuccugcuuccccgccgccgccgccgccaucaagcuuaccauggagcugcccauccucaagaccaacgccauuacaacuauacuugcugcagugacgcugugcuucgccagcucccagaauaucaccgaagaguuuuaccaaucuacauguucagcggucaguaaaggcuauuugggggcuuuaagaacuggaugguacaccagcguuauuacaaucgaacuguccaacauuaaggagaauaaaugcaacgguaccgacgccaaggugaaacuaaucaagcaggaacucgauaaguauaaaaaugcaguaacugaccugcagaugcuuauguguucuacuccugccgcuggcucggggucagcaauagccagcggaaucgcugugugcaagguccugcacuuggagggcgaggugaacaaaauuaagaaugcccuccugaguaccaacaaagcgguugugucccugucuaauggugucagcgugcucacguucaagguauuagaucugaagaacuacaucgacaaacagcuuuugccaauucugaauaagcaauccuguucaaucccgaaccccgaaacuguuauggaguuucagcagaaaaauaacaggcuacucgaaauaacccgggaguucagugugaaugcaggggucacaacuccugugagcaccuauaugcugacaaacucugagcuucuguccuugauuaacgauaugccaaucaccaaugaccagaagaaacucaugucaaacaaugugcaaauuguccgccagcagagcuacaguaucaugugcaucauuaaggaagagguucuggccuaugugguacaguuaccccuguacggagugauagauacgccuuguuggaaacuccauacuucuccacuuugcacaaccaacacuaaggaaggcuccaauaucugucugacacgaaccgaccguggcugguacugcgauaacgcugggagcgucucguuuuucccccaagccgagacguguaaggugugcucuaauagaguuuucugcgacaccaugaacuccuugacacuaccuucagaagugaaucuguguaacauugauaucuucaauccaaaauaugacugcaagauaaugacaaguaaaaccgaugucagcuccucugugauuacaagccucggagcaaucguaucauguuacgguaagacuaaaugcaccgcuaguaacaagaauaagggcaucauuaaaacauuuuccaacgggugugacuauguuagcaauaagggaguggacaccgucucugugggcaacacucuguacuaugucaacaaacaggagggucagucacuuuacgugaagggggagccgaucauuaauuucuaugauccccugguuuuuccuagugacgaauuugaugccagcauaucccaagugaacgagaaaaucaaucagucuuuggcguuuauuaggaagucggacgaacuccugcacaacguaaaugucggaaagagcacgacaaacaucaugaucaccacuauuauaaucgugauuaucguuauuuuacugcuacucaucgccgugggccuguuccuuuacugcaaagcacgguccaccccagucacauugucaaaggaucagcugaguggcauaaauaacaucgcuuucucuaauugaggacuaguguccaccugucccuccugggcugcuggauugucucguuuuccugccaaauaaacaggaucagcgcuuuacagaucuaaaaaaaaaaaaaaaaaaaaaaaaaaaaaaaaaaaaaaaaaaaaaaaaaaaaaaaaaaaaaaaaugcaucccccccccccccccccccccccccccccccaaaggcucuuuucagagccaccagaauu

SEQ ID NO: 17803 - RNA, 1937 nt, Artificial Sequence
  mRNA product Design e-1 comprising derived and/or modified sequence from HRSV(Memphis-37)__AIY60640.1__F_DSCav1_mut6 (opt4)
gggagaauauaagcguuggcggagcgucgguuguagcacucugcgcgcccgcucuucugcugcuguuugucuacuuccuccugcuuccccgccgccgccgccgccaucaagcuuaccauggagcugcccauccugaagaccaacgccaucaccaccauccuggccgccgugacccugugcuucgccagcagccagaacaucaccgaggaguucuaccagagcaccugcagcgccgugagcaagggcuaccugggcgcccugagaaccggcugguacaccagcgugaucaccaucgagcugagcaacaucaaggagaacaagugcaacggcaccgacgccaaggugaagcugaucaagcaggagcuggacaaguacaagaacgccgugaccgaccugcagaugcugaugugcagcacccccgccgccggcagcggcagcgccaucgccagcggcaucgccgugugcaaggugcugcaccuggagggcgaggugaacaagaucaagaacgcccugcugagcaccaacaaggccguggugagccugagcaacggcgugagcgugcugaccuucaaggugcuggaccugaagaacuacaucgacaagcagcugcugcccauccugaacaagcagagcugcagcauccccaaccccgagaccgugauggaguuccagcagaagaacaacagacugcuggagaucaccagagaguucagcgugaacgccggcgugaccacccccgugagcaccuacaugcugaccaacagcgagcugcugagccugaucaacgacaugcccaucaccaacgaccagaagaagcugaugagcaacaacgugcagaucgugagacagcagagcuacagcaucaugugcaucaucaaggaggaggugcuggccuacguggugcagcugccccuguacggcgugaucgacacccccugcuggaagcugcacaccagcccccugugcaccaccaacaccaaggagggcagcaacaucugccugaccagaaccgacagaggcugguacugcgacaacgccggcagcgugagcuucuucccccaggccgagaccugcaaggugugcagcaacagaguguucugcgacaccaugaacagccugacccugcccagcgaggugaaccugugcaacaucgacaucuucaaccccaaguacgacugcaagaucaugaccagcaagaccgacgugagcagcagcgugaucaccagccugggcgccaucgugagcugcuacggcaagaccaagugcaccgccagcaacaagaacaagggcaucaucaagaccuucagcaacggcugcgacuacgugagcaacaagggcguggacaccgugagcgugggcaacacccuguacuacgugaacaagcaggagggccagagccuguacgugaagggcgagcccaucaucaacuucuacgacccccugguguuccccagcgacgaguucgacgccagcaucagccaggugaacgagaagaucaaccagagccuggccuucaucagaaagagcgacgagcugcugcacaacgugaacgugggcaagagcaccaccaacaucaugaucaccaccaucaucaucgugaucaucgugauccugcugcugcugaucgccgugggccuguuccuguacugcaaggccagaagcacccccgugacccugagcaaggaccagcugagcggcaucaacaacaucgccuucagcaacugaggacuaguguccaccugucccuccugggcugcuggauugucucguuuuccugccaaauaaacaggaucagcgcuuuacagaucuaaaaaaaaaaaaaaaaaaaaaaaaaaaaaaaaaaaaaaaaaaaaaaaaaaaaaaaaaaaaaaaaugcaucccccccccccccccccccccccccccccccaaaggcucuuuucagagccaccagaauu

SEQ ID NO: 17804 - RNA, 1937 nt, Artificial Sequence
  mRNA product Design e-1 comprising derived and/or modified sequence from HRSV(Memphis-37)__AIY60640.1__F_DSCav1_mut6 (opt5)
gggagaauauaagcguuggcggagcgucgguuguagcacucugcgcgcccgcucuucugcugcuguuugucuacuuccuccugcuuccccgccgccgccgccgccaucaagcuuaccauggagcugcccauccucaagaccaacgccauuacaacgauccuggcugccgugacccuuugcuucgcgagcucccagaauauuacagaagaguuuuaccaaucuaccuguagcgcugucuccaaaggcuaucugggggcccucagaacaggaugguacaccucuguuaucacaauugaacugagcaacaucaaggagaauaaaugcaacggcaccgacgccaaggugaaacuuaucaagcaggaacuggauaaguauaaaaaugcugugacggaccuccagaugcugauguguuccaccccugccgcugggucuggaagcgccauugcguccggcaucgccgucugcaaggugcugcaccucgagggggagguuaacaaaauuaagaaugcucugcuuagcacaaacaaagccguggucucucuguccaauggagugagcguucucaccuucaaggugcuggaucuuaagaacuacaucgacaaacagcugcucccgauucugaauaagcaaucuuguuccauccccaacccugaaacagucauggaguuucagcagaaaaauaaccggcugcucgaaauuacccgcgaguucagcgugaaugcuggcgugacgacacccgucucuaccuauaugcugacaaacuccgagcuucugagccucaucaacgauaugccuaucaccaaugaccagaagaaacugauguccaacaauguucaaauugugagacagcagucuuacagcaucaugugcauuaucaaggaagaggugcuugccuaugucgugcagcugccccucuacggcguuauugauaccccuuguuggaaacugcauacauccccgcugugcacgaccaacacaaaggaagggagcaauaucugucucacccggacagaccgcggaugguacugcgauaacgcgggcucuguguccuuuuucccccaagccgagaccuguaaggucugcagcaauagaguguuuugcgacacgaugaacucucugacacuuccuagcgaaguuaaucuguguaacaucgauauuuucaaucccaaauaugacugcaagaucaugaccuccaaaaccgaugugucuagcuccgucauuacaagccucggggcuaucgugucuuguuacggaaagaccaaaugcacagccuccaacaagaauaagggcauuaucaaaacguuuagcaacgggugugacuaugucucuaauaagggaguggacaccguuuccgugggcaacacacuguacuaugucaacaaacaggagggccagagccuuuacgugaagggggagccuaucauuaauuucuaugauccccugguuuuuccguccgacgaauuugaugcuucuaucagccaagugaacgagaaaauuaaucagucccucgccuucauccggaagucugacgaacugcugcacaacgucaaugugggaaagagcaccacaaacauuaugaucaccacgauuaucaucgugauuaucguuauucuccugcuucugaucgccgucggccucuuccuguacugcaaagcucgcuccaccccugugacacugagcaaggaucagcuuucugggauuaauaacaucgcguucuccaauugaggacuaguguccaccugucccuccugggcugcuggauugucucguuuuccugccaaauaaacaggaucagcgcuuuacagaucuaaaaaaaaaaaaaaaaaaaaaaaaaaaaaaaaaaaaaaaaaaaaaaaaaaaaaaaaaaaaaaaaugcaucccccccccccccccccccccccccccccccaaaggcucuuuucagagccaccagaauu

SEQ ID NO: 17805 - RNA, 1937 nt, Artificial Sequence
  mRNA product Design e-1 comprising derived and/or modified sequence from HRSV(Memphis-37)__AIY60640.1__F_DSCav1_mut6 (opt6)
gggagaauauaagcguuggcggagcgucgguuguagcacucugcgcgcccgcucuucugcugcuguuugucuacuuccuccugcuuccccgccgccgccgccgccaucaagcuuaccauggaacuaccaauuuuaaaaacaaacgcaauuacaacuauacucgcagcaguaacauuauguuucgccucaucccaaaacauaacagaagaauuuuaccaaucaacaugcagcgcaguaucaaaaggauaucucggagcauuacgaacagguugguacacaucuguaaucacuauagaacuaucaaacauaaaagaaaacaaaugcaauggaaccgacgcaaaaguaaaauuaauaaaacaagaacucgauaaauacaaaaaugcaguaacagaccuccaaaugcucauguguucaacaccagccgcaggaucagguuccgccauagcaucuggcauagcaguaugcaaaguacuccacuuagaaggagaaguuaacaaaauaaaaaacgcacuauuaucaacaaacaaagcaguaguaucccucucaaacggagucucaguauuaacauucaaaguauuagaccuaaaaaacuacauagacaaacaacuacuuccaauacucaacaaacaaucaugcucaauaccaaacccagaaaccguaauggaauuucaacaaaaaaacaaccgacuacuagaaaucacacgagaauuuucaguaaacgccggugucacaacuccaguaucaacuuauauguuaaccaacucagaacuauuaucauuaauaaacgauaugcccauaacuaacgaccaaaaaaaauuaaugucaaacaacguacaaauaguacgccaacaaaguuacucaauaaugugcaucauaaaagaagaaguauuagcguacguuguacaacuaccucuauacggagucauagacacaccaugcuggaaacuucacacaucaccacuauguacaacaaacacaaaagaaggcaguaacauaugccuaacaagaacagaccguggaugguauugugacaacgcuggaucuguaucauucuucccucaagcagaaaccuguaaaguuugcucaaacagagucuucugugacacaaugaacucucuaacacuaccuuccgaagugaaccucuguaacauagacauauucaauccaaaauaugauugcaaaauaaugacuucaaaaacagauguaucauccucuguuauaacaucauuaggcgccauaguuucaugcuacggaaaaacuaaaugcacagcaucaaacaaaaacaaaggaauaauaaaaaccuucucaaauggaugcgacuacguaagcaacaaaggcguagacacaguaucaguagguaauacauuauacuacguaaacaaacaagaaggacaaucacuuuauguuaaaggagaaccuauaauaaacuucuacgacccacuuguauuuccauccgaugaauuugacgcaucuauaucacaagucaacgaaaaaauaaaccaaucauuagcauucauucgaaaauccgaugaacuacuccauaacguaaaugucggaaaaucaacaaccaacauaaugaucacaacaauaaucauagugauaauaguaauacuccuacuacuaaucgcaguaggucuauuccuauauuguaaagcaagaucuacuccaguuacacucucuaaagaccaauuaagcgguaucaacaacaucgccuucagcaauuaaggacuaguguccaccugucccuccugggcugcuggauugucucguuuuccugccaaauaaacaggaucagcgcuuuacagaucuaaaaaaaaaaaaaaaaaaaaaaaaaaaaaaaaaaaaaaaaaaaaaaaaaaaaaaaaaaaaaaaaugcaucccccccccccccccccccccccccccccccaaaggcucuuuucagagccaccagaauu

SEQ ID NO: 17806 - RNA, 1937 nt, Artificial Sequence
  mRNA product Design e-1 comprising derived and/or modified sequence from HRSV(Memphis-37)__AIY60640.1__F_DSCav1_mut6 (opt11)
gggagaauauaagcguuggcggagcgucgguuguagcacucugcgcgcccgcucuucugcugcuguuugucuacuuccuccugcuuccccgccgccgccgccgccaucaagcuuaccauggagcugcccauccucaagaccaacgccaucaccacgauccuggccgcggugacccugugcuucgcgagcucccaaaacaucaccgaggaguucuaccagagcacgugcuccgccgucagcaagggcuaccucggggcccugcgcaccggcugguacaccuccgugaucaccaucgagcugagcaacaucaaggaaaacaagugcaacgggacggacgcaaaggugaagcucaucaagcaggagcuggauaaguacaagaacgcggucacggaccugcagaugcucaugugcuccaccccggccgccggcagcggguccgccaucgcguccggcaucgccgugugcaagguguugcaccuggagggcgaggucaacaagaucaagaacgcccuccuuuccaccaauaaggcuguugugagccuguccaacggggucagcgugcucaccuucaaggugcuggaccugaagaacuacaucgacaagcagcuccugcccauccugaacaagcaguccugcagcauccccaaccccgagacagucauggaguuccagcagaagaacaaccggcuccuggagaucacccgcgaguucuccguuaacgccggggugaccaccccgguaagcacauacaugcugaccaacagcgagcuccugagccugaucaacgacaugcccaucaccaacgaccagaagaagcucaugagcaacaacgugcagaucgugcggcagcaguccuacagcaucaugugcaucaucaaggaggagguccuggcguacguggugcaacugccccucuacggggucaucgacacccccugcuggaagcugcacacguccccgcugugcaccaccaacaccaaggagggcagcaacaucugccucacgcgcaccgaccgggggugguacugcgacaacgcaggcuccgugagcuucuucccccaggccgagaccugcaaggugugcuccaaccgcgucuucugcgacaccaugaacagccugacgcugcccuccgaggugaaccucugcaacaucgacaucuucaaccccaaguacgacuguaagaucaugaccagcaagaccgaugucuccagcuccgugaucaccagccugggcgccauaguguccuguuaugggaagacgaagugcaccgccagcaacaagaacaaaggcaucaucaagaccuucuccaacgggugcgacuacgucagcaacaagggcguggacacaguguccgucggcaacacgcuguacuacgugaacaagcaggaggggcagagccucuacgugaagggcgagccgaucaucaacuucuacgauccccuggucuuccccagcgacgaguucgacgcguccaucagccaagugaacgagaagaucaaccagucccuggccuucauccgcaagagcgacgagcuccugcacaacgugaacgucgggaaguccaccaccaacaucaugaucaccaccaucaucaucgugaucaucgucauccugcuccugcugaucgccgucggccucuuccuguacugcaaggcccggagcacgcccgugacccuguccaaggaccagcugucgggcaucaacaacaucgccuucuccaacugaggacuaguguccaccugucccuccugggcugcuggauugucucguuuuccugccaaauaaacaggaucagcgcuuuacagaucuaaaaaaaaaaaaaaaaaaaaaaaaaaaaaaaaaaaaaaaaaaaaaaaaaaaaaaaaaaaaaaaaugcaucccccccccccccccccccccccccccccccaaaggcucuuuucagagccaccagaauu

SEQ ID NO: 17807 - RNA, 1919 nt, Artificial Sequence
  mRNA product Design e-2 comprising derived and/or modified sequence from HRSV(Memphis-37)__AIY60640.1__F_DSCav1_mut6 (opt1)
gggagacccgugacccggaaguuguacggcuacgcgacuuucccucccacaaacccucgcgcccuuccuuuccuacuugggcccggcagaaagcuuaccauggagcugcccauccucaagaccaacgccaucaccacgauccuggccgcggugacccugugcuucgccagcucccagaacaucaccgaggaguucuaccagagcacgugcuccgccgucagcaagggcuaccucggcgcccugcgcaccgggugguacaccagcgugaucaccaucgagcuguccaacaucaaggagaacaagugcaacggcaccgacgccaaggugaagcucaucaagcaggagcuggacaaguacaagaacgcggucacggaccugcagaugcugaugugcagcaccccggccgccggcuccgggagcgcgaucgccuccggcaucgccgucugcaaggugcugcaccucgagggcgaggugaacaagaucaagaacgcccugcuguccaccaacaaggccgucgugagccucuccaacggggugagcguccugaccuucaaggugcuggaccucaagaacuacaucgacaagcagcugcugcccauccugaacaagcagagcugcuccauccccaaccccgagaccgucauggaguuccagcagaagaacaaccgccuccuggagaucacgcgggaguucagcgugaacgcgggcgugaccacccccgucuccaccuacaugcugacgaacagcgagcuccugucccugaucaacgacaugccgaucaccaacgaccagaagaagcucaugagcaacaacgugcagaucgugcgccagcaguccuacagcaucaugugcaucaucaaggaggagguccuggccuacguggugcagcugccccucuacggggucaucgacacccccugcuggaagcugcacaccagcccccugugcacgaccaacaccaaggagggcuccaacaucugccucacccggacggaccgcgggugguacugcgacaacgccggcagcguguccuucuucccgcaggccgagaccugcaaggucugcagcaaccggguguucugcgacaccaugaacucccugacccugcccagcgaggugaaccucugcaacaucgacaucuucaaccccaaguacgacugcaagaucaugacguccaagaccgacgucagcuccagcgugaucaccucccugggcgccaucgugagcugcuacgggaagaccaagugcacggcgagcaacaagaacaagggcaucaucaagaccuucuccaacgggugcgacuacgucagcaacaagggcguggacaccguguccgucggcaacacccuguacuacgugaacaagcaggagggccagagccucuacgugaagggggagcccaucaucaacuucuacgacccgcuggucuuccccuccgacgaguucgacgccagcaucucccaggugaacgagaagaucaaccagagccuggccuucauccggaaguccgacgagcuccugcacaacgugaacgucggcaagagcaccacgaacaucaugaucaccaccaucaucaucgugaucaucgugauccugcugcuccugaucgccgucgggcuguuccucuacugcaaggcccgcuccacccccgugacgcugagcaaggaccagcuguccgggaucaacaacaucgcguucagcaacugaggacuaguguccaccugucccuccugggcugcuggauugucucguuuuccugccaaauaaacaggaucagcgcuuuacagaucuaaaaaaaaaaaaaaaaaaaaaaaaaaaaaaaaaaaaaaaaaaaaaaaaaaaaaaaaaaaaaaaaugcaucccccccccccccccccccccccccccccccaaaggcucuuuucagagccaccagaauu

SEQ ID NO: 17808 - RNA, 1919 nt, Artificial Sequence
  mRNA product Design e-2 comprising derived and/or modified sequence from HRSV(Memphis-37)__AIY60640.1__F_DSCav1_mut6 (opt1)
gggagacccgugacccggaaguuguacggcuacgcgacuuucccucccacaaacccucgcgcccuuccuuuccuacuugggcccggcagaaagcuuaccauggagcugcccauccucaagaccaacgccaucaccacgauccuggccgcggugacccugugcuucgccagcucccagaacaucaccgaggaguucuaccagagcacgugcuccgccgucagcaagggcuaccucggggcccugcgcaccggcugguacaccuccgugaucaccaucgagcugagcaacaucaaggagaacaagugcaacgggaccgacgccaaggugaagcucaucaagcaggagcuggacaaguacaagaacgcggucacggaccugcagaugcucaugugcuccaccccggccgccggcagcggguccgccaucgcgagcggcaucgccgugugcaaggugcugcaccuggagggcgaggucaacaagaucaagaacgcccuccuguccaccaacaaggccguggugagccuguccaacggggucagcgugcucaccuucaaggugcuggaccugaagaacuacaucgacaagcagcuccugcccauccugaacaagcaguccugcagcauccccaaccccgagacggucauggaguuccagcagaagaacaaccggcuccuggagaucacccgcgaguucuccgugaacgccggcgugaccaccccggucagcacguacaugcugaccaacuccgagcuccugagccugaucaacgacaugcccaucaccaacgaccagaagaagcucaugagcaacaacgugcagaucgugcggcagcaguccuacagcaucaugugcaucaucaaggaggagguccuggcguacguggugcagcugccccucuacggggucaucgacacccccugcuggaagcugcacacguccccgcugugcaccaccaacaccaaggagggcagcaacaucugccucacgcgcaccgaccgggggugguacugcgacaacgccggcuccgugagcuucuucccccaggccgagaccugcaaggugugcuccaaccgcgucuucugcgacaccaugaacagccugacgcugcccuccgaggugaaccucugcaacaucgacaucuucaaccccaaguacgacugcaagaucaugaccagcaagaccgacgucuccagcuccgugaucaccagccugggcgccaucguguccugcuacgggaagacgaagugcaccgccagcaacaagaacaagggcaucaucaagaccuucuccaacgggugcgacuacgucagcaacaagggcguggacaccguguccgucggcaacacgcuguacuacgugaacaagcaggaggggcagagccucuacgugaagggcgagccgaucaucaacuucuacgacccccuggucuuccccagcgacgaguucgacgcguccaucagccaggugaacgagaagaucaaccagucccuggccuucauccgcaagagcgacgagcuccugcacaacgugaacgucgggaaguccaccaccaacaucaugaucaccaccaucaucaucgugaucaucgugauccugcuccugcugaucgccgucggccucuuccuguacugcaaggcccggagcacgcccgugacccuguccaaggaccagcugagcgggaucaacaacaucgccuucuccaacugaggacuaguguccaccugucccuccugggcugcuggauugucucguuuuccugccaaauaaacaggaucagcgcuuuacagaucuaaaaaaaaaaaaaaaaaaaaaaaaaaaaaaaaaaaaaaaaaaaaaaaaaaaaaaaaaaaaaaaaugcaucccccccccccccccccccccccccccccccaaaggcucuuuucagagccaccagaauu

SEQ ID NO: 17809 - RNA, 1919 nt, Artificial Sequence
  mRNA product Design e-2 comprising derived and/or modified sequence from HRSV(Memphis-37)__AIY60640.1__F_DSCav1_mut6 (opt2)
gggagacccgugacccggaaguuguacggcuacgcgacuuucccucccacaaacccucgcgcccuuccuuuccuacuugggcccggcagaaagcuuaccauggagcuccccauccucaagaccaacgccaucaccaccauccucgccgccgucacccucugcuucgccuccucccagaacaucaccgaggaguucuaccaguccaccugcuccgccgucuccaagggcuaccucggcgcccuccgcaccggcugguacaccuccgucaucaccaucgagcucuccaacaucaaggagaacaagugcaacggcaccgacgccaaggucaagcucaucaagcaggagcucgacaaguacaagaacgccgucaccgaccuccagaugcucaugugcuccacccccgccgccggcuccggcuccgccaucgccuccggcaucgccgucugcaagguccuccaccucgagggcgaggucaacaagaucaagaacgcccuccucuccaccaacaaggccgucgucucccucuccaacggcgucuccguccucaccuucaagguccucgaccucaagaacuacaucgacaagcagcuccuccccauccucaacaagcaguccugcuccauccccaaccccgagaccgucauggaguuccagcagaagaacaaccgccuccucgagaucacccgcgaguucuccgucaacgccggcgucaccacccccgucuccaccuacaugcucaccaacuccgagcuccucucccucaucaacgacaugcccaucaccaacgaccagaagaagcucauguccaacaacguccagaucguccgccagcaguccuacuccaucaugugcaucaucaaggaggagguccucgccuacgucguccagcucccccucuacggcgucaucgacacccccugcuggaagcuccacaccuccccccucugcaccaccaacaccaaggagggcuccaacaucugccucacccgcaccgaccgcggcugguacugcgacaacgccggcuccgucuccuucuucccccaggccgagaccugcaaggucugcuccaaccgcgucuucugcgacaccaugaacucccucacccuccccuccgaggucaaccucugcaacaucgacaucuucaaccccaaguacgacugcaagaucaugaccuccaagaccgacgucuccuccuccgucaucaccucccucggcgccaucgucuccugcuacggcaagaccaagugcaccgccuccaacaagaacaagggcaucaucaagaccuucuccaacggcugcgacuacgucuccaacaagggcgucgacaccgucuccgucggcaacacccucuacuacgucaacaagcaggagggccagucccucuacgucaagggcgagcccaucaucaacuucuacgacccccucgucuuccccuccgacgaguucgacgccuccaucucccaggucaacgagaagaucaaccagucccucgccuucauccgcaaguccgacgagcuccuccacaacgucaacgucggcaaguccaccaccaacaucaugaucaccaccaucaucaucgucaucaucgucauccuccuccuccucaucgccgucggccucuuccucuacugcaaggcccgcuccacccccgucacccucuccaaggaccagcucuccggcaucaacaacaucgccuucuccaacugaggacuaguguccaccugucccuccugggcugcuggauugucucguuuuccugccaaauaaacaggaucagcgcuuuacagaucuaaaaaaaaaaaaaaaaaaaaaaaaaaaaaaaaaaaaaaaaaaaaaaaaaaaaaaaaaaaaaaaaugcaucccccccccccccccccccccccccccccccaaaggcucuuuucagagccaccagaauu

SEQ ID NO: 17810 - RNA, 1919 nt, Artificial Sequence
  mRNA product Design e-2 comprising derived and/or modified sequence from HRSV(Memphis-37)__AIY60640.1__F_DSCav1_mut6 (opt3)
gggagacccgugacccggaaguuguacggcuacgcgacuuucccucccacaaacccucgcgcccuuccuuuccuacuugggcccggcagaaagcuuaccauggagcugcccauccucaagaccaacgccauuacaacuauacuugcugcagugacgcugugcuucgccagcucccagaauaucaccgaagaguuuuaccaaucuacauguucagcggucaguaaaggcuauuugggggcuuuaagaacuggaugguacaccagcguuauuacaaucgaacuguccaacauuaaggagaauaaaugcaacgguaccgacgccaaggugaaacuaaucaagcaggaacucgauaaguauaaaaaugcaguaacugaccugcagaugcuuauguguucuacuccugccgcuggcucggggucagcaauagccagcggaaucgcugugugcaagguccugcacuuggagggcgaggugaacaaaauuaagaaugcccuccugaguaccaacaaagcgguugugucccugucuaauggugucagcgugcucacguucaagguauuagaucugaagaacuacaucgacaaacagcuuuugccaauucugaauaagcaauccuguucaaucccgaaccccgaaacuguuauggaguuucagcagaaaaauaacaggcuacucgaaauaacccgggaguucagugugaaugcaggggucacaacuccugugagcaccuauaugcugacaaacucugagcuucuguccuugauuaacgauaugccaaucaccaaugaccagaagaaacucaugucaaacaaugugcaaauuguccgccagcagagcuacaguaucaugugcaucauuaaggaagagguucuggccuaugugguacaguuaccccuguacggagugauagauacgccuuguuggaaacuccauacuucuccacuuugcacaaccaacacuaaggaaggcuccaauaucugucugacacgaaccgaccguggcugguacugcgauaacgcugggagcgucucguuuuucccccaagccgagacguguaaggugugcucuaauagaguuuucugcgacaccaugaacuccuugacacuaccuucagaagugaaucuguguaacauugauaucuucaauccaaaauaugacugcaagauaaugacaaguaaaaccgaugucagcuccucugugauuacaagccucggagcaaucguaucauguuacgguaagacuaaaugcaccgcuaguaacaagaauaagggcaucauuaaaacauuuuccaacgggugugacuauguuagcaauaagggaguggacaccgucucugugggcaacacucuguacuaugucaacaaacaggagggucagucacuuuacgugaagggggagccgaucauuaauuucuaugauccccugguuuuuccuagugacgaauuugaugccagcauaucccaagugaacgagaaaaucaaucagucuuuggcguuuauuaggaagucggacgaacuccugcacaacguaaaugucggaaagagcacgacaaacaucaugaucaccacuauuauaaucgugauuaucguuauuuuacugcuacucaucgccgugggccuguuccuuuacugcaaagcacgguccaccccagucacauugucaaaggaucagcugaguggcauaaauaacaucgcuuucucuaauugaggacuaguguccaccugucccuccugggcugcuggauugucucguuuuccugccaaauaaacaggaucagcgcuuuacagaucuaaaaaaaaaaaaaaaaaaaaaaaaaaaaaaaaaaaaaaaaaaaaaaaaaaaaaaaaaaaaaaaaugcaucccccccccccccccccccccccccccccccaaaggcucuuuucagagccaccagaauu

SEQ ID NO: 17811 - RNA, 1919 nt, Artificial Sequence
  mRNA product Design e-2 comprising derived and/or modified sequence from HRSV(Memphis-37)__AIY60640.1__F_DSCav1_mut6 (opt4)
gggagacccgugacccggaaguuguacggcuacgcgacuuucccucccacaaacccucgcgcccuuccuuuccuacuugggcccggcagaaagcuuaccauggagcugcccauccugaagaccaacgccaucaccaccauccuggccgccgugacccugugcuucgccagcagccagaacaucaccgaggaguucuaccagagcaccugcagcgccgugagcaagggcuaccugggcgcccugagaaccggcugguacaccagcgugaucaccaucgagcugagcaacaucaaggagaacaagugcaacggcaccgacgccaaggugaagcugaucaagcaggagcuggacaaguacaagaacgccgugaccgaccugcagaugcugaugugcagcacccccgccgccggcagcggcagcgccaucgccagcggcaucgccgugugcaaggugcugcaccuggagggcgaggugaacaagaucaagaacgcccugcugagcaccaacaaggccguggugagccugagcaacggcgugagcgugcugaccuucaaggugcuggaccugaagaacuacaucgacaagcagcugcugcccauccugaacaagcagagcugcagcauccccaaccccgagaccgugauggaguuccagcagaagaacaacagacugcuggagaucaccagagaguucagcgugaacgccggcgugaccacccccgugagcaccuacaugcugaccaacagcgagcugcugagccugaucaacgacaugcccaucaccaacgaccagaagaagcugaugagcaacaacgugcagaucgugagacagcagagcuacagcaucaugugcaucaucaaggaggaggugcuggccuacguggugcagcugccccuguacggcgugaucgacacccccugcuggaagcugcacaccagcccccugugcaccaccaacaccaaggagggcagcaacaucugccugaccagaaccgacagaggcugguacugcgacaacgccggcagcgugagcuucuucccccaggccgagaccugcaaggugugcagcaacagaguguucugcgacaccaugaacagccugacccugcccagcgaggugaaccugugcaacaucgacaucuucaaccccaaguacgacugcaagaucaugaccagcaagaccgacgugagcagcagcgugaucaccagccugggcgccaucgugagcugcuacggcaagaccaagugcaccgccagcaacaagaacaagggcaucaucaagaccuucagcaacggcugcgacuacgugagcaacaagggcguggacaccgugagcgugggcaacacccuguacuacgugaacaagcaggagggccagagccuguacgugaagggcgagcccaucaucaacuucuacgacccccugguguuccccagcgacgaguucgacgccagcaucagccaggugaacgagaagaucaaccagagccuggccuucaucagaaagagcgacgagcugcugcacaacgugaacgugggcaagagcaccaccaacaucaugaucaccaccaucaucaucgugaucaucgugauccugcugcugcugaucgccgugggccuguuccuguacugcaaggccagaagcacccccgugacccugagcaaggaccagcugagcggcaucaacaacaucgccuucagcaacugaggacuaguguccaccugucccuccugggcugcuggauugucucguuuuccugccaaauaaacaggaucagcgcuuuacagaucuaaaaaaaaaaaaaaaaaaaaaaaaaaaaaaaaaaaaaaaaaaaaaaaaaaaaaaaaaaaaaaaaugcaucccccccccccccccccccccccccccccccaaaggcucuuuucagagccaccagaauu

SEQ ID NO: 17812 - RNA, 1919 nt, Artificial Sequence
  mRNA product Design e-2 comprising derived and/or modified sequence from HRSV(Memphis-37)__AIY60640.1__F_DSCav1_mut6 (opt5)
gggagacccgugacccggaaguuguacggcuacgcgacuuucccucccacaaacccucgcgcccuuccuuuccuacuugggcccggcagaaagcuuaccauggagcugcccauccucaagaccaacgccauuacaacgauccuggcugccgugacccuuugcuucgcgagcucccagaauauuacagaagaguuuuaccaaucuaccuguagcgcugucuccaaaggcuaucugggggcccucagaacaggaugguacaccucuguuaucacaauugaacugagcaacaucaaggagaauaaaugcaacggcaccgacgccaaggugaaacuuaucaagcaggaacuggauaaguauaaaaaugcugugacggaccuccagaugcugauguguuccaccccugccgcugggucuggaagcgccauugcguccggcaucgccgucugcaaggugcugcaccucgagggggagguuaacaaaauuaagaaugcucugcuuagcacaaacaaagccguggucucucuguccaauggagugagcguucucaccuucaaggugcuggaucuuaagaacuacaucgacaaacagcugcucccgauucugaauaagcaaucuuguuccauccccaacccugaaacagucauggaguuucagcagaaaaauaaccggcugcucgaaauuacccgcgaguucagcgugaaugcuggcgugacgacacccgucucuaccuauaugcugacaaacuccgagcuucugagccucaucaacgauaugccuaucaccaaugaccagaagaaacugauguccaacaauguucaaauugugagacagcagucuuacagcaucaugugcauuaucaaggaagaggugcuugccuaugucgugcagcugccccucuacggcguuauugauaccccuuguuggaaacugcauacauccccgcugugcacgaccaacacaaaggaagggagcaauaucugucucacccggacagaccgcggaugguacugcgauaacgcgggcucuguguccuuuuucccccaagccgagaccuguaaggucugcagcaauagaguguuuugcgacacgaugaacucucugacacuuccuagcgaaguuaaucuguguaacaucgauauuuucaaucccaaauaugacugcaagaucaugaccuccaaaaccgaugugucuagcuccgucauuacaagccucggggcuaucgugucuuguuacggaaagaccaaaugcacagccuccaacaagaauaagggcauuaucaaaacguuuagcaacgggugugacuaugucucuaauaagggaguggacaccguuuccgugggcaacacacuguacuaugucaacaaacaggagggccagagccuuuacgugaagggggagccuaucauuaauuucuaugauccccugguuuuuccguccgacgaauuugaugcuucuaucagccaagugaacgagaaaauuaaucagucccucgccuucauccggaagucugacgaacugcugcacaacgucaaugugggaaagagcaccacaaacauuaugaucaccacgauuaucaucgugauuaucguuauucuccugcuucugaucgccgucggccucuuccuguacugcaaagcucgcuccaccccugugacacugagcaaggaucagcuuucugggauuaauaacaucgcguucuccaauugaggacuaguguccaccugucccuccugggcugcuggauugucucguuuuccugccaaauaaacaggaucagcgcuuuacagaucuaaaaaaaaaaaaaaaaaaaaaaaaaaaaaaaaaaaaaaaaaaaaaaaaaaaaaaaaaaaaaaaaugcaucccccccccccccccccccccccccccccccaaaggcucuuuucagagccaccagaauu

SEQ ID NO: 17813 - RNA, 1919 nt, Artificial Sequence
  mRNA product Design e-2 comprising derived and/or modified sequence from HRSV(Memphis-37)__AIY60640.1__F_DSCav1_mut6 (opt6)
gggagacccgugacccggaaguuguacggcuacgcgacuuucccucccacaaacccucgcgcccuuccuuuccuacuugggcccggcagaaagcuuaccauggaacuaccaauuuuaaaaacaaacgcaauuacaacuauacucgcagcaguaacauuauguuucgccucaucccaaaacauaacagaagaauuuuaccaaucaacaugcagcgcaguaucaaaaggauaucucggagcauuacgaacagguugguacacaucuguaaucacuauagaacuaucaaacauaaaagaaaacaaaugcaauggaaccgacgcaaaaguaaaauuaauaaaacaagaacucgauaaauacaaaaaugcaguaacagaccuccaaaugcucauguguucaacaccagccgcaggaucagguuccgccauagcaucuggcauagcaguaugcaaaguacuccacuuagaaggagaaguuaacaaaauaaaaaacgcacuauuaucaacaaacaaagcaguaguaucccucucaaacggagucucaguauuaacauucaaaguauuagaccuaaaaaacuacauagacaaacaacuacuuccaauacucaacaaacaaucaugcucaauaccaaacccagaaaccguaauggaauuucaacaaaaaaacaaccgacuacuagaaaucacacgagaauuuucaguaaacgccggugucacaacuccaguaucaacuuauauguuaaccaacucagaacuauuaucauuaauaaacgauaugcccauaacuaacgaccaaaaaaaauuaaugucaaacaacguacaaauaguacgccaacaaaguuacucaauaaugugcaucauaaaagaagaaguauuagcguacguuguacaacuaccucuauacggagucauagacacaccaugcuggaaacuucacacaucaccacuauguacaacaaacacaaaagaaggcaguaacauaugccuaacaagaacagaccguggaugguauugugacaacgcuggaucuguaucauucuucccucaagcagaaaccuguaaaguuugcucaaacagagucuucugugacacaaugaacucucuaacacuaccuuccgaagugaaccucuguaacauagacauauucaauccaaaauaugauugcaaaauaaugacuucaaaaacagauguaucauccucuguuauaacaucauuaggcgccauaguuucaugcuacggaaaaacuaaaugcacagcaucaaacaaaaacaaaggaauaauaaaaaccuucucaaauggaugcgacuacguaagcaacaaaggcguagacacaguaucaguagguaauacauuauacuacguaaacaaacaagaaggacaaucacuuuauguuaaaggagaaccuauaauaaacuucuacgacccacuuguauuuccauccgaugaauuugacgcaucuauaucacaagucaacgaaaaaauaaaccaaucauuagcauucauucgaaaauccgaugaacuacuccauaacguaaaugucggaaaaucaacaaccaacauaaugaucacaacaauaaucauagugauaauaguaauacuccuacuacuaaucgcaguaggucuauuccuauauuguaaagcaagaucuacuccaguuacacucucuaaagaccaauuaagcgguaucaacaacaucgccuucagcaauuaaggacuaguguccaccugucccuccugggcugcuggauugucucguuuuccugccaaauaaacaggaucagcgcuuuacagaucuaaaaaaaaaaaaaaaaaaaaaaaaaaaaaaaaaaaaaaaaaaaaaaaaaaaaaaaaaaaaaaaaugcaucccccccccccccccccccccccccccccccaaaggcucuuuucagagccaccagaauu

SEQ ID NO: 17814 - RNA, 1919 nt, Artificial Sequence
  mRNA product Design e-2 comprising derived and/or modified sequence from HRSV(Memphis-37)__AIY60640.1__F_DSCav1_mut6 (opt11)
gggagacccgugacccggaaguuguacggcuacgcgacuuucccucccacaaacccucgcgcccuuccuuuccuacuugggcccggcagaaagcuuaccauggagcugcccauccucaagaccaacgccaucaccacgauccuggccgcggugacccugugcuucgcgagcucccaaaacaucaccgaggaguucuaccagagcacgugcuccgccgucagcaagggcuaccucggggcccugcgcaccggcugguacaccuccgugaucaccaucgagcugagcaacaucaaggaaaacaagugcaacgggacggacgcaaaggugaagcucaucaagcaggagcuggauaaguacaagaacgcggucacggaccugcagaugcucaugugcuccaccccggccgccggcagcggguccgccaucgcguccggcaucgccgugugcaagguguugcaccuggagggcgaggucaacaagaucaagaacgcccuccuuuccaccaauaaggcuguugugagccuguccaacggggucagcgugcucaccuucaaggugcuggaccugaagaacuacaucgacaagcagcuccugcccauccugaacaagcaguccugcagcauccccaaccccgagacagucauggaguuccagcagaagaacaaccggcuccuggagaucacccgcgaguucuccguuaacgccggggugaccaccccgguaagcacauacaugcugaccaacagcgagcuccugagccugaucaacgacaugcccaucaccaacgaccagaagaagcucaugagcaacaacgugcagaucgugcggcagcaguccuacagcaucaugugcaucaucaaggaggagguccuggcguacguggugcaacugccccucuacggggucaucgacacccccugcuggaagcugcacacguccccgcugugcaccaccaacaccaaggagggcagcaacaucugccucacgcgcaccgaccgggggugguacugcgacaacgcaggcuccgugagcuucuucccccaggccgagaccugcaaggugugcuccaaccgcgucuucugcgacaccaugaacagccugacgcugcccuccgaggugaaccucugcaacaucgacaucuucaaccccaaguacgacuguaagaucaugaccagcaagaccgaugucuccagcuccgugaucaccagccugggcgccauaguguccuguuaugggaagacgaagugcaccgccagcaacaagaacaaaggcaucaucaagaccuucuccaacgggugcgacuacgucagcaacaagggcguggacacaguguccgucggcaacacgcuguacuacgugaacaagcaggaggggcagagccucuacgugaagggcgagccgaucaucaacuucuacgauccccuggucuuccccagcgacgaguucgacgcguccaucagccaagugaacgagaagaucaaccagucccuggccuucauccgcaagagcgacgagcuccugcacaacgugaacgucgggaaguccaccaccaacaucaugaucaccaccaucaucaucgugaucaucgucauccugcuccugcugaucgccgucggccucuuccuguacugcaaggcccggagcacgcccgugacccuguccaaggaccagcugucgggcaucaacaacaucgccuucuccaacugaggacuaguguccaccugucccuccugggcugcuggauugucucguuuuccugccaaauaaacaggaucagcgcuuuacagaucuaaaaaaaaaaaaaaaaaaaaaaaaaaaaaaaaaaaaaaaaaaaaaaaaaaaaaaaaaaaaaaaaugcaucccccccccccccccccccccccccccccccaaaggcucuuuucagagccaccagaauu

SEQ ID NO: 17815 - RNA, 1889 nt, Artificial Sequence
  mRNA product Design e-3 comprising derived and/or modified sequence from HRSV(Memphis-37)__AIY60640.1__F_DSCav1_mut6 (opt1)
gggagacuuucccauucuguagcagaauuugguguugccuguggucuuggucccgcggagaagcuuaccauggagcugcccauccucaagaccaacgccaucaccacgauccuggccgcggugacccugugcuucgccagcucccagaacaucaccgaggaguucuaccagagcacgugcuccgccgucagcaagggcuaccucggcgcccugcgcaccgggugguacaccagcgugaucaccaucgagcuguccaacaucaaggagaacaagugcaacggcaccgacgccaaggugaagcucaucaagcaggagcuggacaaguacaagaacgcggucacggaccugcagaugcugaugugcagcaccccggccgccggcuccgggagcgcgaucgccuccggcaucgccgucugcaaggugcugcaccucgagggcgaggugaacaagaucaagaacgcccugcuguccaccaacaaggccgucgugagccucuccaacggggugagcguccugaccuucaaggugcuggaccucaagaacuacaucgacaagcagcugcugcccauccugaacaagcagagcugcuccauccccaaccccgagaccgucauggaguuccagcagaagaacaaccgccuccuggagaucacgcgggaguucagcgugaacgcgggcgugaccacccccgucuccaccuacaugcugacgaacagcgagcuccugucccugaucaacgacaugccgaucaccaacgaccagaagaagcucaugagcaacaacgugcagaucgugcgccagcaguccuacagcaucaugugcaucaucaaggaggagguccuggccuacguggugcagcugccccucuacggggucaucgacacccccugcuggaagcugcacaccagcccccugugcacgaccaacaccaaggagggcuccaacaucugccucacccggacggaccgcgggugguacugcgacaacgccggcagcguguccuucuucccgcaggccgagaccugcaaggucugcagcaaccggguguucugcgacaccaugaacucccugacccugcccagcgaggugaaccucugcaacaucgacaucuucaaccccaaguacgacugcaagaucaugacguccaagaccgacgucagcuccagcgugaucaccucccugggcgccaucgugagcugcuacgggaagaccaagugcacggcgagcaacaagaacaagggcaucaucaagaccuucuccaacgggugcgacuacgucagcaacaagggcguggacaccguguccgucggcaacacccuguacuacgugaacaagcaggagggccagagccucuacgugaagggggagcccaucaucaacuucuacgacccgcuggucuuccccuccgacgaguucgacgccagcaucucccaggugaacgagaagaucaaccagagccuggccuucauccggaaguccgacgagcuccugcacaacgugaacgucggcaagagcaccacgaacaucaugaucaccaccaucaucaucgugaucaucgugauccugcugcuccugaucgccgucgggcuguuccucuacugcaaggcccgcuccacccccgugacgcugagcaaggaccagcuguccgggaucaacaacaucgcguucagcaacugaggacuaguguccaccugucccuccugggcugcuggauugucucguuuuccugccaaauaaacaggaucagcgcuuuacagaucuaaaaaaaaaaaaaaaaaaaaaaaaaaaaaaaaaaaaaaaaaaaaaaaaaaaaaaaaaaaaaaaaugcaucccccccccccccccccccccccccccccccaaaggcucuuuucagagccaccagaauu

SEQ ID NO: 17816 - RNA, 1889 nt, Artificial Sequence
  mRNA product Design e-3 comprising derived and/or modified sequence from HRSV(Memphis-37)__AIY60640.1__F_DSCav1_mut6 (opt1)
gggagacuuucccauucuguagcagaauuugguguugccuguggucuuggucccgcggagaagcuuaccauggagcugcccauccucaagaccaacgccaucaccacgauccuggccgcggugacccugugcuucgccagcucccagaacaucaccgaggaguucuaccagagcacgugcuccgccgucagcaagggcuaccucggggcccugcgcaccggcugguacaccuccgugaucaccaucgagcugagcaacaucaaggagaacaagugcaacgggaccgacgccaaggugaagcucaucaagcaggagcuggacaaguacaagaacgcggucacggaccugcagaugcucaugugcuccaccccggccgccggcagcggguccgccaucgcgagcggcaucgccgugugcaaggugcugcaccuggagggcgaggucaacaagaucaagaacgcccuccuguccaccaacaaggccguggugagccuguccaacggggucagcgugcucaccuucaaggugcuggaccugaagaacuacaucgacaagcagcuccugcccauccugaacaagcaguccugcagcauccccaaccccgagacggucauggaguuccagcagaagaacaaccggcuccuggagaucacccgcgaguucuccgugaacgccggcgugaccaccccggucagcacguacaugcugaccaacuccgagcuccugagccugaucaacgacaugcccaucaccaacgaccagaagaagcucaugagcaacaacgugcagaucgugcggcagcaguccuacagcaucaugugcaucaucaaggaggagguccuggcguacguggugcagcugccccucuacggggucaucgacacccccugcuggaagcugcacacguccccgcugugcaccaccaacaccaaggagggcagcaacaucugccucacgcgcaccgaccgggggugguacugcgacaacgccggcuccgugagcuucuucccccaggccgagaccugcaaggugugcuccaaccgcgucuucugcgacaccaugaacagccugacgcugcccuccgaggugaaccucugcaacaucgacaucuucaaccccaaguacgacugcaagaucaugaccagcaagaccgacgucuccagcuccgugaucaccagccugggcgccaucguguccugcuacgggaagacgaagugcaccgccagcaacaagaacaagggcaucaucaagaccuucuccaacgggugcgacuacgucagcaacaagggcguggacaccguguccgucggcaacacgcuguacuacgugaacaagcaggaggggcagagccucuacgugaagggcgagccgaucaucaacuucuacgacccccuggucuuccccagcgacgaguucgacgcguccaucagccaggugaacgagaagaucaaccagucccuggccuucauccgcaagagcgacgagcuccugcacaacgugaacgucgggaaguccaccaccaacaucaugaucaccaccaucaucaucgugaucaucgugauccugcuccugcugaucgccgucggccucuuccuguacugcaaggcccggagcacgcccgugacccuguccaaggaccagcugagcgggaucaacaacaucgccuucuccaacugaggacuaguguccaccugucccuccugggcugcuggauugucucguuuuccugccaaauaaacaggaucagcgcuuuacagaucuaaaaaaaaaaaaaaaaaaaaaaaaaaaaaaaaaaaaaaaaaaaaaaaaaaaaaaaaaaaaaaaaugcaucccccccccccccccccccccccccccccccaaaggcucuuuucagagccaccagaauu

SEQ ID NO: 17817 - RNA, 1889 nt, Artificial Sequence
  mRNA product Design e-3 comprising derived and/or modified sequence from HRSV(Memphis-37)__AIY60640.1__F_DSCav1_mut6 (opt2)
gggagacuuucccauucuguagcagaauuugguguugccuguggucuuggucccgcggagaagcuuaccauggagcuccccauccucaagaccaacgccaucaccaccauccucgccgccgucacccucugcuucgccuccucccagaacaucaccgaggaguucuaccaguccaccugcuccgccgucuccaagggcuaccucggcgcccuccgcaccggcugguacaccuccgucaucaccaucgagcucuccaacaucaaggagaacaagugcaacggcaccgacgccaaggucaagcucaucaagcaggagcucgacaaguacaagaacgccgucaccgaccuccagaugcucaugugcuccacccccgccgccggcuccggcuccgccaucgccuccggcaucgccgucugcaagguccuccaccucgagggcgaggucaacaagaucaagaacgcccuccucuccaccaacaaggccgucgucucccucuccaacggcgucuccguccucaccuucaagguccucgaccucaagaacuacaucgacaagcagcuccuccccauccucaacaagcaguccugcuccauccccaaccccgagaccgucauggaguuccagcagaagaacaaccgccuccucgagaucacccgcgaguucuccgucaacgccggcgucaccacccccgucuccaccuacaugcucaccaacuccgagcuccucucccucaucaacgacaugcccaucaccaacgaccagaagaagcucauguccaacaacguccagaucguccgccagcaguccuacuccaucaugugcaucaucaaggaggagguccucgccuacgucguccagcucccccucuacggcgucaucgacacccccugcuggaagcuccacaccuccccccucugcaccaccaacaccaaggagggcuccaacaucugccucacccgcaccgaccgcggcugguacugcgacaacgccggcuccgucuccuucuucccccaggccgagaccugcaaggucugcuccaaccgcgucuucugcgacaccaugaacucccucacccuccccuccgaggucaaccucugcaacaucgacaucuucaaccccaaguacgacugcaagaucaugaccuccaagaccgacgucuccuccuccgucaucaccucccucggcgccaucgucuccugcuacggcaagaccaagugcaccgccuccaacaagaacaagggcaucaucaagaccuucuccaacggcugcgacuacgucuccaacaagggcgucgacaccgucuccgucggcaacacccucuacuacgucaacaagcaggagggccagucccucuacgucaagggcgagcccaucaucaacuucuacgacccccucgucuuccccuccgacgaguucgacgccuccaucucccaggucaacgagaagaucaaccagucccucgccuucauccgcaaguccgacgagcuccuccacaacgucaacgucggcaaguccaccaccaacaucaugaucaccaccaucaucaucgucaucaucgucauccuccuccuccucaucgccgucggccucuuccucuacugcaaggcccgcuccacccccgucacccucuccaaggaccagcucuccggcaucaacaacaucgccuucuccaacugaggacuaguguccaccugucccuccugggcugcuggauugucucguuuuccugccaaauaaacaggaucagcgcuuuacagaucuaaaaaaaaaaaaaaaaaaaaaaaaaaaaaaaaaaaaaaaaaaaaaaaaaaaaaaaaaaaaaaaaugcaucccccccccccccccccccccccccccccccaaaggcucuuuucagagccaccagaauu

SEQ ID NO: 17818 - RNA, 1889 nt, Artificial Sequence
  mRNA product Design e-3 comprising derived and/or modified sequence from HRSV(Memphis-37)__AIY60640.1__F_DSCav1_mut6 (opt3)
gggagacuuucccauucuguagcagaauuugguguugccuguggucuuggucccgcggagaagcuuaccauggagcugcccauccucaagaccaacgccauuacaacuauacuugcugcagugacgcugugcuucgccagcucccagaauaucaccgaagaguuuuaccaaucuacauguucagcggucaguaaaggcuauuugggggcuuuaagaacuggaugguacaccagcguuauuacaaucgaacuguccaacauuaaggagaauaaaugcaacgguaccgacgccaaggugaaacuaaucaagcaggaacucgauaaguauaaaaaugcaguaacugaccugcagaugcuuauguguucuacuccugccgcuggcucggggucagcaauagccagcggaaucgcugugugcaagguccugcacuuggagggcgaggugaacaaaauuaagaaugcccuccugaguaccaacaaagcgguugugucccugucuaauggugucagcgugcucacguucaagguauuagaucugaagaacuacaucgacaaacagcuuuugccaauucugaauaagcaauccuguucaaucccgaaccccgaaacuguuauggaguuucagcagaaaaauaacaggcuacucgaaauaacccgggaguucagugugaaugcaggggucacaacuccugugagcaccuauaugcugacaaacucugagcuucuguccuugauuaacgauaugccaaucaccaaugaccagaagaaacucaugucaaacaaugugcaaauuguccgccagcagagcuacaguaucaugugcaucauuaaggaagagguucuggccuaugugguacaguuaccccuguacggagugauagauacgccuuguuggaaacuccauacuucuccacuuugcacaaccaacacuaaggaaggcuccaauaucugucugacacgaaccgaccguggcugguacugcgauaacgcugggagcgucucguuuuucccccaagccgagacguguaaggugugcucuaauagaguuuucugcgacaccaugaacuccuugacacuaccuucagaagugaaucuguguaacauugauaucuucaauccaaaauaugacugcaagauaaugacaaguaaaaccgaugucagcuccucugugauuacaagccucggagcaaucguaucauguuacgguaagacuaaaugcaccgcuaguaacaagaauaagggcaucauuaaaacauuuuccaacgggugugacuauguuagcaauaagggaguggacaccgucucugugggcaacacucuguacuaugucaacaaacaggagggucagucacuuuacgugaagggggagccgaucauuaauuucuaugauccccugguuuuuccuagugacgaauuugaugccagcauaucccaagugaacgagaaaaucaaucagucuuuggcguuuauuaggaagucggacgaacuccugcacaacguaaaugucggaaagagcacgacaaacaucaugaucaccacuauuauaaucgugauuaucguuauuuuacugcuacucaucgccgugggccuguuccuuuacugcaaagcacgguccaccccagucacauugucaaaggaucagcugaguggcauaaauaacaucgcuuucucuaauugaggacuaguguccaccugucccuccugggcugcuggauugucucguuuuccugccaaauaaacaggaucagcgcuuuacagaucuaaaaaaaaaaaaaaaaaaaaaaaaaaaaaaaaaaaaaaaaaaaaaaaaaaaaaaaaaaaaaaaaugcaucccccccccccccccccccccccccccccccaaaggcucuuuucagagccaccagaauu

SEQ ID NO: 17819 - RNA, 1889 nt, Artificial Sequence
  mRNA product Design e-3 comprising derived and/or modified sequence from HRSV(Memphis-37)__AIY60640.1__F_DSCav1_mut6 (opt4)
gggagacuuucccauucuguagcagaauuugguguugccuguggucuuggucccgcggagaagcuuaccauggagcugcccauccugaagaccaacgccaucaccaccauccuggccgccgugacccugugcuucgccagcagccagaacaucaccgaggaguucuaccagagcaccugcagcgccgugagcaagggcuaccugggcgcccugagaaccggcugguacaccagcgugaucaccaucgagcugagcaacaucaaggagaacaagugcaacggcaccgacgccaaggugaagcugaucaagcaggagcuggacaaguacaagaacgccgugaccgaccugcagaugcugaugugcagcacccccgccgccggcagcggcagcgccaucgccagcggcaucgccgugugcaaggugcugcaccuggagggcgaggugaacaagaucaagaacgcccugcugagcaccaacaaggccguggugagccugagcaacggcgugagcgugcugaccuucaaggugcuggaccugaagaacuacaucgacaagcagcugcugcccauccugaacaagcagagcugcagcauccccaaccccgagaccgugauggaguuccagcagaagaacaacagacugcuggagaucaccagagaguucagcgugaacgccggcgugaccacccccgugagcaccuacaugcugaccaacagcgagcugcugagccugaucaacgacaugcccaucaccaacgaccagaagaagcugaugagcaacaacgugcagaucgugagacagcagagcuacagcaucaugugcaucaucaaggaggaggugcuggccuacguggugcagcugccccuguacggcgugaucgacacccccugcuggaagcugcacaccagcccccugugcaccaccaacaccaaggagggcagcaacaucugccugaccagaaccgacagaggcugguacugcgacaacgccggcagcgugagcuucuucccccaggccgagaccugcaaggugugcagcaacagaguguucugcgacaccaugaacagccugacccugcccagcgaggugaaccugugcaacaucgacaucuucaaccccaaguacgacugcaagaucaugaccagcaagaccgacgugagcagcagcgugaucaccagccugggcgccaucgugagcugcuacggcaagaccaagugcaccgccagcaacaagaacaagggcaucaucaagaccuucagcaacggcugcgacuacgugagcaacaagggcguggacaccgugagcgugggcaacacccuguacuacgugaacaagcaggagggccagagccuguacgugaagggcgagcccaucaucaacuucuacgacccccugguguuccccagcgacgaguucgacgccagcaucagccaggugaacgagaagaucaaccagagccuggccuucaucagaaagagcgacgagcugcugcacaacgugaacgugggcaagagcaccaccaacaucaugaucaccaccaucaucaucgugaucaucgugauccugcugcugcugaucgccgugggccuguuccuguacugcaaggccagaagcacccccgugacccugagcaaggaccagcugagcggcaucaacaacaucgccuucagcaacugaggacuaguguccaccugucccuccugggcugcuggauugucucguuuuccugccaaauaaacaggaucagcgcuuuacagaucuaaaaaaaaaaaaaaaaaaaaaaaaaaaaaaaaaaaaaaaaaaaaaaaaaaaaaaaaaaaaaaaaugcaucccccccccccccccccccccccccccccccaaaggcucuuuucagagccaccagaauu

SEQ ID NO: 17820 - RNA, 1889 nt, Artificial Sequence
  mRNA product Design e-3 comprising derived and/or modified sequence from HRSV(Memphis-37)__AIY60640.1__F_DSCav1_mut6 (opt5)
gggagacuuucccauucuguagcagaauuugguguugccuguggucuuggucccgcggagaagcuuaccauggagcugcccauccucaagaccaacgccauuacaacgauccuggcugccgugacccuuugcuucgcgagcucccagaauauuacagaagaguuuuaccaaucuaccuguagcgcugucuccaaaggcuaucugggggcccucagaacaggaugguacaccucuguuaucacaauugaacugagcaacaucaaggagaauaaaugcaacggcaccgacgccaaggugaaacuuaucaagcaggaacuggauaaguauaaaaaugcugugacggaccuccagaugcugauguguuccaccccugccgcugggucuggaagcgccauugcguccggcaucgccgucugcaaggugcugcaccucgagggggagguuaacaaaauuaagaaugcucugcuuagcacaaacaaagccguggucucucuguccaauggagugagcguucucaccuucaaggugcuggaucuuaagaacuacaucgacaaacagcugcucccgauucugaauaagcaaucuuguuccauccccaacccugaaacagucauggaguuucagcagaaaaauaaccggcugcucgaaauuacccgcgaguucagcgugaaugcuggcgugacgacacccgucucuaccuauaugcugacaaacuccgagcuucugagccucaucaacgauaugccuaucaccaaugaccagaagaaacugauguccaacaauguucaaauugugagacagcagucuuacagcaucaugugcauuaucaaggaagaggugcuugccuaugucgugcagcugccccucuacggcguuauugauaccccuuguuggaaacugcauacauccccgcugugcacgaccaacacaaaggaagggagcaauaucugucucacccggacagaccgcggaugguacugcgauaacgcgggcucuguguccuuuuucccccaagccgagaccuguaaggucugcagcaauagaguguuuugcgacacgaugaacucucugacacuuccuagcgaaguuaaucuguguaacaucgauauuuucaaucccaaauaugacugcaagaucaugaccuccaaaaccgaugugucuagcuccgucauuacaagccucggggcuaucgugucuuguuacggaaagaccaaaugcacagccuccaacaagaauaagggcauuaucaaaacguuuagcaacgggugugacuaugucucuaauaagggaguggacaccguuuccgugggcaacacacuguacuaugucaacaaacaggagggccagagccuuuacgugaagggggagccuaucauuaauuucuaugauccccugguuuuuccguccgacgaauuugaugcuucuaucagccaagugaacgagaaaauuaaucagucccucgccuucauccggaagucugacgaacugcugcacaacgucaaugugggaaagagcaccacaaacauuaugaucaccacgauuaucaucgugauuaucguuauucuccugcuucugaucgccgucggccucuuccuguacugcaaagcucgcuccaccccugugacacugagcaaggaucagcuuucugggauuaauaacaucgcguucuccaauugaggacuaguguccaccugucccuccugggcugcuggauugucucguuuuccugccaaauaaacaggaucagcgcuuuacagaucuaaaaaaaaaaaaaaaaaaaaaaaaaaaaaaaaaaaaaaaaaaaaaaaaaaaaaaaaaaaaaaaaugcaucccccccccccccccccccccccccccccccaaaggcucuuuucagagccaccagaauu

SEQ ID NO: 17821 - RNA, 1889 nt, Artificial Sequence
  mRNA product Design e-3 comprising derived and/or modified sequence from HRSV(Memphis-37)__AIY60640.1__F_DSCav1_mut6 (opt6)
gggagacuuucccauucuguagcagaauuugguguugccuguggucuuggucccgcggagaagcuuaccauggaacuaccaauuuuaaaaacaaacgcaauuacaacuauacucgcagcaguaacauuauguuucgccucaucccaaaacauaacagaagaauuuuaccaaucaacaugcagcgcaguaucaaaaggauaucucggagcauuacgaacagguugguacacaucuguaaucacuauagaacuaucaaacauaaaagaaaacaaaugcaauggaaccgacgcaaaaguaaaauuaauaaaacaagaacucgauaaauacaaaaaugcaguaacagaccuccaaaugcucauguguucaacaccagccgcaggaucagguuccgccauagcaucuggcauagcaguaugcaaaguacuccacuuagaaggagaaguuaacaaaauaaaaaacgcacuauuaucaacaaacaaagcaguaguaucccucucaaacggagucucaguauuaacauucaaaguauuagaccuaaaaaacuacauagacaaacaacuacuuccaauacucaacaaacaaucaugcucaauaccaaacccagaaaccguaauggaauuucaacaaaaaaacaaccgacuacuagaaaucacacgagaauuuucaguaaacgccggugucacaacuccaguaucaacuuauauguuaaccaacucagaacuauuaucauuaauaaacgauaugcccauaacuaacgaccaaaaaaaauuaaugucaaacaacguacaaauaguacgccaacaaaguuacucaauaaugugcaucauaaaagaagaaguauuagcguacguuguacaacuaccucuauacggagucauagacacaccaugcuggaaacuucacacaucaccacuauguacaacaaacacaaaagaaggcaguaacauaugccuaacaagaacagaccguggaugguauugugacaacgcuggaucuguaucauucuucccucaagcagaaaccuguaaaguuugcucaaacagagucuucugugacacaaugaacucucuaacacuaccuuccgaagugaaccucuguaacauagacauauucaauccaaaauaugauugcaaaauaaugacuucaaaaacagauguaucauccucuguuauaacaucauuaggcgccauaguuucaugcuacggaaaaacuaaaugcacagcaucaaacaaaaacaaaggaauaauaaaaaccuucucaaauggaugcgacuacguaagcaacaaaggcguagacacaguaucaguagguaauacauuauacuacguaaacaaacaagaaggacaaucacuuuauguuaaaggagaaccuauaauaaacuucuacgacccacuuguauuuccauccgaugaauuugacgcaucuauaucacaagucaacgaaaaaauaaaccaaucauuagcauucauucgaaaauccgaugaacuacuccauaacguaaaugucggaaaaucaacaaccaacauaaugaucacaacaauaaucauagugauaauaguaauacuccuacuacuaaucgcaguaggucuauuccuauauuguaaagcaagaucuacuccaguuacacucucuaaagaccaauuaagcgguaucaacaacaucgccuucagcaauuaaggacuaguguccaccugucccuccugggcugcuggauugucucguuuuccugccaaauaaacaggaucagcgcuuuacagaucuaaaaaaaaaaaaaaaaaaaaaaaaaaaaaaaaaaaaaaaaaaaaaaaaaaaaaaaaaaaaaaaaugcaucccccccccccccccccccccccccccccccaaaggcucuuuucagagccaccagaauu

SEQ ID NO: 17822 - RNA, 1889 nt, Artificial Sequence
  mRNA product Design e-3 comprising derived and/or modified sequence from HRSV(Memphis-37)__AIY60640.1__F_DSCav1_mut6 (opt11)
gggagacuuucccauucuguagcagaauuugguguugccuguggucuuggucccgcggagaagcuuaccauggagcugcccauccucaagaccaacgccaucaccacgauccuggccgcggugacccugugcuucgcgagcucccaaaacaucaccgaggaguucuaccagagcacgugcuccgccgucagcaagggcuaccucggggcccugcgcaccggcugguacaccuccgugaucaccaucgagcugagcaacaucaaggaaaacaagugcaacgggacggacgcaaaggugaagcucaucaagcaggagcuggauaaguacaagaacgcggucacggaccugcagaugcucaugugcuccaccccggccgccggcagcggguccgccaucgcguccggcaucgccgugugcaagguguugcaccuggagggcgaggucaacaagaucaagaacgcccuccuuuccaccaauaaggcuguugugagccuguccaacggggucagcgugcucaccuucaaggugcuggaccugaagaacuacaucgacaagcagcuccugcccauccugaacaagcaguccugcagcauccccaaccccgagacagucauggaguuccagcagaagaacaaccggcuccuggagaucacccgcgaguucuccguuaacgccggggugaccaccccgguaagcacauacaugcugaccaacagcgagcuccugagccugaucaacgacaugcccaucaccaacgaccagaagaagcucaugagcaacaacgugcagaucgugcggcagcaguccuacagcaucaugugcaucaucaaggaggagguccuggcguacguggugcaacugccccucuacggggucaucgacacccccugcuggaagcugcacacguccccgcugugcaccaccaacaccaaggagggcagcaacaucugccucacgcgcaccgaccgggggugguacugcgacaacgcaggcuccgugagcuucuucccccaggccgagaccugcaaggugugcuccaaccgcgucuucugcgacaccaugaacagccugacgcugcccuccgaggugaaccucugcaacaucgacaucuucaaccccaaguacgacuguaagaucaugaccagcaagaccgaugucuccagcuccgugaucaccagccugggcgccauaguguccuguuaugggaagacgaagugcaccgccagcaacaagaacaaaggcaucaucaagaccuucuccaacgggugcgacuacgucagcaacaagggcguggacacaguguccgucggcaacacgcuguacuacgugaacaagcaggaggggcagagccucuacgugaagggcgagccgaucaucaacuucuacgauccccuggucuuccccagcgacgaguucgacgcguccaucagccaagugaacgagaagaucaaccagucccuggccuucauccgcaagagcgacgagcuccugcacaacgugaacgucgggaaguccaccaccaacaucaugaucaccaccaucaucaucgugaucaucgucauccugcuccugcugaucgccgucggccucuuccuguacugcaaggcccggagcacgcccgugacccuguccaaggaccagcugucgggcaucaacaacaucgccuucuccaacugaggacuaguguccaccugucccuccugggcugcuggauugucucguuuuccugccaaauaaacaggaucagcgcuuuacagaucuaaaaaaaaaaaaaaaaaaaaaaaaaaaaaaaaaaaaaaaaaaaaaaaaaaaaaaaaaaaaaaaaugcaucccccccccccccccccccccccccccccccaaaggcucuuuucagagccaccagaauu

SEQ ID NO: 17823 - RNA, 1943 nt, Artificial Sequence
  mRNA product Design e-4 comprising derived and/or modified sequence from HRSV(Memphis-37)__AIY60640.1__F_DSCav1_mut6 (opt1)
gggagacuccugucgggcggaaguaggaggaguagaguuuaaaaacaguacucuuuuuccgguucgggacguaguugaagcaacgacaagccggauaaccgcucuugagacaggaagcuuaccauggagcugcccauccucaagaccaacgccaucaccacgauccuggccgcggugacccugugcuucgccagcucccagaacaucaccgaggaguucuaccagagcacgugcuccgccgucagcaagggcuaccucggcgcccugcgcaccgggugguacaccagcgugaucaccaucgagcuguccaacaucaaggagaacaagugcaacggcaccgacgccaaggugaagcucaucaagcaggagcuggacaaguacaagaacgcggucacggaccugcagaugcugaugugcagcaccccggccgccggcuccgggagcgcgaucgccuccggcaucgccgucugcaaggugcugcaccucgagggcgaggugaacaagaucaagaacgcccugcuguccaccaacaaggccgucgugagccucuccaacggggugagcguccugaccuucaaggugcuggaccucaagaacuacaucgacaagcagcugcugcccauccugaacaagcagagcugcuccauccccaaccccgagaccgucauggaguuccagcagaagaacaaccgccuccuggagaucacgcgggaguucagcgugaacgcgggcgugaccacccccgucuccaccuacaugcugacgaacagcgagcuccugucccugaucaacgacaugccgaucaccaacgaccagaagaagcucaugagcaacaacgugcagaucgugcgccagcaguccuacagcaucaugugcaucaucaaggaggagguccuggccuacguggugcagcugccccucuacggggucaucgacacccccugcuggaagcugcacaccagcccccugugcacgaccaacaccaaggagggcuccaacaucugccucacccggacggaccgcgggugguacugcgacaacgccggcagcguguccuucuucccgcaggccgagaccugcaaggucugcagcaaccggguguucugcgacaccaugaacucccugacccugcccagcgaggugaaccucugcaacaucgacaucuucaaccccaaguacgacugcaagaucaugacguccaagaccgacgucagcuccagcgugaucaccucccugggcgccaucgugagcugcuacgggaagaccaagugcacggcgagcaacaagaacaagggcaucaucaagaccuucuccaacgggugcgacuacgucagcaacaagggcguggacaccguguccgucggcaacacccuguacuacgugaacaagcaggagggccagagccucuacgugaagggggagcccaucaucaacuucuacgacccgcuggucuuccccuccgacgaguucgacgccagcaucucccaggugaacgagaagaucaaccagagccuggccuucauccggaaguccgacgagcuccugcacaacgugaacgucggcaagagcaccacgaacaucaugaucaccaccaucaucaucgugaucaucgugauccugcugcuccugaucgccgucgggcuguuccucuacugcaaggcccgcuccacccccgugacgcugagcaaggaccagcuguccgggaucaacaacaucgcguucagcaacugaggacuaguguccaccugucccuccugggcugcuggauugucucguuuuccugccaaauaaacaggaucagcgcuuuacagaucuaaaaaaaaaaaaaaaaaaaaaaaaaaaaaaaaaaaaaaaaaaaaaaaaaaaaaaaaaaaaaaaaugcaucccccccccccccccccccccccccccccccaaaggcucuuuucagagccaccagaauu

SEQ ID NO: 17824 - RNA, 1943 nt, Artificial Sequence
  mRNA product Design e-4 comprising derived and/or modified sequence from HRSV(Memphis-37)__AIY60640.1__F_DSCav1_mut6 (opt1)
gggagacuccugucgggcggaaguaggaggaguagaguuuaaaaacaguacucuuuuuccgguucgggacguaguugaagcaacgacaagccggauaaccgcucuugagacaggaagcuuaccauggagcugcccauccucaagaccaacgccaucaccacgauccuggccgcggugacccugugcuucgccagcucccagaacaucaccgaggaguucuaccagagcacgugcuccgccgucagcaagggcuaccucggggcccugcgcaccggcugguacaccuccgugaucaccaucgagcugagcaacaucaaggagaacaagugcaacgggaccgacgccaaggugaagcucaucaagcaggagcuggacaaguacaagaacgcggucacggaccugcagaugcucaugugcuccaccccggccgccggcagcggguccgccaucgcgagcggcaucgccgugugcaaggugcugcaccuggagggcgaggucaacaagaucaagaacgcccuccuguccaccaacaaggccguggugagccuguccaacggggucagcgugcucaccuucaaggugcuggaccugaagaacuacaucgacaagcagcuccugcccauccugaacaagcaguccugcagcauccccaaccccgagacggucauggaguuccagcagaagaacaaccggcuccuggagaucacccgcgaguucuccgugaacgccggcgugaccaccccggucagcacguacaugcugaccaacuccgagcuccugagccugaucaacgacaugcccaucaccaacgaccagaagaagcucaugagcaacaacgugcagaucgugcggcagcaguccuacagcaucaugugcaucaucaaggaggagguccuggcguacguggugcagcugccccucuacggggucaucgacacccccugcuggaagcugcacacguccccgcugugcaccaccaacaccaaggagggcagcaacaucugccucacgcgcaccgaccgggggugguacugcgacaacgccggcuccgugagcuucuucccccaggccgagaccugcaaggugugcuccaaccgcgucuucugcgacaccaugaacagccugacgcugcccuccgaggugaaccucugcaacaucgacaucuucaaccccaaguacgacugcaagaucaugaccagcaagaccgacgucuccagcuccgugaucaccagccugggcgccaucguguccugcuacgggaagacgaagugcaccgccagcaacaagaacaagggcaucaucaagaccuucuccaacgggugcgacuacgucagcaacaagggcguggacaccguguccgucggcaacacgcuguacuacgugaacaagcaggaggggcagagccucuacgugaagggcgagccgaucaucaacuucuacgacccccuggucuuccccagcgacgaguucgacgcguccaucagccaggugaacgagaagaucaaccagucccuggccuucauccgcaagagcgacgagcuccugcacaacgugaacgucgggaaguccaccaccaacaucaugaucaccaccaucaucaucgugaucaucgugauccugcuccugcugaucgccgucggccucuuccuguacugcaaggcccggagcacgcccgugacccuguccaaggaccagcugagcgggaucaacaacaucgccuucuccaacugaggacuaguguccaccugucccuccugggcugcuggauugucucguuuuccugccaaauaaacaggaucagcgcuuuacagaucuaaaaaaaaaaaaaaaaaaaaaaaaaaaaaaaaaaaaaaaaaaaaaaaaaaaaaaaaaaaaaaaaugcaucccccccccccccccccccccccccccccccaaaggcucuuuucagagccaccagaauu

SEQ ID NO: 17825 - RNA, 1943 nt, Artificial Sequence
  mRNA product Design e-4 comprising derived and/or modified sequence from HRSV(Memphis-37)__AIY60640.1__F_DSCav1_mut6 (opt2)
gggagacuccugucgggcggaaguaggaggaguagaguuuaaaaacaguacucuuuuuccgguucgggacguaguugaagcaacgacaagccggauaaccgcucuugagacaggaagcuuaccauggagcuccccauccucaagaccaacgccaucaccaccauccucgccgccgucacccucugcuucgccuccucccagaacaucaccgaggaguucuaccaguccaccugcuccgccgucuccaagggcuaccucggcgcccuccgcaccggcugguacaccuccgucaucaccaucgagcucuccaacaucaaggagaacaagugcaacggcaccgacgccaaggucaagcucaucaagcaggagcucgacaaguacaagaacgccgucaccgaccuccagaugcucaugugcuccacccccgccgccggcuccggcuccgccaucgccuccggcaucgccgucugcaagguccuccaccucgagggcgaggucaacaagaucaagaacgcccuccucuccaccaacaaggccgucgucucccucuccaacggcgucuccguccucaccuucaagguccucgaccucaagaacuacaucgacaagcagcuccuccccauccucaacaagcaguccugcuccauccccaaccccgagaccgucauggaguuccagcagaagaacaaccgccuccucgagaucacccgcgaguucuccgucaacgccggcgucaccacccccgucuccaccuacaugcucaccaacuccgagcuccucucccucaucaacgacaugcccaucaccaacgaccagaagaagcucauguccaacaacguccagaucguccgccagcaguccuacuccaucaugugcaucaucaaggaggagguccucgccuacgucguccagcucccccucuacggcgucaucgacacccccugcuggaagcuccacaccuccccccucugcaccaccaacaccaaggagggcuccaacaucugccucacccgcaccgaccgcggcugguacugcgacaacgccggcuccgucuccuucuucccccaggccgagaccugcaaggucugcuccaaccgcgucuucugcgacaccaugaacucccucacccuccccuccgaggucaaccucugcaacaucgacaucuucaaccccaaguacgacugcaagaucaugaccuccaagaccgacgucuccuccuccgucaucaccucccucggcgccaucgucuccugcuacggcaagaccaagugcaccgccuccaacaagaacaagggcaucaucaagaccuucuccaacggcugcgacuacgucuccaacaagggcgucgacaccgucuccgucggcaacacccucuacuacgucaacaagcaggagggccagucccucuacgucaagggcgagcccaucaucaacuucuacgacccccucgucuuccccuccgacgaguucgacgccuccaucucccaggucaacgagaagaucaaccagucccucgccuucauccgcaaguccgacgagcuccuccacaacgucaacgucggcaaguccaccaccaacaucaugaucaccaccaucaucaucgucaucaucgucauccuccuccuccucaucgccgucggccucuuccucuacugcaaggcccgcuccacccccgucacccucuccaaggaccagcucuccggcaucaacaacaucgccuucuccaacugaggacuaguguccaccugucccuccugggcugcuggauugucucguuuuccugccaaauaaacaggaucagcgcuuuacagaucuaaaaaaaaaaaaaaaaaaaaaaaaaaaaaaaaaaaaaaaaaaaaaaaaaaaaaaaaaaaaaaaaugcaucccccccccccccccccccccccccccccccaaaggcucuuuucagagccaccagaauu

SEQ ID NO: 17826 - RNA, 1943 nt, Artificial Sequence
  mRNA product Design e-4 comprising derived and/or modified sequence from HRSV(Memphis-37)__AIY60640.1__F_DSCav1_mut6 (opt3)
gggagacuccugucgggcggaaguaggaggaguagaguuuaaaaacaguacucuuuuuccgguucgggacguaguugaagcaacgacaagccggauaaccgcucuugagacaggaagcuuaccauggagcugcccauccucaagaccaacgccauuacaacuauacuugcugcagugacgcugugcuucgccagcucccagaauaucaccgaagaguuuuaccaaucuacauguucagcggucaguaaaggcuauuugggggcuuuaagaacuggaugguacaccagcguuauuacaaucgaacuguccaacauuaaggagaauaaaugcaacgguaccgacgccaaggugaaacuaaucaagcaggaacucgauaaguauaaaaaugcaguaacugaccugcagaugcuuauguguucuacuccugccgcuggcucggggucagcaauagccagcggaaucgcugugugcaagguccugcacuuggagggcgaggugaacaaaauuaagaaugcccuccugaguaccaacaaagcgguugugucccugucuaauggugucagcgugcucacguucaagguauuagaucugaagaacuacaucgacaaacagcuuuugccaauucugaauaagcaauccuguucaaucccgaaccccgaaacuguuauggaguuucagcagaaaaauaacaggcuacucgaaauaacccgggaguucagugugaaugcaggggucacaacuccugugagcaccuauaugcugacaaacucugagcuucuguccuugauuaacgauaugccaaucaccaaugaccagaagaaacucaugucaaacaaugugcaaauuguccgccagcagagcuacaguaucaugugcaucauuaaggaagagguucuggccuaugugguacaguuaccccuguacggagugauagauacgccuuguuggaaacuccauacuucuccacuuugcacaaccaacacuaaggaaggcuccaauaucugucugacacgaaccgaccguggcugguacugcgauaacgcugggagcgucucguuuuucccccaagccgagacguguaaggugugcucuaauagaguuuucugcgacaccaugaacuccuugacacuaccuucagaagugaaucuguguaacauugauaucuucaauccaaaauaugacugcaagauaaugacaaguaaaaccgaugucagcuccucugugauuacaagccucggagcaaucguaucauguuacgguaagacuaaaugcaccgcuaguaacaagaauaagggcaucauuaaaacauuuuccaacgggugugacuauguuagcaauaagggaguggacaccgucucugugggcaacacucuguacuaugucaacaaacaggagggucagucacuuuacgugaagggggagccgaucauuaauuucuaugauccccugguuuuuccuagugacgaauuugaugccagcauaucccaagugaacgagaaaaucaaucagucuuuggcguuuauuaggaagucggacgaacuccugcacaacguaaaugucggaaagagcacgacaaacaucaugaucaccacuauuauaaucgugauuaucguuauuuuacugcuacucaucgccgugggccuguuccuuuacugcaaagcacgguccaccccagucacauugucaaaggaucagcugaguggcauaaauaacaucgcuuucucuaauugaggacuaguguccaccugucccuccugggcugcuggauugucucguuuuccugccaaauaaacaggaucagcgcuuuacagaucuaaaaaaaaaaaaaaaaaaaaaaaaaaaaaaaaaaaaaaaaaaaaaaaaaaaaaaaaaaaaaaaaugcaucccccccccccccccccccccccccccccccaaaggcucuuuucagagccaccagaauu

SEQ ID NO: 17827 - RNA, 1943 nt, Artificial Sequence
  mRNA product Design e-4 comprising derived and/or modified sequence from HRSV(Memphis-37)__AIY60640.1__F_DSCav1_mut6 (opt4)
gggagacuccugucgggcggaaguaggaggaguagaguuuaaaaacaguacucuuuuuccgguucgggacguaguugaagcaacgacaagccggauaaccgcucuugagacaggaagcuuaccauggagcugcccauccugaagaccaacgccaucaccaccauccuggccgccgugacccugugcuucgccagcagccagaacaucaccgaggaguucuaccagagcaccugcagcgccgugagcaagggcuaccugggcgcccugagaaccggcugguacaccagcgugaucaccaucgagcugagcaacaucaaggagaacaagugcaacggcaccgacgccaaggugaagcugaucaagcaggagcuggacaaguacaagaacgccgugaccgaccugcagaugcugaugugcagcacccccgccgccggcagcggcagcgccaucgccagcggcaucgccgugugcaaggugcugcaccuggagggcgaggugaacaagaucaagaacgcccugcugagcaccaacaaggccguggugagccugagcaacggcgugagcgugcugaccuucaaggugcuggaccugaagaacuacaucgacaagcagcugcugcccauccugaacaagcagagcugcagcauccccaaccccgagaccgugauggaguuccagcagaagaacaacagacugcuggagaucaccagagaguucagcgugaacgccggcgugaccacccccgugagcaccuacaugcugaccaacagcgagcugcugagccugaucaacgacaugcccaucaccaacgaccagaagaagcugaugagcaacaacgugcagaucgugagacagcagagcuacagcaucaugugcaucaucaaggaggaggugcuggccuacguggugcagcugccccuguacggcgugaucgacacccccugcuggaagcugcacaccagcccccugugcaccaccaacaccaaggagggcagcaacaucugccugaccagaaccgacagaggcugguacugcgacaacgccggcagcgugagcuucuucccccaggccgagaccugcaaggugugcagcaacagaguguucugcgacaccaugaacagccugacccugcccagcgaggugaaccugugcaacaucgacaucuucaaccccaaguacgacugcaagaucaugaccagcaagaccgacgugagcagcagcgugaucaccagccugggcgccaucgugagcugcuacggcaagaccaagugcaccgccagcaacaagaacaagggcaucaucaagaccuucagcaacggcugcgacuacgugagcaacaagggcguggacaccgugagcgugggcaacacccuguacuacgugaacaagcaggagggccagagccuguacgugaagggcgagcccaucaucaacuucuacgacccccugguguuccccagcgacgaguucgacgccagcaucagccaggugaacgagaagaucaaccagagccuggccuucaucagaaagagcgacgagcugcugcacaacgugaacgugggcaagagcaccaccaacaucaugaucaccaccaucaucaucgugaucaucgugauccugcugcugcugaucgccgugggccuguuccuguacugcaaggccagaagcacccccgugacccugagcaaggaccagcugagcggcaucaacaacaucgccuucagcaacugaggacuaguguccaccugucccuccugggcugcuggauugucucguuuuccugccaaauaaacaggaucagcgcuuuacagaucuaaaaaaaaaaaaaaaaaaaaaaaaaaaaaaaaaaaaaaaaaaaaaaaaaaaaaaaaaaaaaaaaugcaucccccccccccccccccccccccccccccccaaaggcucuuuucagagccaccagaauu

SEQ ID NO: 17828 - RNA, 1943 nt, Artificial Sequence
  mRNA product Design e-4 comprising derived and/or modified sequence from HRSV(Memphis-37)__AIY60640.1__F_DSCav1_mut6 (opt5)
gggagacuccugucgggcggaaguaggaggaguagaguuuaaaaacaguacucuuuuuccgguucgggacguaguugaagcaacgacaagccggauaaccgcucuugagacaggaagcuuaccauggagcugcccauccucaagaccaacgccauuacaacgauccuggcugccgugacccuuugcuucgcgagcucccagaauauuacagaagaguuuuaccaaucuaccuguagcgcugucuccaaaggcuaucugggggcccucagaacaggaugguacaccucuguuaucacaauugaacugagcaacaucaaggagaauaaaugcaacggcaccgacgccaaggugaaacuuaucaagcaggaacuggauaaguauaaaaaugcugugacggaccuccagaugcugauguguuccaccccugccgcugggucuggaagcgccauugcguccggcaucgccgucugcaaggugcugcaccucgagggggagguuaacaaaauuaagaaugcucugcuuagcacaaacaaagccguggucucucuguccaauggagugagcguucucaccuucaaggugcuggaucuuaagaacuacaucgacaaacagcugcucccgauucugaauaagcaaucuuguuccauccccaacccugaaacagucauggaguuucagcagaaaaauaaccggcugcucgaaauuacccgcgaguucagcgugaaugcuggcgugacgacacccgucucuaccuauaugcugacaaacuccgagcuucugagccucaucaacgauaugccuaucaccaaugaccagaagaaacugauguccaacaauguucaaauugugagacagcagucuuacagcaucaugugcauuaucaaggaagaggugcuugccuaugucgugcagcugccccucuacggcguuauugauaccccuuguuggaaacugcauacauccccgcugugcacgaccaacacaaaggaagggagcaauaucugucucacccggacagaccgcggaugguacugcgauaacgcgggcucuguguccuuuuucccccaagccgagaccuguaaggucugcagcaauagaguguuuugcgacacgaugaacucucugacacuuccuagcgaaguuaaucuguguaacaucgauauuuucaaucccaaauaugacugcaagaucaugaccuccaaaaccgaugugucuagcuccgucauuacaagccucggggcuaucgugucuuguuacggaaagaccaaaugcacagccuccaacaagaauaagggcauuaucaaaacguuuagcaacgggugugacuaugucucuaauaagggaguggacaccguuuccgugggcaacacacuguacuaugucaacaaacaggagggccagagccuuuacgugaagggggagccuaucauuaauuucuaugauccccugguuuuuccguccgacgaauuugaugcuucuaucagccaagugaacgagaaaauuaaucagucccucgccuucauccggaagucugacgaacugcugcacaacgucaaugugggaaagagcaccacaaacauuaugaucaccacgauuaucaucgugauuaucguuauucuccugcuucugaucgccgucggccucuuccuguacugcaaagcucgcuccaccccugugacacugagcaaggaucagcuuucugggauuaauaacaucgcguucuccaauugaggacuaguguccaccugucccuccugggcugcuggauugucucguuuuccugccaaauaaacaggaucagcgcuuuacagaucuaaaaaaaaaaaaaaaaaaaaaaaaaaaaaaaaaaaaaaaaaaaaaaaaaaaaaaaaaaaaaaaaugcaucccccccccccccccccccccccccccccccaaaggcucuuuucagagccaccagaauu

SEQ ID NO: 17829 - RNA, 1943 nt, Artificial Sequence
  mRNA product Design e-4 comprising derived and/or modified sequence from HRSV(Memphis-37)__AIY60640.1__F_DSCav1_mut6 (opt6)
gggagacuccugucgggcggaaguaggaggaguagaguuuaaaaacaguacucuuuuuccgguucgggacguaguugaagcaacgacaagccggauaaccgcucuugagacaggaagcuuaccauggaacuaccaauuuuaaaaacaaacgcaauuacaacuauacucgcagcaguaacauuauguuucgccucaucccaaaacauaacagaagaauuuuaccaaucaacaugcagcgcaguaucaaaaggauaucucggagcauuacgaacagguugguacacaucuguaaucacuauagaacuaucaaacauaaaagaaaacaaaugcaauggaaccgacgcaaaaguaaaauuaauaaaacaagaacucgauaaauacaaaaaugcaguaacagaccuccaaaugcucauguguucaacaccagccgcaggaucagguuccgccauagcaucuggcauagcaguaugcaaaguacuccacuuagaaggagaaguuaacaaaauaaaaaacgcacuauuaucaacaaacaaagcaguaguaucccucucaaacggagucucaguauuaacauucaaaguauuagaccuaaaaaacuacauagacaaacaacuacuuccaauacucaacaaacaaucaugcucaauaccaaacccagaaaccguaauggaauuucaacaaaaaaacaaccgacuacuagaaaucacacgagaauuuucaguaaacgccggugucacaacuccaguaucaacuuauauguuaaccaacucagaacuauuaucauuaauaaacgauaugcccauaacuaacgaccaaaaaaaauuaaugucaaacaacguacaaauaguacgccaacaaaguuacucaauaaugugcaucauaaaagaagaaguauuagcguacguuguacaacuaccucuauacggagucauagacacaccaugcuggaaacuucacacaucaccacuauguacaacaaacacaaaagaaggcaguaacauaugccuaacaagaacagaccguggaugguauugugacaacgcuggaucuguaucauucuucccucaagcagaaaccuguaaaguuugcucaaacagagucuucugugacacaaugaacucucuaacacuaccuuccgaagugaaccucuguaacauagacauauucaauccaaaauaugauugcaaaauaaugacuucaaaaacagauguaucauccucuguuauaacaucauuaggcgccauaguuucaugcuacggaaaaacuaaaugcacagcaucaaacaaaaacaaaggaauaauaaaaaccuucucaaauggaugcgacuacguaagcaacaaaggcguagacacaguaucaguagguaauacauuauacuacguaaacaaacaagaaggacaaucacuuuauguuaaaggagaaccuauaauaaacuucuacgacccacuuguauuuccauccgaugaauuugacgcaucuauaucacaagucaacgaaaaaauaaaccaaucauuagcauucauucgaaaauccgaugaacuacuccauaacguaaaugucggaaaaucaacaaccaacauaaugaucacaacaauaaucauagugauaauaguaauacuccuacuacuaaucgcaguaggucuauuccuauauuguaaagcaagaucuacuccaguuacacucucuaaagaccaauuaagcgguaucaacaacaucgccuucagcaauuaaggacuaguguccaccugucccuccugggcugcuggauugucucguuuuccugccaaauaaacaggaucagcgcuuuacagaucuaaaaaaaaaaaaaaaaaaaaaaaaaaaaaaaaaaaaaaaaaaaaaaaaaaaaaaaaaaaaaaaaugcaucccccccccccccccccccccccccccccccaaaggcucuuuucagagccaccagaauu

SEQ ID NO: 17830 - RNA, 1943 nt, Artificial Sequence
  mRNA product Design e-4 comprising derived and/or modified sequence from HRSV(Memphis-37)__AIY60640.1__F_DSCav1_mut6 (opt11)
gggagacuccugucgggcggaaguaggaggaguagaguuuaaaaacaguacucuuuuuccgguucgggacguaguugaagcaacgacaagccggauaaccgcucuugagacaggaagcuuaccauggagcugcccauccucaagaccaacgccaucaccacgauccuggccgcggugacccugugcuucgcgagcucccaaaacaucaccgaggaguucuaccagagcacgugcuccgccgucagcaagggcuaccucggggcccugcgcaccggcugguacaccuccgugaucaccaucgagcugagcaacaucaaggaaaacaagugcaacgggacggacgcaaaggugaagcucaucaagcaggagcuggauaaguacaagaacgcggucacggaccugcagaugcucaugugcuccaccccggccgccggcagcggguccgccaucgcguccggcaucgccgugugcaagguguugcaccuggagggcgaggucaacaagaucaagaacgcccuccuuuccaccaauaaggcuguugugagccuguccaacggggucagcgugcucaccuucaaggugcuggaccugaagaacuacaucgacaagcagcuccugcccauccugaacaagcaguccugcagcauccccaaccccgagacagucauggaguuccagcagaagaacaaccggcuccuggagaucacccgcgaguucuccguuaacgccggggugaccaccccgguaagcacauacaugcugaccaacagcgagcuccugagccugaucaacgacaugcccaucaccaacgaccagaagaagcucaugagcaacaacgugcagaucgugcggcagcaguccuacagcaucaugugcaucaucaaggaggagguccuggcguacguggugcaacugccccucuacggggucaucgacacccccugcuggaagcugcacacguccccgcugugcaccaccaacaccaaggagggcagcaacaucugccucacgcgcaccgaccgggggugguacugcgacaacgcaggcuccgugagcuucuucccccaggccgagaccugcaaggugugcuccaaccgcgucuucugcgacaccaugaacagccugacgcugcccuccgaggugaaccucugcaacaucgacaucuucaaccccaaguacgacuguaagaucaugaccagcaagaccgaugucuccagcuccgugaucaccagccugggcgccauaguguccuguuaugggaagacgaagugcaccgccagcaacaagaacaaaggcaucaucaagaccuucuccaacgggugcgacuacgucagcaacaagggcguggacacaguguccgucggcaacacgcuguacuacgugaacaagcaggaggggcagagccucuacgugaagggcgagccgaucaucaacuucuacgauccccuggucuuccccagcgacgaguucgacgcguccaucagccaagugaacgagaagaucaaccagucccuggccuucauccgcaagagcgacgagcuccugcacaacgugaacgucgggaaguccaccaccaacaucaugaucaccaccaucaucaucgugaucaucgucauccugcuccugcugaucgccgucggccucuuccuguacugcaaggcccggagcacgcccgugacccuguccaaggaccagcugucgggcaucaacaacaucgccuucuccaacugaggacuaguguccaccugucccuccugggcugcuggauugucucguuuuccugccaaauaaacaggaucagcgcuuuacagaucuaaaaaaaaaaaaaaaaaaaaaaaaaaaaaaaaaaaaaaaaaaaaaaaaaaaaaaaaaaaaaaaaugcaucccccccccccccccccccccccccccccccaaaggcucuuuucagagccaccagaauu

SEQ ID NO: 17831 - RNA, 1910 nt, Artificial Sequence
  mRNA product Design e-5 comprising derived and/or modified sequence from HRSV(Memphis-37)__AIY60640.1__F_DSCav1_mut6 (opt1)
gggagagcggcucggccauuuugucccagucaguccggaggcugcggcugcagaaguaccgccugcggaguaacugcaaagaagcuuaccauggagcugcccauccucaagaccaacgccaucaccacgauccuggccgcggugacccugugcuucgccagcucccagaacaucaccgaggaguucuaccagagcacgugcuccgccgucagcaagggcuaccucggcgcccugcgcaccgggugguacaccagcgugaucaccaucgagcuguccaacaucaaggagaacaagugcaacggcaccgacgccaaggugaagcucaucaagcaggagcuggacaaguacaagaacgcggucacggaccugcagaugcugaugugcagcaccccggccgccggcuccgggagcgcgaucgccuccggcaucgccgucugcaaggugcugcaccucgagggcgaggugaacaagaucaagaacgcccugcuguccaccaacaaggccgucgugagccucuccaacggggugagcguccugaccuucaaggugcuggaccucaagaacuacaucgacaagcagcugcugcccauccugaacaagcagagcugcuccauccccaaccccgagaccgucauggaguuccagcagaagaacaaccgccuccuggagaucacgcgggaguucagcgugaacgcgggcgugaccacccccgucuccaccuacaugcugacgaacagcgagcuccugucccugaucaacgacaugccgaucaccaacgaccagaagaagcucaugagcaacaacgugcagaucgugcgccagcaguccuacagcaucaugugcaucaucaaggaggagguccuggccuacguggugcagcugccccucuacggggucaucgacacccccugcuggaagcugcacaccagcccccugugcacgaccaacaccaaggagggcuccaacaucugccucacccggacggaccgcgggugguacugcgacaacgccggcagcguguccuucuucccgcaggccgagaccugcaaggucugcagcaaccggguguucugcgacaccaugaacucccugacccugcccagcgaggugaaccucugcaacaucgacaucuucaaccccaaguacgacugcaagaucaugacguccaagaccgacgucagcuccagcgugaucaccucccugggcgccaucgugagcugcuacgggaagaccaagugcacggcgagcaacaagaacaagggcaucaucaagaccuucuccaacgggugcgacuacgucagcaacaagggcguggacaccguguccgucggcaacacccuguacuacgugaacaagcaggagggccagagccucuacgugaagggggagcccaucaucaacuucuacgacccgcuggucuuccccuccgacgaguucgacgccagcaucucccaggugaacgagaagaucaaccagagccuggccuucauccggaaguccgacgagcuccugcacaacgugaacgucggcaagagcaccacgaacaucaugaucaccaccaucaucaucgugaucaucgugauccugcugcuccugaucgccgucgggcuguuccucuacugcaaggcccgcuccacccccgugacgcugagcaaggaccagcuguccgggaucaacaacaucgcguucagcaacugaggacuaguguccaccugucccuccugggcugcuggauugucucguuuuccugccaaauaaacaggaucagcgcuuuacagaucuaaaaaaaaaaaaaaaaaaaaaaaaaaaaaaaaaaaaaaaaaaaaaaaaaaaaaaaaaaaaaaaaugcaucccccccccccccccccccccccccccccccaaaggcucuuuucagagccaccagaauu

SEQ ID NO: 17832 - RNA, 1910 nt, Artificial Sequence
  mRNA product Design e-5 comprising derived and/or modified sequence from HRSV(Memphis-37)__AIY60640.1__F_DSCav1_mut6 (opt1)
gggagagcggcucggccauuuugucccagucaguccggaggcugcggcugcagaaguaccgccugcggaguaacugcaaagaagcuuaccauggagcugcccauccucaagaccaacgccaucaccacgauccuggccgcggugacccugugcuucgccagcucccagaacaucaccgaggaguucuaccagagcacgugcuccgccgucagcaagggcuaccucggggcccugcgcaccggcugguacaccuccgugaucaccaucgagcugagcaacaucaaggagaacaagugcaacgggaccgacgccaaggugaagcucaucaagcaggagcuggacaaguacaagaacgcggucacggaccugcagaugcucaugugcuccaccccggccgccggcagcggguccgccaucgcgagcggcaucgccgugugcaaggugcugcaccuggagggcgaggucaacaagaucaagaacgcccuccuguccaccaacaaggccguggugagccuguccaacggggucagcgugcucaccuucaaggugcuggaccugaagaacuacaucgacaagcagcuccugcccauccugaacaagcaguccugcagcauccccaaccccgagacggucauggaguuccagcagaagaacaaccggcuccuggagaucacccgcgaguucuccgugaacgccggcgugaccaccccggucagcacguacaugcugaccaacuccgagcuccugagccugaucaacgacaugcccaucaccaacgaccagaagaagcucaugagcaacaacgugcagaucgugcggcagcaguccuacagcaucaugugcaucaucaaggaggagguccuggcguacguggugcagcugccccucuacggggucaucgacacccccugcuggaagcugcacacguccccgcugugcaccaccaacaccaaggagggcagcaacaucugccucacgcgcaccgaccgggggugguacugcgacaacgccggcuccgugagcuucuucccccaggccgagaccugcaaggugugcuccaaccgcgucuucugcgacaccaugaacagccugacgcugcccuccgaggugaaccucugcaacaucgacaucuucaaccccaaguacgacugcaagaucaugaccagcaagaccgacgucuccagcuccgugaucaccagccugggcgccaucguguccugcuacgggaagacgaagugcaccgccagcaacaagaacaagggcaucaucaagaccuucuccaacgggugcgacuacgucagcaacaagggcguggacaccguguccgucggcaacacgcuguacuacgugaacaagcaggaggggcagagccucuacgugaagggcgagccgaucaucaacuucuacgacccccuggucuuccccagcgacgaguucgacgcguccaucagccaggugaacgagaagaucaaccagucccuggccuucauccgcaagagcgacgagcuccugcacaacgugaacgucgggaaguccaccaccaacaucaugaucaccaccaucaucaucgugaucaucgugauccugcuccugcugaucgccgucggccucuuccuguacugcaaggcccggagcacgcccgugacccuguccaaggaccagcugagcgggaucaacaacaucgccuucuccaacugaggacuaguguccaccugucccuccugggcugcuggauugucucguuuuccugccaaauaaacaggaucagcgcuuuacagaucuaaaaaaaaaaaaaaaaaaaaaaaaaaaaaaaaaaaaaaaaaaaaaaaaaaaaaaaaaaaaaaaaugcaucccccccccccccccccccccccccccccccaaaggcucuuuucagagccaccagaauu

SEQ ID NO: 17833 - RNA, 1910 nt, Artificial Sequence
  mRNA product Design e-5 comprising derived and/or modified sequence from HRSV(Memphis-37)__AIY60640.1__F_DSCav1_mut6 (opt2)
gggagagcggcucggccauuuugucccagucaguccggaggcugcggcugcagaaguaccgccugcggaguaacugcaaagaagcuuaccauggagcuccccauccucaagaccaacgccaucaccaccauccucgccgccgucacccucugcuucgccuccucccagaacaucaccgaggaguucuaccaguccaccugcuccgccgucuccaagggcuaccucggcgcccuccgcaccggcugguacaccuccgucaucaccaucgagcucuccaacaucaaggagaacaagugcaacggcaccgacgccaaggucaagcucaucaagcaggagcucgacaaguacaagaacgccgucaccgaccuccagaugcucaugugcuccacccccgccgccggcuccggcuccgccaucgccuccggcaucgccgucugcaagguccuccaccucgagggcgaggucaacaagaucaagaacgcccuccucuccaccaacaaggccgucgucucccucuccaacggcgucuccguccucaccuucaagguccucgaccucaagaacuacaucgacaagcagcuccuccccauccucaacaagcaguccugcuccauccccaaccccgagaccgucauggaguuccagcagaagaacaaccgccuccucgagaucacccgcgaguucuccgucaacgccggcgucaccacccccgucuccaccuacaugcucaccaacuccgagcuccucucccucaucaacgacaugcccaucaccaacgaccagaagaagcucauguccaacaacguccagaucguccgccagcaguccuacuccaucaugugcaucaucaaggaggagguccucgccuacgucguccagcucccccucuacggcgucaucgacacccccugcuggaagcuccacaccuccccccucugcaccaccaacaccaaggagggcuccaacaucugccucacccgcaccgaccgcggcugguacugcgacaacgccggcuccgucuccuucuucccccaggccgagaccugcaaggucugcuccaaccgcgucuucugcgacaccaugaacucccucacccuccccuccgaggucaaccucugcaacaucgacaucuucaaccccaaguacgacugcaagaucaugaccuccaagaccgacgucuccuccuccgucaucaccucccucggcgccaucgucuccugcuacggcaagaccaagugcaccgccuccaacaagaacaagggcaucaucaagaccuucuccaacggcugcgacuacgucuccaacaagggcgucgacaccgucuccgucggcaacacccucuacuacgucaacaagcaggagggccagucccucuacgucaagggcgagcccaucaucaacuucuacgacccccucgucuuccccuccgacgaguucgacgccuccaucucccaggucaacgagaagaucaaccagucccucgccuucauccgcaaguccgacgagcuccuccacaacgucaacgucggcaaguccaccaccaacaucaugaucaccaccaucaucaucgucaucaucgucauccuccuccuccucaucgccgucggccucuuccucuacugcaaggcccgcuccacccccgucacccucuccaaggaccagcucuccggcaucaacaacaucgccuucuccaacugaggacuaguguccaccugucccuccugggcugcuggauugucucguuuuccugccaaauaaacaggaucagcgcuuuacagaucuaaaaaaaaaaaaaaaaaaaaaaaaaaaaaaaaaaaaaaaaaaaaaaaaaaaaaaaaaaaaaaaaugcaucccccccccccccccccccccccccccccccaaaggcucuuuucagagccaccagaauu

SEQ ID NO: 17834 - RNA, 1910 nt, Artificial Sequence
  mRNA product Design e-5 comprising derived and/or modified sequence from HRSV(Memphis-37)__AIY60640.1__F_DSCav1_mut6 (opt3)
gggagagcggcucggccauuuugucccagucaguccggaggcugcggcugcagaaguaccgccugcggaguaacugcaaagaagcuuaccauggagcugcccauccucaagaccaacgccauuacaacuauacuugcugcagugacgcugugcuucgccagcucccagaauaucaccgaagaguuuuaccaaucuacauguucagcggucaguaaaggcuauuugggggcuuuaagaacuggaugguacaccagcguuauuacaaucgaacuguccaacauuaaggagaauaaaugcaacgguaccgacgccaaggugaaacuaaucaagcaggaacucgauaaguauaaaaaugcaguaacugaccugcagaugcuuauguguucuacuccugccgcuggcucggggucagcaauagccagcggaaucgcugugugcaagguccugcacuuggagggcgaggugaacaaaauuaagaaugcccuccugaguaccaacaaagcgguugugucccugucuaauggugucagcgugcucacguucaagguauuagaucugaagaacuacaucgacaaacagcuuuugccaauucugaauaagcaauccuguucaaucccgaaccccgaaacuguuauggaguuucagcagaaaaauaacaggcuacucgaaauaacccgggaguucagugugaaugcaggggucacaacuccugugagcaccuauaugcugacaaacucugagcuucuguccuugauuaacgauaugccaaucaccaaugaccagaagaaacucaugucaaacaaugugcaaauuguccgccagcagagcuacaguaucaugugcaucauuaaggaagagguucuggccuaugugguacaguuaccccuguacggagugauagauacgccuuguuggaaacuccauacuucuccacuuugcacaaccaacacuaaggaaggcuccaauaucugucugacacgaaccgaccguggcugguacugcgauaacgcugggagcgucucguuuuucccccaagccgagacguguaaggugugcucuaauagaguuuucugcgacaccaugaacuccuugacacuaccuucagaagugaaucuguguaacauugauaucuucaauccaaaauaugacugcaagauaaugacaaguaaaaccgaugucagcuccucugugauuacaagccucggagcaaucguaucauguuacgguaagacuaaaugcaccgcuaguaacaagaauaagggcaucauuaaaacauuuuccaacgggugugacuauguuagcaauaagggaguggacaccgucucugugggcaacacucuguacuaugucaacaaacaggagggucagucacuuuacgugaagggggagccgaucauuaauuucuaugauccccugguuuuuccuagugacgaauuugaugccagcauaucccaagugaacgagaaaaucaaucagucuuuggcguuuauuaggaagucggacgaacuccugcacaacguaaaugucggaaagagcacgacaaacaucaugaucaccacuauuauaaucgugauuaucguuauuuuacugcuacucaucgccgugggccuguuccuuuacugcaaagcacgguccaccccagucacauugucaaaggaucagcugaguggcauaaauaacaucgcuuucucuaauugaggacuaguguccaccugucccuccugggcugcuggauugucucguuuuccugccaaauaaacaggaucagcgcuuuacagaucuaaaaaaaaaaaaaaaaaaaaaaaaaaaaaaaaaaaaaaaaaaaaaaaaaaaaaaaaaaaaaaaaugcaucccccccccccccccccccccccccccccccaaaggcucuuuucagagccaccagaauu

SEQ ID NO: 17835 - RNA, 1910 nt, Artificial Sequence
  mRNA product Design e-5 comprising derived and/or modified sequence from HRSV(Memphis-37)__AIY60640.1__F_DSCav1_mut6 (opt4)
gggagagcggcucggccauuuugucccagucaguccggaggcugcggcugcagaaguaccgccugcggaguaacugcaaagaagcuuaccauggagcugcccauccugaagaccaacgccaucaccaccauccuggccgccgugacccugugcuucgccagcagccagaacaucaccgaggaguucuaccagagcaccugcagcgccgugagcaagggcuaccugggcgcccugagaaccggcugguacaccagcgugaucaccaucgagcugagcaacaucaaggagaacaagugcaacggcaccgacgccaaggugaagcugaucaagcaggagcuggacaaguacaagaacgccgugaccgaccugcagaugcugaugugcagcacccccgccgccggcagcggcagcgccaucgccagcggcaucgccgugugcaaggugcugcaccuggagggcgaggugaacaagaucaagaacgcccugcugagcaccaacaaggccguggugagccugagcaacggcgugagcgugcugaccuucaaggugcuggaccugaagaacuacaucgacaagcagcugcugcccauccugaacaagcagagcugcagcauccccaaccccgagaccgugauggaguuccagcagaagaacaacagacugcuggagaucaccagagaguucagcgugaacgccggcgugaccacccccgugagcaccuacaugcugaccaacagcgagcugcugagccugaucaacgacaugcccaucaccaacgaccagaagaagcugaugagcaacaacgugcagaucgugagacagcagagcuacagcaucaugugcaucaucaaggaggaggugcuggccuacguggugcagcugccccuguacggcgugaucgacacccccugcuggaagcugcacaccagcccccugugcaccaccaacaccaaggagggcagcaacaucugccugaccagaaccgacagaggcugguacugcgacaacgccggcagcgugagcuucuucccccaggccgagaccugcaaggugugcagcaacagaguguucugcgacaccaugaacagccugacccugcccagcgaggugaaccugugcaacaucgacaucuucaaccccaaguacgacugcaagaucaugaccagcaagaccgacgugagcagcagcgugaucaccagccugggcgccaucgugagcugcuacggcaagaccaagugcaccgccagcaacaagaacaagggcaucaucaagaccuucagcaacggcugcgacuacgugagcaacaagggcguggacaccgugagcgugggcaacacccuguacuacgugaacaagcaggagggccagagccuguacgugaagggcgagcccaucaucaacuucuacgacccccugguguuccccagcgacgaguucgacgccagcaucagccaggugaacgagaagaucaaccagagccuggccuucaucagaaagagcgacgagcugcugcacaacgugaacgugggcaagagcaccaccaacaucaugaucaccaccaucaucaucgugaucaucgugauccugcugcugcugaucgccgugggccuguuccuguacugcaaggccagaagcacccccgugacccugagcaaggaccagcugagcggcaucaacaacaucgccuucagcaacugaggacuaguguccaccugucccuccugggcugcuggauugucucguuuuccugccaaauaaacaggaucagcgcuuuacagaucuaaaaaaaaaaaaaaaaaaaaaaaaaaaaaaaaaaaaaaaaaaaaaaaaaaaaaaaaaaaaaaaaugcaucccccccccccccccccccccccccccccccaaaggcucuuuucagagccaccagaauu

SEQ ID NO: 17836 - RNA, 1910 nt, Artificial Sequence
  mRNA product Design e-5 comprising derived and/or modified sequence from HRSV(Memphis-37)__AIY60640.1__F_DSCav1_mut6 (opt5)
gggagagcggcucggccauuuugucccagucaguccggaggcugcggcugcagaaguaccgccugcggaguaacugcaaagaagcuuaccauggagcugcccauccucaagaccaacgccauuacaacgauccuggcugccgugacccuuugcuucgcgagcucccagaauauuacagaagaguuuuaccaaucuaccuguagcgcugucuccaaaggcuaucugggggcccucagaacaggaugguacaccucuguuaucacaauugaacugagcaacaucaaggagaauaaaugcaacggcaccgacgccaaggugaaacuuaucaagcaggaacuggauaaguauaaaaaugcugugacggaccuccagaugcugauguguuccaccccugccgcugggucuggaagcgccauugcguccggcaucgccgucugcaaggugcugcaccucgagggggagguuaacaaaauuaagaaugcucugcuuagcacaaacaaagccguggucucucuguccaauggagugagcguucucaccuucaaggugcuggaucuuaagaacuacaucgacaaacagcugcucccgauucugaauaagcaaucuuguuccauccccaacccugaaacagucauggaguuucagcagaaaaauaaccggcugcucgaaauuacccgcgaguucagcgugaaugcuggcgugacgacacccgucucuaccuauaugcugacaaacuccgagcuucugagccucaucaacgauaugccuaucaccaaugaccagaagaaacugauguccaacaauguucaaauugugagacagcagucuuacagcaucaugugcauuaucaaggaagaggugcuugccuaugucgugcagcugccccucuacggcguuauugauaccccuuguuggaaacugcauacauccccgcugugcacgaccaacacaaaggaagggagcaauaucugucucacccggacagaccgcggaugguacugcgauaacgcgggcucuguguccuuuuucccccaagccgagaccuguaaggucugcagcaauagaguguuuugcgacacgaugaacucucugacacuuccuagcgaaguuaaucuguguaacaucgauauuuucaaucccaaauaugacugcaagaucaugaccuccaaaaccgaugugucuagcuccgucauuacaagccucggggcuaucgugucuuguuacggaaagaccaaaugcacagccuccaacaagaauaagggcauuaucaaaacguuuagcaacgggugugacuaugucucuaauaagggaguggacaccguuuccgugggcaacacacuguacuaugucaacaaacaggagggccagagccuuuacgugaagggggagccuaucauuaauuucuaugauccccugguuuuuccguccgacgaauuugaugcuucuaucagccaagugaacgagaaaauuaaucagucccucgccuucauccggaagucugacgaacugcugcacaacgucaaugugggaaagagcaccacaaacauuaugaucaccacgauuaucaucgugauuaucguuauucuccugcuucugaucgccgucggccucuuccuguacugcaaagcucgcuccaccccugugacacugagcaaggaucagcuuucugggauuaauaacaucgcguucuccaauugaggacuaguguccaccugucccuccugggcugcuggauugucucguuuuccugccaaauaaacaggaucagcgcuuuacagaucuaaaaaaaaaaaaaaaaaaaaaaaaaaaaaaaaaaaaaaaaaaaaaaaaaaaaaaaaaaaaaaaaugcaucccccccccccccccccccccccccccccccaaaggcucuuuucagagccaccagaauu

SEQ ID NO: 17837 - RNA, 1910 nt, Artificial Sequence
  mRNA product Design e-5 comprising derived and/or modified sequence from HRSV(Memphis-37)__AIY60640.1__F_DSCav1_mut6 (opt6)
gggagagcggcucggccauuuugucccagucaguccggaggcugcggcugcagaaguaccgccugcggaguaacugcaaagaagcuuaccauggaacuaccaauuuuaaaaacaaacgcaauuacaacuauacucgcagcaguaacauuauguuucgccucaucccaaaacauaacagaagaauuuuaccaaucaacaugcagcgcaguaucaaaaggauaucucggagcauuacgaacagguugguacacaucuguaaucacuauagaacuaucaaacauaaaagaaaacaaaugcaauggaaccgacgcaaaaguaaaauuaauaaaacaagaacucgauaaauacaaaaaugcaguaacagaccuccaaaugcucauguguucaacaccagccgcaggaucagguuccgccauagcaucuggcauagcaguaugcaaaguacuccacuuagaaggagaaguuaacaaaauaaaaaacgcacuauuaucaacaaacaaagcaguaguaucccucucaaacggagucucaguauuaacauucaaaguauuagaccuaaaaaacuacauagacaaacaacuacuuccaauacucaacaaacaaucaugcucaauaccaaacccagaaaccguaauggaauuucaacaaaaaaacaaccgacuacuagaaaucacacgagaauuuucaguaaacgccggugucacaacuccaguaucaacuuauauguuaaccaacucagaacuauuaucauuaauaaacgauaugcccauaacuaacgaccaaaaaaaauuaaugucaaacaacguacaaauaguacgccaacaaaguuacucaauaaugugcaucauaaaagaagaaguauuagcguacguuguacaacuaccucuauacggagucauagacacaccaugcuggaaacuucacacaucaccacuauguacaacaaacacaaaagaaggcaguaacauaugccuaacaagaacagaccguggaugguauugugacaacgcuggaucuguaucauucuucccucaagcagaaaccuguaaaguuugcucaaacagagucuucugugacacaaugaacucucuaacacuaccuuccgaagugaaccucuguaacauagacauauucaauccaaaauaugauugcaaaauaaugacuucaaaaacagauguaucauccucuguuauaacaucauuaggcgccauaguuucaugcuacggaaaaacuaaaugcacagcaucaaacaaaaacaaaggaauaauaaaaaccuucucaaauggaugcgacuacguaagcaacaaaggcguagacacaguaucaguagguaauacauuauacuacguaaacaaacaagaaggacaaucacuuuauguuaaaggagaaccuauaauaaacuucuacgacccacuuguauuuccauccgaugaauuugacgcaucuauaucacaagucaacgaaaaaauaaaccaaucauuagcauucauucgaaaauccgaugaacuacuccauaacguaaaugucggaaaaucaacaaccaacauaaugaucacaacaauaaucauagugauaauaguaauacuccuacuacuaaucgcaguaggucuauuccuauauuguaaagcaagaucuacuccaguuacacucucuaaagaccaauuaagcgguaucaacaacaucgccuucagcaauuaaggacuaguguccaccugucccuccugggcugcuggauugucucguuuuccugccaaauaaacaggaucagcgcuuuacagaucuaaaaaaaaaaaaaaaaaaaaaaaaaaaaaaaaaaaaaaaaaaaaaaaaaaaaaaaaaaaaaaaaugcaucccccccccccccccccccccccccccccccaaaggcucuuuucagagccaccagaauu

SEQ ID NO: 17838 - RNA, 1910 nt, Artificial Sequence
  mRNA product Design e-5 comprising derived and/or modified sequence from HRSV(Memphis-37)__AIY60640.1__F_DSCav1_mut6 (opt11)
gggagagcggcucggccauuuugucccagucaguccggaggcugcggcugcagaaguaccgccugcggaguaacugcaaagaagcuuaccauggagcugcccauccucaagaccaacgccaucaccacgauccuggccgcggugacccugugcuucgcgagcucccaaaacaucaccgaggaguucuaccagagcacgugcuccgccgucagcaagggcuaccucggggcccugcgcaccggcugguacaccuccgugaucaccaucgagcugagcaacaucaaggaaaacaagugcaacgggacggacgcaaaggugaagcucaucaagcaggagcuggauaaguacaagaacgcggucacggaccugcagaugcucaugugcuccaccccggccgccggcagcggguccgccaucgcguccggcaucgccgugugcaagguguugcaccuggagggcgaggucaacaagaucaagaacgcccuccuuuccaccaauaaggcuguugugagccuguccaacggggucagcgugcucaccuucaaggugcuggaccugaagaacuacaucgacaagcagcuccugcccauccugaacaagcaguccugcagcauccccaaccccgagacagucauggaguuccagcagaagaacaaccggcuccuggagaucacccgcgaguucuccguuaacgccggggugaccaccccgguaagcacauacaugcugaccaacagcgagcuccugagccugaucaacgacaugcccaucaccaacgaccagaagaagcucaugagcaacaacgugcagaucgugcggcagcaguccuacagcaucaugugcaucaucaaggaggagguccuggcguacguggugcaacugccccucuacggggucaucgacacccccugcuggaagcugcacacguccccgcugugcaccaccaacaccaaggagggcagcaacaucugccucacgcgcaccgaccgggggugguacugcgacaacgcaggcuccgugagcuucuucccccaggccgagaccugcaaggugugcuccaaccgcgucuucugcgacaccaugaacagccugacgcugcccuccgaggugaaccucugcaacaucgacaucuucaaccccaaguacgacuguaagaucaugaccagcaagaccgaugucuccagcuccgugaucaccagccugggcgccauaguguccuguuaugggaagacgaagugcaccgccagcaacaagaacaaaggcaucaucaagaccuucuccaacgggugcgacuacgucagcaacaagggcguggacacaguguccgucggcaacacgcuguacuacgugaacaagcaggaggggcagagccucuacgugaagggcgagccgaucaucaacuucuacgauccccuggucuuccccagcgacgaguucgacgcguccaucagccaagugaacgagaagaucaaccagucccuggccuucauccgcaagagcgacgagcuccugcacaacgugaacgucgggaaguccaccaccaacaucaugaucaccaccaucaucaucgugaucaucgucauccugcuccugcugaucgccgucggccucuuccuguacugcaaggcccggagcacgcccgugacccuguccaaggaccagcugucgggcaucaacaacaucgccuucuccaacugaggacuaguguccaccugucccuccugggcugcuggauugucucguuuuccugccaaauaaacaggaucagcgcuuuacagaucuaaaaaaaaaaaaaaaaaaaaaaaaaaaaaaaaaaaaaaaaaaaaaaaaaaaaaaaaaaaaaaaaugcaucccccccccccccccccccccccccccccccaaaggcucuuuucagagccaccagaauu

SEQ ID NO: 17839 - RNA, 1977 nt, Artificial Sequence
  mRNA product Design e-6 comprising derived and/or modified sequence from HRSV(Memphis-37)__AIY60640.1__F_DSCav1_mut6 (opt1)
gggagagcggcucggccauuuugucccagucaguccggaggcugcggcugcagaaguaccgccugcggaguaacugcaaagaagcuuaccauggagcugcccauccucaagaccaacgccaucaccacgauccuggccgcggugacccugugcuucgccagcucccagaacaucaccgaggaguucuaccagagcacgugcuccgccgucagcaagggcuaccucggcgcccugcgcaccgggugguacaccagcgugaucaccaucgagcuguccaacaucaaggagaacaagugcaacggcaccgacgccaaggugaagcucaucaagcaggagcuggacaaguacaagaacgcggucacggaccugcagaugcugaugugcagcaccccggccgccggcuccgggagcgcgaucgccuccggcaucgccgucugcaaggugcugcaccucgagggcgaggugaacaagaucaagaacgcccugcuguccaccaacaaggccgucgugagccucuccaacggggugagcguccugaccuucaaggugcuggaccucaagaacuacaucgacaagcagcugcugcccauccugaacaagcagagcugcuccauccccaaccccgagaccgucauggaguuccagcagaagaacaaccgccuccuggagaucacgcgggaguucagcgugaacgcgggcgugaccacccccgucuccaccuacaugcugacgaacagcgagcuccugucccugaucaacgacaugccgaucaccaacgaccagaagaagcucaugagcaacaacgugcagaucgugcgccagcaguccuacagcaucaugugcaucaucaaggaggagguccuggccuacguggugcagcugccccucuacggggucaucgacacccccugcuggaagcugcacaccagcccccugugcacgaccaacaccaaggagggcuccaacaucugccucacccggacggaccgcgggugguacugcgacaacgccggcagcguguccuucuucccgcaggccgagaccugcaaggucugcagcaaccggguguucugcgacaccaugaacucccugacccugcccagcgaggugaaccucugcaacaucgacaucuucaaccccaaguacgacugcaagaucaugacguccaagaccgacgucagcuccagcgugaucaccucccugggcgccaucgugagcugcuacgggaagaccaagugcacggcgagcaacaagaacaagggcaucaucaagaccuucuccaacgggugcgacuacgucagcaacaagggcguggacaccguguccgucggcaacacccuguacuacgugaacaagcaggagggccagagccucuacgugaagggggagcccaucaucaacuucuacgacccgcuggucuuccccuccgacgaguucgacgccagcaucucccaggugaacgagaagaucaaccagagccuggccuucauccggaaguccgacgagcuccugcacaacgugaacgucggcaagagcaccacgaacaucaugaucaccaccaucaucaucgugaucaucgugauccugcugcuccugaucgccgucgggcuguuccucuacugcaaggcccgcuccacccccgugacgcugagcaaggaccagcuguccgggaucaacaacaucgcguucagcaacugaggacuaguacuggcugcaucucccuuuccucuguccuccauccuucucccaggauggugaagggggaccugguacccagugauccccaccccaggauccuaaaucaugacuuaccugcuaauaaaaacucauuggaaaagugagaagaucuaaaaaaaaaaaaaaaaaaaaaaaaaaaaaaaaaaaaaaaaaaaaaaaaaaaaaaaaaaaaaaaaugcaucccccccccccccccccccccccccccccccaaaggcucuuuucagagccaccagaauu

SEQ ID NO: 17840 - RNA, 1977 nt, Artificial Sequence
  mRNA product Design e-6 comprising derived and/or modified sequence from HRSV(Memphis-37)__AIY60640.1__F_DSCav1_mut6 (opt1)
gggagagcggcucggccauuuugucccagucaguccggaggcugcggcugcagaaguaccgccugcggaguaacugcaaagaagcuuaccauggagcugcccauccucaagaccaacgccaucaccacgauccuggccgcggugacccugugcuucgccagcucccagaacaucaccgaggaguucuaccagagcacgugcuccgccgucagcaagggcuaccucggggcccugcgcaccggcugguacaccuccgugaucaccaucgagcugagcaacaucaaggagaacaagugcaacgggaccgacgccaaggugaagcucaucaagcaggagcuggacaaguacaagaacgcggucacggaccugcagaugcucaugugcuccaccccggccgccggcagcggguccgccaucgcgagcggcaucgccgugugcaaggugcugcaccuggagggcgaggucaacaagaucaagaacgcccuccuguccaccaacaaggccguggugagccuguccaacggggucagcgugcucaccuucaaggugcuggaccugaagaacuacaucgacaagcagcuccugcccauccugaacaagcaguccugcagcauccccaaccccgagacggucauggaguuccagcagaagaacaaccggcuccuggagaucacccgcgaguucuccgugaacgccggcgugaccaccccggucagcacguacaugcugaccaacuccgagcuccugagccugaucaacgacaugcccaucaccaacgaccagaagaagcucaugagcaacaacgugcagaucgugcggcagcaguccuacagcaucaugugcaucaucaaggaggagguccuggcguacguggugcagcugccccucuacggggucaucgacacccccugcuggaagcugcacacguccccgcugugcaccaccaacaccaaggagggcagcaacaucugccucacgcgcaccgaccgggggugguacugcgacaacgccggcuccgugagcuucuucccccaggccgagaccugcaaggugugcuccaaccgcgucuucugcgacaccaugaacagccugacgcugcccuccgaggugaaccucugcaacaucgacaucuucaaccccaaguacgacugcaagaucaugaccagcaagaccgacgucuccagcuccgugaucaccagccugggcgccaucguguccugcuacgggaagacgaagugcaccgccagcaacaagaacaagggcaucaucaagaccuucuccaacgggugcgacuacgucagcaacaagggcguggacaccguguccgucggcaacacgcuguacuacgugaacaagcaggaggggcagagccucuacgugaagggcgagccgaucaucaacuucuacgacccccuggucuuccccagcgacgaguucgacgcguccaucagccaggugaacgagaagaucaaccagucccuggccuucauccgcaagagcgacgagcuccugcacaacgugaacgucgggaaguccaccaccaacaucaugaucaccaccaucaucaucgugaucaucgugauccugcuccugcugaucgccgucggccucuuccuguacugcaaggcccggagcacgcccgugacccuguccaaggaccagcugagcgggaucaacaacaucgccuucuccaacugaggacuaguacuggcugcaucucccuuuccucuguccuccauccuucucccaggauggugaagggggaccugguacccagugauccccaccccaggauccuaaaucaugacuuaccugcuaauaaaaacucauuggaaaagugagaagaucuaaaaaaaaaaaaaaaaaaaaaaaaaaaaaaaaaaaaaaaaaaaaaaaaaaaaaaaaaaaaaaaaugcaucccccccccccccccccccccccccccccccaaaggcucuuuucagagccaccagaauu

SEQ ID NO: 17841 - RNA, 1977 nt, Artificial Sequence
  mRNA product Design e-6 comprising derived and/or modified sequence from HRSV(Memphis-37)__AIY60640.1__F_DSCav1_mut6 (opt2)
gggagagcggcucggccauuuugucccagucaguccggaggcugcggcugcagaaguaccgccugcggaguaacugcaaagaagcuuaccauggagcuccccauccucaagaccaacgccaucaccaccauccucgccgccgucacccucugcuucgccuccucccagaacaucaccgaggaguucuaccaguccaccugcuccgccgucuccaagggcuaccucggcgcccuccgcaccggcugguacaccuccgucaucaccaucgagcucuccaacaucaaggagaacaagugcaacggcaccgacgccaaggucaagcucaucaagcaggagcucgacaaguacaagaacgccgucaccgaccuccagaugcucaugugcuccacccccgccgccggcuccggcuccgccaucgccuccggcaucgccgucugcaagguccuccaccucgagggcgaggucaacaagaucaagaacgcccuccucuccaccaacaaggccgucgucucccucuccaacggcgucuccguccucaccuucaagguccucgaccucaagaacuacaucgacaagcagcuccuccccauccucaacaagcaguccugcuccauccccaaccccgagaccgucauggaguuccagcagaagaacaaccgccuccucgagaucacccgcgaguucuccgucaacgccggcgucaccacccccgucuccaccuacaugcucaccaacuccgagcuccucucccucaucaacgacaugcccaucaccaacgaccagaagaagcucauguccaacaacguccagaucguccgccagcaguccuacuccaucaugugcaucaucaaggaggagguccucgccuacgucguccagcucccccucuacggcgucaucgacacccccugcuggaagcuccacaccuccccccucugcaccaccaacaccaaggagggcuccaacaucugccucacccgcaccgaccgcggcugguacugcgacaacgccggcuccgucuccuucuucccccaggccgagaccugcaaggucugcuccaaccgcgucuucugcgacaccaugaacucccucacccuccccuccgaggucaaccucugcaacaucgacaucuucaaccccaaguacgacugcaagaucaugaccuccaagaccgacgucuccuccuccgucaucaccucccucggcgccaucgucuccugcuacggcaagaccaagugcaccgccuccaacaagaacaagggcaucaucaagaccuucuccaacggcugcgacuacgucuccaacaagggcgucgacaccgucuccgucggcaacacccucuacuacgucaacaagcaggagggccagucccucuacgucaagggcgagcccaucaucaacuucuacgacccccucgucuuccccuccgacgaguucgacgccuccaucucccaggucaacgagaagaucaaccagucccucgccuucauccgcaaguccgacgagcuccuccacaacgucaacgucggcaaguccaccaccaacaucaugaucaccaccaucaucaucgucaucaucgucauccuccuccuccucaucgccgucggccucuuccucuacugcaaggcccgcuccacccccgucacccucuccaaggaccagcucuccggcaucaacaacaucgccuucuccaacugaggacuaguacuggcugcaucucccuuuccucuguccuccauccuucucccaggauggugaagggggaccugguacccagugauccccaccccaggauccuaaaucaugacuuaccugcuaauaaaaacucauuggaaaagugagaagaucuaaaaaaaaaaaaaaaaaaaaaaaaaaaaaaaaaaaaaaaaaaaaaaaaaaaaaaaaaaaaaaaaugcaucccccccccccccccccccccccccccccccaaaggcucuuuucagagccaccagaauu

SEQ ID NO: 17842 - RNA, 1977 nt, Artificial Sequence
  mRNA product Design e-6 comprising derived and/or modified sequence from HRSV(Memphis-37)__AIY60640.1__F_DSCav1_mut6 (opt3)
gggagagcggcucggccauuuugucccagucaguccggaggcugcggcugcagaaguaccgccugcggaguaacugcaaagaagcuuaccauggagcugcccauccucaagaccaacgccauuacaacuauacuugcugcagugacgcugugcuucgccagcucccagaauaucaccgaagaguuuuaccaaucuacauguucagcggucaguaaaggcuauuugggggcuuuaagaacuggaugguacaccagcguuauuacaaucgaacuguccaacauuaaggagaauaaaugcaacgguaccgacgccaaggugaaacuaaucaagcaggaacucgauaaguauaaaaaugcaguaacugaccugcagaugcuuauguguucuacuccugccgcuggcucggggucagcaauagccagcggaaucgcugugugcaagguccugcacuuggagggcgaggugaacaaaauuaagaaugcccuccugaguaccaacaaagcgguugugucccugucuaauggugucagcgugcucacguucaagguauuagaucugaagaacuacaucgacaaacagcuuuugccaauucugaauaagcaauccuguucaaucccgaaccccgaaacuguuauggaguuucagcagaaaaauaacaggcuacucgaaauaacccgggaguucagugugaaugcaggggucacaacuccugugagcaccuauaugcugacaaacucugagcuucuguccuugauuaacgauaugccaaucaccaaugaccagaagaaacucaugucaaacaaugugcaaauuguccgccagcagagcuacaguaucaugugcaucauuaaggaagagguucuggccuaugugguacaguuaccccuguacggagugauagauacgccuuguuggaaacuccauacuucuccacuuugcacaaccaacacuaaggaaggcuccaauaucugucugacacgaaccgaccguggcugguacugcgauaacgcugggagcgucucguuuuucccccaagccgagacguguaaggugugcucuaauagaguuuucugcgacaccaugaacuccuugacacuaccuucagaagugaaucuguguaacauugauaucuucaauccaaaauaugacugcaagauaaugacaaguaaaaccgaugucagcuccucugugauuacaagccucggagcaaucguaucauguuacgguaagacuaaaugcaccgcuaguaacaagaauaagggcaucauuaaaacauuuuccaacgggugugacuauguuagcaauaagggaguggacaccgucucugugggcaacacucuguacuaugucaacaaacaggagggucagucacuuuacgugaagggggagccgaucauuaauuucuaugauccccugguuuuuccuagugacgaauuugaugccagcauaucccaagugaacgagaaaaucaaucagucuuuggcguuuauuaggaagucggacgaacuccugcacaacguaaaugucggaaagagcacgacaaacaucaugaucaccacuauuauaaucgugauuaucguuauuuuacugcuacucaucgccgugggccuguuccuuuacugcaaagcacgguccaccccagucacauugucaaaggaucagcugaguggcauaaauaacaucgcuuucucuaauugaggacuaguacuggcugcaucucccuuuccucuguccuccauccuucucccaggauggugaagggggaccugguacccagugauccccaccccaggauccuaaaucaugacuuaccugcuaauaaaaacucauuggaaaagugagaagaucuaaaaaaaaaaaaaaaaaaaaaaaaaaaaaaaaaaaaaaaaaaaaaaaaaaaaaaaaaaaaaaaaugcaucccccccccccccccccccccccccccccccaaaggcucuuuucagagccaccagaauu

SEQ ID NO: 17843 - RNA, 1977 nt, Artificial Sequence
  mRNA product Design e-6 comprising derived and/or modified sequence from HRSV(Memphis-37)__AIY60640.1__F_DSCav1_mut6 (opt4)
gggagagcggcucggccauuuugucccagucaguccggaggcugcggcugcagaaguaccgccugcggaguaacugcaaagaagcuuaccauggagcugcccauccugaagaccaacgccaucaccaccauccuggccgccgugacccugugcuucgccagcagccagaacaucaccgaggaguucuaccagagcaccugcagcgccgugagcaagggcuaccugggcgcccugagaaccggcugguacaccagcgugaucaccaucgagcugagcaacaucaaggagaacaagugcaacggcaccgacgccaaggugaagcugaucaagcaggagcuggacaaguacaagaacgccgugaccgaccugcagaugcugaugugcagcacccccgccgccggcagcggcagcgccaucgccagcggcaucgccgugugcaaggugcugcaccuggagggcgaggugaacaagaucaagaacgcccugcugagcaccaacaaggccguggugagccugagcaacggcgugagcgugcugaccuucaaggugcuggaccugaagaacuacaucgacaagcagcugcugcccauccugaacaagcagagcugcagcauccccaaccccgagaccgugauggaguuccagcagaagaacaacagacugcuggagaucaccagagaguucagcgugaacgccggcgugaccacccccgugagcaccuacaugcugaccaacagcgagcugcugagccugaucaacgacaugcccaucaccaacgaccagaagaagcugaugagcaacaacgugcagaucgugagacagcagagcuacagcaucaugugcaucaucaaggaggaggugcuggccuacguggugcagcugccccuguacggcgugaucgacacccccugcuggaagcugcacaccagcccccugugcaccaccaacaccaaggagggcagcaacaucugccugaccagaaccgacagaggcugguacugcgacaacgccggcagcgugagcuucuucccccaggccgagaccugcaaggugugcagcaacagaguguucugcgacaccaugaacagccugacccugcccagcgaggugaaccugugcaacaucgacaucuucaaccccaaguacgacugcaagaucaugaccagcaagaccgacgugagcagcagcgugaucaccagccugggcgccaucgugagcugcuacggcaagaccaagugcaccgccagcaacaagaacaagggcaucaucaagaccuucagcaacggcugcgacuacgugagcaacaagggcguggacaccgugagcgugggcaacacccuguacuacgugaacaagcaggagggccagagccuguacgugaagggcgagcccaucaucaacuucuacgacccccugguguuccccagcgacgaguucgacgccagcaucagccaggugaacgagaagaucaaccagagccuggccuucaucagaaagagcgacgagcugcugcacaacgugaacgugggcaagagcaccaccaacaucaugaucaccaccaucaucaucgugaucaucgugauccugcugcugcugaucgccgugggccuguuccuguacugcaaggccagaagcacccccgugacccugagcaaggaccagcugagcggcaucaacaacaucgccuucagcaacugaggacuaguacuggcugcaucucccuuuccucuguccuccauccuucucccaggauggugaagggggaccugguacccagugauccccaccccaggauccuaaaucaugacuuaccugcuaauaaaaacucauuggaaaagugagaagaucuaaaaaaaaaaaaaaaaaaaaaaaaaaaaaaaaaaaaaaaaaaaaaaaaaaaaaaaaaaaaaaaaugcaucccccccccccccccccccccccccccccccaaaggcucuuuucagagccaccagaauu

SEQ ID NO: 17844 - RNA, 1977 nt, Artificial Sequence
  mRNA product Design e-6 comprising derived and/or modified sequence from HRSV(Memphis-37)__AIY60640.1__F_DSCav1_mut6 (opt5)
gggagagcggcucggccauuuugucccagucaguccggaggcugcggcugcagaaguaccgccugcggaguaacugcaaagaagcuuaccauggagcugcccauccucaagaccaacgccauuacaacgauccuggcugccgugacccuuugcuucgcgagcucccagaauauuacagaagaguuuuaccaaucuaccuguagcgcugucuccaaaggcuaucugggggcccucagaacaggaugguacaccucuguuaucacaauugaacugagcaacaucaaggagaauaaaugcaacggcaccgacgccaaggugaaacuuaucaagcaggaacuggauaaguauaaaaaugcugugacggaccuccagaugcugauguguuccaccccugccgcugggucuggaagcgccauugcguccggcaucgccgucugcaaggugcugcaccucgagggggagguuaacaaaauuaagaaugcucugcuuagcacaaacaaagccguggucucucuguccaauggagugagcguucucaccuucaaggugcuggaucuuaagaacuacaucgacaaacagcugcucccgauucugaauaagcaaucuuguuccauccccaacccugaaacagucauggaguuucagcagaaaaauaaccggcugcucgaaauuacccgcgaguucagcgugaaugcuggcgugacgacacccgucucuaccuauaugcugacaaacuccgagcuucugagccucaucaacgauaugccuaucaccaaugaccagaagaaacugauguccaacaauguucaaauugugagacagcagucuuacagcaucaugugcauuaucaaggaagaggugcuugccuaugucgugcagcugccccucuacggcguuauugauaccccuuguuggaaacugcauacauccccgcugugcacgaccaacacaaaggaagggagcaauaucugucucacccggacagaccgcggaugguacugcgauaacgcgggcucuguguccuuuuucccccaagccgagaccuguaaggucugcagcaauagaguguuuugcgacacgaugaacucucugacacuuccuagcgaaguuaaucuguguaacaucgauauuuucaaucccaaauaugacugcaagaucaugaccuccaaaaccgaugugucuagcuccgucauuacaagccucggggcuaucgugucuuguuacggaaagaccaaaugcacagccuccaacaagaauaagggcauuaucaaaacguuuagcaacgggugugacuaugucucuaauaagggaguggacaccguuuccgugggcaacacacuguacuaugucaacaaacaggagggccagagccuuuacgugaagggggagccuaucauuaauuucuaugauccccugguuuuuccguccgacgaauuugaugcuucuaucagccaagugaacgagaaaauuaaucagucccucgccuucauccggaagucugacgaacugcugcacaacgucaaugugggaaagagcaccacaaacauuaugaucaccacgauuaucaucgugauuaucguuauucuccugcuucugaucgccgucggccucuuccuguacugcaaagcucgcuccaccccugugacacugagcaaggaucagcuuucugggauuaauaacaucgcguucuccaauugaggacuaguacuggcugcaucucccuuuccucuguccuccauccuucucccaggauggugaagggggaccugguacccagugauccccaccccaggauccuaaaucaugacuuaccugcuaauaaaaacucauuggaaaagugagaagaucuaaaaaaaaaaaaaaaaaaaaaaaaaaaaaaaaaaaaaaaaaaaaaaaaaaaaaaaaaaaaaaaaugcaucccccccccccccccccccccccccccccccaaaggcucuuuucagagccaccagaauu

SEQ ID NO: 17845 - RNA, 1977 nt, Artificial Sequence
  mRNA product Design e-6 comprising derived and/or modified sequence from HRSV(Memphis-37)__AIY60640.1__F_DSCav1_mut6 (opt6)
gggagagcggcucggccauuuugucccagucaguccggaggcugcggcugcagaaguaccgccugcggaguaacugcaaagaagcuuaccauggaacuaccaauuuuaaaaacaaacgcaauuacaacuauacucgcagcaguaacauuauguuucgccucaucccaaaacauaacagaagaauuuuaccaaucaacaugcagcgcaguaucaaaaggauaucucggagcauuacgaacagguugguacacaucuguaaucacuauagaacuaucaaacauaaaagaaaacaaaugcaauggaaccgacgcaaaaguaaaauuaauaaaacaagaacucgauaaauacaaaaaugcaguaacagaccuccaaaugcucauguguucaacaccagccgcaggaucagguuccgccauagcaucuggcauagcaguaugcaaaguacuccacuuagaaggagaaguuaacaaaauaaaaaacgcacuauuaucaacaaacaaagcaguaguaucccucucaaacggagucucaguauuaacauucaaaguauuagaccuaaaaaacuacauagacaaacaacuacuuccaauacucaacaaacaaucaugcucaauaccaaacccagaaaccguaauggaauuucaacaaaaaaacaaccgacuacuagaaaucacacgagaauuuucaguaaacgccggugucacaacuccaguaucaacuuauauguuaaccaacucagaacuauuaucauuaauaaacgauaugcccauaacuaacgaccaaaaaaaauuaaugucaaacaacguacaaauaguacgccaacaaaguuacucaauaaugugcaucauaaaagaagaaguauuagcguacguuguacaacuaccucuauacggagucauagacacaccaugcuggaaacuucacacaucaccacuauguacaacaaacacaaaagaaggcaguaacauaugccuaacaagaacagaccguggaugguauugugacaacgcuggaucuguaucauucuucccucaagcagaaaccuguaaaguuugcucaaacagagucuucugugacacaaugaacucucuaacacuaccuuccgaagugaaccucuguaacauagacauauucaauccaaaauaugauugcaaaauaaugacuucaaaaacagauguaucauccucuguuauaacaucauuaggcgccauaguuucaugcuacggaaaaacuaaaugcacagcaucaaacaaaaacaaaggaauaauaaaaaccuucucaaauggaugcgacuacguaagcaacaaaggcguagacacaguaucaguagguaauacauuauacuacguaaacaaacaagaaggacaaucacuuuauguuaaaggagaaccuauaauaaacuucuacgacccacuuguauuuccauccgaugaauuugacgcaucuauaucacaagucaacgaaaaaauaaaccaaucauuagcauucauucgaaaauccgaugaacuacuccauaacguaaaugucggaaaaucaacaaccaacauaaugaucacaacaauaaucauagugauaauaguaauacuccuacuacuaaucgcaguaggucuauuccuauauuguaaagcaagaucuacuccaguuacacucucuaaagaccaauuaagcgguaucaacaacaucgccuucagcaauuaaggacuaguacuggcugcaucucccuuuccucuguccuccauccuucucccaggauggugaagggggaccugguacccagugauccccaccccaggauccuaaaucaugacuuaccugcuaauaaaaacucauuggaaaagugagaagaucuaaaaaaaaaaaaaaaaaaaaaaaaaaaaaaaaaaaaaaaaaaaaaaaaaaaaaaaaaaaaaaaaugcaucccccccccccccccccccccccccccccccaaaggcucuuuucagagccaccagaauu

SEQ ID NO: 17846 - RNA, 1977 nt, Artificial Sequence
  mRNA product Design e-6 comprising derived and/or modified sequence from HRSV(Memphis-37)__AIY60640.1__F_DSCav1_mut6 (opt11)
gggagagcggcucggccauuuugucccagucaguccggaggcugcggcugcagaaguaccgccugcggaguaacugcaaagaagcuuaccauggagcugcccauccucaagaccaacgccaucaccacgauccuggccgcggugacccugugcuucgcgagcucccaaaacaucaccgaggaguucuaccagagcacgugcuccgccgucagcaagggcuaccucggggcccugcgcaccggcugguacaccuccgugaucaccaucgagcugagcaacaucaaggaaaacaagugcaacgggacggacgcaaaggugaagcucaucaagcaggagcuggauaaguacaagaacgcggucacggaccugcagaugcucaugugcuccaccccggccgccggcagcggguccgccaucgcguccggcaucgccgugugcaagguguugcaccuggagggcgaggucaacaagaucaagaacgcccuccuuuccaccaauaaggcuguugugagccuguccaacggggucagcgugcucaccuucaaggugcuggaccugaagaacuacaucgacaagcagcuccugcccauccugaacaagcaguccugcagcauccccaaccccgagacagucauggaguuccagcagaagaacaaccggcuccuggagaucacccgcgaguucuccguuaacgccggggugaccaccccgguaagcacauacaugcugaccaacagcgagcuccugagccugaucaacgacaugcccaucaccaacgaccagaagaagcucaugagcaacaacgugcagaucgugcggcagcaguccuacagcaucaugugcaucaucaaggaggagguccuggcguacguggugcaacugccccucuacggggucaucgacacccccugcuggaagcugcacacguccccgcugugcaccaccaacaccaaggagggcagcaacaucugccucacgcgcaccgaccgggggugguacugcgacaacgcaggcuccgugagcuucuucccccaggccgagaccugcaaggugugcuccaaccgcgucuucugcgacaccaugaacagccugacgcugcccuccgaggugaaccucugcaacaucgacaucuucaaccccaaguacgacuguaagaucaugaccagcaagaccgaugucuccagcuccgugaucaccagccugggcgccauaguguccuguuaugggaagacgaagugcaccgccagcaacaagaacaaaggcaucaucaagaccuucuccaacgggugcgacuacgucagcaacaagggcguggacacaguguccgucggcaacacgcuguacuacgugaacaagcaggaggggcagagccucuacgugaagggcgagccgaucaucaacuucuacgauccccuggucuuccccagcgacgaguucgacgcguccaucagccaagugaacgagaagaucaaccagucccuggccuucauccgcaagagcgacgagcuccugcacaacgugaacgucgggaaguccaccaccaacaucaugaucaccaccaucaucaucgugaucaucgucauccugcuccugcugaucgccgucggccucuuccuguacugcaaggcccggagcacgcccgugacccuguccaaggaccagcugucgggcaucaacaacaucgccuucuccaacugaggacuaguacuggcugcaucucccuuuccucuguccuccauccuucucccaggauggugaagggggaccugguacccagugauccccaccccaggauccuaaaucaugacuuaccugcuaauaaaaacucauuggaaaagugagaagaucuaaaaaaaaaaaaaaaaaaaaaaaaaaaaaaaaaaaaaaaaaaaaaaaaaaaaaaaaaaaaaaaaugcaucccccccccccccccccccccccccccccccaaaggcucuuuucagagccaccagaauu

SEQ ID NO: 17847 - RNA, 2193 nt, Artificial Sequence
  mRNA product Design f-1 comprising derived and/or modified sequence from HRSV(Memphis-37)__AIY60640.1__F_DSCav1_mut6 (opt1)
gggagagcggcucggccauuuugucccagucaguccggaggcugcggcugcagaaguaccgccugcggaguaacugcaaagaagcuuaccauggagcugcccauccucaagaccaacgccaucaccacgauccuggccgcggugacccugugcuucgccagcucccagaacaucaccgaggaguucuaccagagcacgugcuccgccgucagcaagggcuaccucggcgcccugcgcaccgggugguacaccagcgugaucaccaucgagcuguccaacaucaaggagaacaagugcaacggcaccgacgccaaggugaagcucaucaagcaggagcuggacaaguacaagaacgcggucacggaccugcagaugcugaugugcagcaccccggccgccggcuccgggagcgcgaucgccuccggcaucgccgucugcaaggugcugcaccucgagggcgaggugaacaagaucaagaacgcccugcuguccaccaacaaggccgucgugagccucuccaacggggugagcguccugaccuucaaggugcuggaccucaagaacuacaucgacaagcagcugcugcccauccugaacaagcagagcugcuccauccccaaccccgagaccgucauggaguuccagcagaagaacaaccgccuccuggagaucacgcgggaguucagcgugaacgcgggcgugaccacccccgucuccaccuacaugcugacgaacagcgagcuccugucccugaucaacgacaugccgaucaccaacgaccagaagaagcucaugagcaacaacgugcagaucgugcgccagcaguccuacagcaucaugugcaucaucaaggaggagguccuggccuacguggugcagcugccccucuacggggucaucgacacccccugcuggaagcugcacaccagcccccugugcacgaccaacaccaaggagggcuccaacaucugccucacccggacggaccgcgggugguacugcgacaacgccggcagcguguccuucuucccgcaggccgagaccugcaaggucugcagcaaccggguguucugcgacaccaugaacucccugacccugcccagcgaggugaaccucugcaacaucgacaucuucaaccccaaguacgacugcaagaucaugacguccaagaccgacgucagcuccagcgugaucaccucccugggcgccaucgugagcugcuacgggaagaccaagugcacggcgagcaacaagaacaagggcaucaucaagaccuucuccaacgggugcgacuacgucagcaacaagggcguggacaccguguccgucggcaacacccuguacuacgugaacaagcaggagggccagagccucuacgugaagggggagcccaucaucaacuucuacgacccgcuggucuuccccuccgacgaguucgacgccagcaucucccaggugaacgagaagaucaaccagagccuggccuucauccggaaguccgacgagcuccugcacaacgugaacgucggcaagagcaccacgaacaucaugaucaccaccaucaucaucgugaucaucgugauccugcugcuccugaucgccgucgggcuguuccucuacugcaaggcccgcuccacccccgugacgcugagcaaggaccagcuguccgggaucaacaacaucgcguucagcaacugaggacuagugaagggaacacccaaauuuaauucagccuuaagcacaauuaauuaagagugaaacguaauuguacaagcaguuggucacccaccauagggcaugaucaacaccgcaaccuuuccuuuuucccccagugauucugaaaaaccccucuucccuucagcuugcuuagauguuccaaauuuaguaagcuuaaggcggccuacagaagaaaaagaaaaaaaaggccacaaaaguucccucucacuuucaguaaauaaaauaaaagcagcaacagaaauaaagaaauaaaugaaauucaaaaugaaauaaauauuguguugugcagcauuaaaaaaucaauaaaaauuaaaaaugagcaagaucuaaaaaaaaaaaaaaaaaaaaaaaaaaaaaaaaaaaaaaaaaaaaaaaaaaaaaaaaaaaaaaaaugcaucccccccccccccccccccccccccccccccaaaggcucuuuucagagccaccagaauu

SEQ ID NO: 17848 - RNA, 2193 nt, Artificial Sequence
  mRNA product Design f-1 comprising derived and/or modified sequence from HRSV(Memphis-37)__AIY60640.1__F_DSCav1_mut6 (opt1)
gggagagcggcucggccauuuugucccagucaguccggaggcugcggcugcagaaguaccgccugcggaguaacugcaaagaagcuuaccauggagcugcccauccucaagaccaacgccaucaccacgauccuggccgcggugacccugugcuucgccagcucccagaacaucaccgaggaguucuaccagagcacgugcuccgccgucagcaagggcuaccucggggcccugcgcaccggcugguacaccuccgugaucaccaucgagcugagcaacaucaaggagaacaagugcaacgggaccgacgccaaggugaagcucaucaagcaggagcuggacaaguacaagaacgcggucacggaccugcagaugcucaugugcuccaccccggccgccggcagcggguccgccaucgcgagcggcaucgccgugugcaaggugcugcaccuggagggcgaggucaacaagaucaagaacgcccuccuguccaccaacaaggccguggugagccuguccaacggggucagcgugcucaccuucaaggugcuggaccugaagaacuacaucgacaagcagcuccugcccauccugaacaagcaguccugcagcauccccaaccccgagacggucauggaguuccagcagaagaacaaccggcuccuggagaucacccgcgaguucuccgugaacgccggcgugaccaccccggucagcacguacaugcugaccaacuccgagcuccugagccugaucaacgacaugcccaucaccaacgaccagaagaagcucaugagcaacaacgugcagaucgugcggcagcaguccuacagcaucaugugcaucaucaaggaggagguccuggcguacguggugcagcugccccucuacggggucaucgacacccccugcuggaagcugcacacguccccgcugugcaccaccaacaccaaggagggcagcaacaucugccucacgcgcaccgaccgggggugguacugcgacaacgccggcuccgugagcuucuucccccaggccgagaccugcaaggugugcuccaaccgcgucuucugcgacaccaugaacagccugacgcugcccuccgaggugaaccucugcaacaucgacaucuucaaccccaaguacgacugcaagaucaugaccagcaagaccgacgucuccagcuccgugaucaccagccugggcgccaucguguccugcuacgggaagacgaagugcaccgccagcaacaagaacaagggcaucaucaagaccuucuccaacgggugcgacuacgucagcaacaagggcguggacaccguguccgucggcaacacgcuguacuacgugaacaagcaggaggggcagagccucuacgugaagggcgagccgaucaucaacuucuacgacccccuggucuuccccagcgacgaguucgacgcguccaucagccaggugaacgagaagaucaaccagucccuggccuucauccgcaagagcgacgagcuccugcacaacgugaacgucgggaaguccaccaccaacaucaugaucaccaccaucaucaucgugaucaucgugauccugcuccugcugaucgccgucggccucuuccuguacugcaaggcccggagcacgcccgugacccuguccaaggaccagcugagcgggaucaacaacaucgccuucuccaacugaggacuagugaagggaacacccaaauuuaauucagccuuaagcacaauuaauuaagagugaaacguaauuguacaagcaguuggucacccaccauagggcaugaucaacaccgcaaccuuuccuuuuucccccagugauucugaaaaaccccucuucccuucagcuugcuuagauguuccaaauuuaguaagcuuaaggcggccuacagaagaaaaagaaaaaaaaggccacaaaaguucccucucacuuucaguaaauaaaauaaaagcagcaacagaaauaaagaaauaaaugaaauucaaaaugaaauaaauauuguguugugcagcauuaaaaaaucaauaaaaauuaaaaaugagcaagaucuaaaaaaaaaaaaaaaaaaaaaaaaaaaaaaaaaaaaaaaaaaaaaaaaaaaaaaaaaaaaaaaaugcaucccccccccccccccccccccccccccccccaaaggcucuuuucagagccaccagaauu

SEQ ID NO: 17849 - RNA, 2193 nt, Artificial Sequence
  mRNA product Design f-1 comprising derived and/or modified sequence from HRSV(Memphis-37)__AIY60640.1__F_DSCav1_mut6 (opt2)
gggagagcggcucggccauuuugucccagucaguccggaggcugcggcugcagaaguaccgccugcggaguaacugcaaagaagcuuaccauggagcuccccauccucaagaccaacgccaucaccaccauccucgccgccgucacccucugcuucgccuccucccagaacaucaccgaggaguucuaccaguccaccugcuccgccgucuccaagggcuaccucggcgcccuccgcaccggcugguacaccuccgucaucaccaucgagcucuccaacaucaaggagaacaagugcaacggcaccgacgccaaggucaagcucaucaagcaggagcucgacaaguacaagaacgccgucaccgaccuccagaugcucaugugcuccacccccgccgccggcuccggcuccgccaucgccuccggcaucgccgucugcaagguccuccaccucgagggcgaggucaacaagaucaagaacgcccuccucuccaccaacaaggccgucgucucccucuccaacggcgucuccguccucaccuucaagguccucgaccucaagaacuacaucgacaagcagcuccuccccauccucaacaagcaguccugcuccauccccaaccccgagaccgucauggaguuccagcagaagaacaaccgccuccucgagaucacccgcgaguucuccgucaacgccggcgucaccacccccgucuccaccuacaugcucaccaacuccgagcuccucucccucaucaacgacaugcccaucaccaacgaccagaagaagcucauguccaacaacguccagaucguccgccagcaguccuacuccaucaugugcaucaucaaggaggagguccucgccuacgucguccagcucccccucuacggcgucaucgacacccccugcuggaagcuccacaccuccccccucugcaccaccaacaccaaggagggcuccaacaucugccucacccgcaccgaccgcggcugguacugcgacaacgccggcuccgucuccuucuucccccaggccgagaccugcaaggucugcuccaaccgcgucuucugcgacaccaugaacucccucacccuccccuccgaggucaaccucugcaacaucgacaucuucaaccccaaguacgacugcaagaucaugaccuccaagaccgacgucuccuccuccgucaucaccucccucggcgccaucgucuccugcuacggcaagaccaagugcaccgccuccaacaagaacaagggcaucaucaagaccuucuccaacggcugcgacuacgucuccaacaagggcgucgacaccgucuccgucggcaacacccucuacuacgucaacaagcaggagggccagucccucuacgucaagggcgagcccaucaucaacuucuacgacccccucgucuuccccuccgacgaguucgacgccuccaucucccaggucaacgagaagaucaaccagucccucgccuucauccgcaaguccgacgagcuccuccacaacgucaacgucggcaaguccaccaccaacaucaugaucaccaccaucaucaucgucaucaucgucauccuccuccuccucaucgccgucggccucuuccucuacugcaaggcccgcuccacccccgucacccucuccaaggaccagcucuccggcaucaacaacaucgccuucuccaacugaggacuagugaagggaacacccaaauuuaauucagccuuaagcacaauuaauuaagagugaaacguaauuguacaagcaguuggucacccaccauagggcaugaucaacaccgcaaccuuuccuuuuucccccagugauucugaaaaaccccucuucccuucagcuugcuuagauguuccaaauuuaguaagcuuaaggcggccuacagaagaaaaagaaaaaaaaggccacaaaaguucccucucacuuucaguaaauaaaauaaaagcagcaacagaaauaaagaaauaaaugaaauucaaaaugaaauaaauauuguguugugcagcauuaaaaaaucaauaaaaauuaaaaaugagcaagaucuaaaaaaaaaaaaaaaaaaaaaaaaaaaaaaaaaaaaaaaaaaaaaaaaaaaaaaaaaaaaaaaaugcaucccccccccccccccccccccccccccccccaaaggcucuuuucagagccaccagaauu

SEQ ID NO: 17850 - RNA, 2193 nt, Artificial Sequence
  mRNA product Design f-1 comprising derived and/or modified sequence from HRSV(Memphis-37)__AIY60640.1__F_DSCav1_mut6 (opt3)
gggagagcggcucggccauuuugucccagucaguccggaggcugcggcugcagaaguaccgccugcggaguaacugcaaagaagcuuaccauggagcugcccauccucaagaccaacgccauuacaacuauacuugcugcagugacgcugugcuucgccagcucccagaauaucaccgaagaguuuuaccaaucuacauguucagcggucaguaaaggcuauuugggggcuuuaagaacuggaugguacaccagcguuauuacaaucgaacuguccaacauuaaggagaauaaaugcaacgguaccgacgccaaggugaaacuaaucaagcaggaacucgauaaguauaaaaaugcaguaacugaccugcagaugcuuauguguucuacuccugccgcuggcucggggucagcaauagccagcggaaucgcugugugcaagguccugcacuuggagggcgaggugaacaaaauuaagaaugcccuccugaguaccaacaaagcgguugugucccugucuaauggugucagcgugcucacguucaagguauuagaucugaagaacuacaucgacaaacagcuuuugccaauucugaauaagcaauccuguucaaucccgaaccccgaaacuguuauggaguuucagcagaaaaauaacaggcuacucgaaauaacccgggaguucagugugaaugcaggggucacaacuccugugagcaccuauaugcugacaaacucugagcuucuguccuugauuaacgauaugccaaucaccaaugaccagaagaaacucaugucaaacaaugugcaaauuguccgccagcagagcuacaguaucaugugcaucauuaaggaagagguucuggccuaugugguacaguuaccccuguacggagugauagauacgccuuguuggaaacuccauacuucuccacuuugcacaaccaacacuaaggaaggcuccaauaucugucugacacgaaccgaccguggcugguacugcgauaacgcugggagcgucucguuuuucccccaagccgagacguguaaggugugcucuaauagaguuuucugcgacaccaugaacuccuugacacuaccuucagaagugaaucuguguaacauugauaucuucaauccaaaauaugacugcaagauaaugacaaguaaaaccgaugucagcuccucugugauuacaagccucggagcaaucguaucauguuacgguaagacuaaaugcaccgcuaguaacaagaauaagggcaucauuaaaacauuuuccaacgggugugacuauguuagcaauaagggaguggacaccgucucugugggcaacacucuguacuaugucaacaaacaggagggucagucacuuuacgugaagggggagccgaucauuaauuucuaugauccccugguuuuuccuagugacgaauuugaugccagcauaucccaagugaacgagaaaaucaaucagucuuuggcguuuauuaggaagucggacgaacuccugcacaacguaaaugucggaaagagcacgacaaacaucaugaucaccacuauuauaaucgugauuaucguuauuuuacugcuacucaucgccgugggccuguuccuuuacugcaaagcacgguccaccccagucacauugucaaaggaucagcugaguggcauaaauaacaucgcuuucucuaauugaggacuagugaagggaacacccaaauuuaauucagccuuaagcacaauuaauuaagagugaaacguaauuguacaagcaguuggucacccaccauagggcaugaucaacaccgcaaccuuuccuuuuucccccagugauucugaaaaaccccucuucccuucagcuugcuuagauguuccaaauuuaguaagcuuaaggcggccuacagaagaaaaagaaaaaaaaggccacaaaaguucccucucacuuucaguaaauaaaauaaaagcagcaacagaaauaaagaaauaaaugaaauucaaaaugaaauaaauauuguguugugcagcauuaaaaaaucaauaaaaauuaaaaaugagcaagaucuaaaaaaaaaaaaaaaaaaaaaaaaaaaaaaaaaaaaaaaaaaaaaaaaaaaaaaaaaaaaaaaaugcaucccccccccccccccccccccccccccccccaaaggcucuuuucagagccaccagaauu

SEQ ID NO: 17851 - RNA, 2193 nt, Artificial Sequence
  mRNA product Design f-1 comprising derived and/or modified sequence from HRSV(Memphis-37)__AIY60640.1__F_DSCav1_mut6 (opt4)
gggagagcggcucggccauuuugucccagucaguccggaggcugcggcugcagaaguaccgccugcggaguaacugcaaagaagcuuaccauggagcugcccauccugaagaccaacgccaucaccaccauccuggccgccgugacccugugcuucgccagcagccagaacaucaccgaggaguucuaccagagcaccugcagcgccgugagcaagggcuaccugggcgcccugagaaccggcugguacaccagcgugaucaccaucgagcugagcaacaucaaggagaacaagugcaacggcaccgacgccaaggugaagcugaucaagcaggagcuggacaaguacaagaacgccgugaccgaccugcagaugcugaugugcagcacccccgccgccggcagcggcagcgccaucgccagcggcaucgccgugugcaaggugcugcaccuggagggcgaggugaacaagaucaagaacgcccugcugagcaccaacaaggccguggugagccugagcaacggcgugagcgugcugaccuucaaggugcuggaccugaagaacuacaucgacaagcagcugcugcccauccugaacaagcagagcugcagcauccccaaccccgagaccgugauggaguuccagcagaagaacaacagacugcuggagaucaccagagaguucagcgugaacgccggcgugaccacccccgugagcaccuacaugcugaccaacagcgagcugcugagccugaucaacgacaugcccaucaccaacgaccagaagaagcugaugagcaacaacgugcagaucgugagacagcagagcuacagcaucaugugcaucaucaaggaggaggugcuggccuacguggugcagcugccccuguacggcgugaucgacacccccugcuggaagcugcacaccagcccccugugcaccaccaacaccaaggagggcagcaacaucugccugaccagaaccgacagaggcugguacugcgacaacgccggcagcgugagcuucuucccccaggccgagaccugcaaggugugcagcaacagaguguucugcgacaccaugaacagccugacccugcccagcgaggugaaccugugcaacaucgacaucuucaaccccaaguacgacugcaagaucaugaccagcaagaccgacgugagcagcagcgugaucaccagccugggcgccaucgugagcugcuacggcaagaccaagugcaccgccagcaacaagaacaagggcaucaucaagaccuucagcaacggcugcgacuacgugagcaacaagggcguggacaccgugagcgugggcaacacccuguacuacgugaacaagcaggagggccagagccuguacgugaagggcgagcccaucaucaacuucuacgacccccugguguuccccagcgacgaguucgacgccagcaucagccaggugaacgagaagaucaaccagagccuggccuucaucagaaagagcgacgagcugcugcacaacgugaacgugggcaagagcaccaccaacaucaugaucaccaccaucaucaucgugaucaucgugauccugcugcugcugaucgccgugggccuguuccuguacugcaaggccagaagcacccccgugacccugagcaaggaccagcugagcggcaucaacaacaucgccuucagcaacugaggacuagugaagggaacacccaaauuuaauucagccuuaagcacaauuaauuaagagugaaacguaauuguacaagcaguuggucacccaccauagggcaugaucaacaccgcaaccuuuccuuuuucccccagugauucugaaaaaccccucuucccuucagcuugcuuagauguuccaaauuuaguaagcuuaaggcggccuacagaagaaaaagaaaaaaaaggccacaaaaguucccucucacuuucaguaaauaaaauaaaagcagcaacagaaauaaagaaauaaaugaaauucaaaaugaaauaaauauuguguugugcagcauuaaaaaaucaauaaaaauuaaaaaugagcaagaucuaaaaaaaaaaaaaaaaaaaaaaaaaaaaaaaaaaaaaaaaaaaaaaaaaaaaaaaaaaaaaaaaugcaucccccccccccccccccccccccccccccccaaaggcucuuuucagagccaccagaauu

SEQ ID NO: 17852 - RNA, 2193 nt, Artificial Sequence
  mRNA product Design f-1 comprising derived and/or modified sequence from HRSV(Memphis-37)__AIY60640.1__F_DSCav1_mut6 (opt5)
gggagagcggcucggccauuuugucccagucaguccggaggcugcggcugcagaaguaccgccugcggaguaacugcaaagaagcuuaccauggagcugcccauccucaagaccaacgccauuacaacgauccuggcugccgugacccuuugcuucgcgagcucccagaauauuacagaagaguuuuaccaaucuaccuguagcgcugucuccaaaggcuaucugggggcccucagaacaggaugguacaccucuguuaucacaauugaacugagcaacaucaaggagaauaaaugcaacggcaccgacgccaaggugaaacuuaucaagcaggaacuggauaaguauaaaaaugcugugacggaccuccagaugcugauguguuccaccccugccgcugggucuggaagcgccauugcguccggcaucgccgucugcaaggugcugcaccucgagggggagguuaacaaaauuaagaaugcucugcuuagcacaaacaaagccguggucucucuguccaauggagugagcguucucaccuucaaggugcuggaucuuaagaacuacaucgacaaacagcugcucccgauucugaauaagcaaucuuguuccauccccaacccugaaacagucauggaguuucagcagaaaaauaaccggcugcucgaaauuacccgcgaguucagcgugaaugcuggcgugacgacacccgucucuaccuauaugcugacaaacuccgagcuucugagccucaucaacgauaugccuaucaccaaugaccagaagaaacugauguccaacaauguucaaauugugagacagcagucuuacagcaucaugugcauuaucaaggaagaggugcuugccuaugucgugcagcugccccucuacggcguuauugauaccccuuguuggaaacugcauacauccccgcugugcacgaccaacacaaaggaagggagcaauaucugucucacccggacagaccgcggaugguacugcgauaacgcgggcucuguguccuuuuucccccaagccgagaccuguaaggucugcagcaauagaguguuuugcgacacgaugaacucucugacacuuccuagcgaaguuaaucuguguaacaucgauauuuucaaucccaaauaugacugcaagaucaugaccuccaaaaccgaugugucuagcuccgucauuacaagccucggggcuaucgugucuuguuacggaaagaccaaaugcacagccuccaacaagaauaagggcauuaucaaaacguuuagcaacgggugugacuaugucucuaauaagggaguggacaccguuuccgugggcaacacacuguacuaugucaacaaacaggagggccagagccuuuacgugaagggggagccuaucauuaauuucuaugauccccugguuuuuccguccgacgaauuugaugcuucuaucagccaagugaacgagaaaauuaaucagucccucgccuucauccggaagucugacgaacugcugcacaacgucaaugugggaaagagcaccacaaacauuaugaucaccacgauuaucaucgugauuaucguuauucuccugcuucugaucgccgucggccucuuccuguacugcaaagcucgcuccaccccugugacacugagcaaggaucagcuuucugggauuaauaacaucgcguucuccaauugaggacuagugaagggaacacccaaauuuaauucagccuuaagcacaauuaauuaagagugaaacguaauuguacaagcaguuggucacccaccauagggcaugaucaacaccgcaaccuuuccuuuuucccccagugauucugaaaaaccccucuucccuucagcuugcuuagauguuccaaauuuaguaagcuuaaggcggccuacagaagaaaaagaaaaaaaaggccacaaaaguucccucucacuuucaguaaauaaaauaaaagcagcaacagaaauaaagaaauaaaugaaauucaaaaugaaauaaauauuguguugugcagcauuaaaaaaucaauaaaaauuaaaaaugagcaagaucuaaaaaaaaaaaaaaaaaaaaaaaaaaaaaaaaaaaaaaaaaaaaaaaaaaaaaaaaaaaaaaaaugcaucccccccccccccccccccccccccccccccaaaggcucuuuucagagccaccagaauu

SEQ ID NO: 17853 - RNA, 2193 nt, Artificial Sequence
  mRNA product Design f-1 comprising derived and/or modified sequence from HRSV(Memphis-37)__AIY60640.1__F_DSCav1_mut6 (opt6)
gggagagcggcucggccauuuugucccagucaguccggaggcugcggcugcagaaguaccgccugcggaguaacugcaaagaagcuuaccauggaacuaccaauuuuaaaaacaaacgcaauuacaacuauacucgcagcaguaacauuauguuucgccucaucccaaaacauaacagaagaauuuuaccaaucaacaugcagcgcaguaucaaaaggauaucucggagcauuacgaacagguugguacacaucuguaaucacuauagaacuaucaaacauaaaagaaaacaaaugcaauggaaccgacgcaaaaguaaaauuaauaaaacaagaacucgauaaauacaaaaaugcaguaacagaccuccaaaugcucauguguucaacaccagccgcaggaucagguuccgccauagcaucuggcauagcaguaugcaaaguacuccacuuagaaggagaaguuaacaaaauaaaaaacgcacuauuaucaacaaacaaagcaguaguaucccucucaaacggagucucaguauuaacauucaaaguauuagaccuaaaaaacuacauagacaaacaacuacuuccaauacucaacaaacaaucaugcucaauaccaaacccagaaaccguaauggaauuucaacaaaaaaacaaccgacuacuagaaaucacacgagaauuuucaguaaacgccggugucacaacuccaguaucaacuuauauguuaaccaacucagaacuauuaucauuaauaaacgauaugcccauaacuaacgaccaaaaaaaauuaaugucaaacaacguacaaauaguacgccaacaaaguuacucaauaaugugcaucauaaaagaagaaguauuagcguacguuguacaacuaccucuauacggagucauagacacaccaugcuggaaacuucacacaucaccacuauguacaacaaacacaaaagaaggcaguaacauaugccuaacaagaacagaccguggaugguauugugacaacgcuggaucuguaucauucuucccucaagcagaaaccuguaaaguuugcucaaacagagucuucugugacacaaugaacucucuaacacuaccuuccgaagugaaccucuguaacauagacauauucaauccaaaauaugauugcaaaauaaugacuucaaaaacagauguaucauccucuguuauaacaucauuaggcgccauaguuucaugcuacggaaaaacuaaaugcacagcaucaaacaaaaacaaaggaauaauaaaaaccuucucaaauggaugcgacuacguaagcaacaaaggcguagacacaguaucaguagguaauacauuauacuacguaaacaaacaagaaggacaaucacuuuauguuaaaggagaaccuauaauaaacuucuacgacccacuuguauuuccauccgaugaauuugacgcaucuauaucacaagucaacgaaaaaauaaaccaaucauuagcauucauucgaaaauccgaugaacuacuccauaacguaaaugucggaaaaucaacaaccaacauaaugaucacaacaauaaucauagugauaauaguaauacuccuacuacuaaucgcaguaggucuauuccuauauuguaaagcaagaucuacuccaguuacacucucuaaagaccaauuaagcgguaucaacaacaucgccuucagcaauuaaggacuagugaagggaacacccaaauuuaauucagccuuaagcacaauuaauuaagagugaaacguaauuguacaagcaguuggucacccaccauagggcaugaucaacaccgcaaccuuuccuuuuucccccagugauucugaaaaaccccucuucccuucagcuugcuuagauguuccaaauuuaguaagcuuaaggcggccuacagaagaaaaagaaaaaaaaggccacaaaaguucccucucacuuucaguaaauaaaauaaaagcagcaacagaaauaaagaaauaaaugaaauucaaaaugaaauaaauauuguguugugcagcauuaaaaaaucaauaaaaauuaaaaaugagcaagaucuaaaaaaaaaaaaaaaaaaaaaaaaaaaaaaaaaaaaaaaaaaaaaaaaaaaaaaaaaaaaaaaaugcaucccccccccccccccccccccccccccccccaaaggcucuuuucagagccaccagaauu

SEQ ID NO: 17854 - RNA, 2193 nt, Artificial Sequence
  mRNA product Design f-1 comprising derived and/or modified sequence from HRSV(Memphis-37)__AIY60640.1__F_DSCav1_mut6 (opt11)
gggagagcggcucggccauuuugucccagucaguccggaggcugcggcugcagaaguaccgccugcggaguaacugcaaagaagcuuaccauggagcugcccauccucaagaccaacgccaucaccacgauccuggccgcggugacccugugcuucgcgagcucccaaaacaucaccgaggaguucuaccagagcacgugcuccgccgucagcaagggcuaccucggggcccugcgcaccggcugguacaccuccgugaucaccaucgagcugagcaacaucaaggaaaacaagugcaacgggacggacgcaaaggugaagcucaucaagcaggagcuggauaaguacaagaacgcggucacggaccugcagaugcucaugugcuccaccccggccgccggcagcggguccgccaucgcguccggcaucgccgugugcaagguguugcaccuggagggcgaggucaacaagaucaagaacgcccuccuuuccaccaauaaggcuguugugagccuguccaacggggucagcgugcucaccuucaaggugcuggaccugaagaacuacaucgacaagcagcuccugcccauccugaacaagcaguccugcagcauccccaaccccgagacagucauggaguuccagcagaagaacaaccggcuccuggagaucacccgcgaguucuccguuaacgccggggugaccaccccgguaagcacauacaugcugaccaacagcgagcuccugagccugaucaacgacaugcccaucaccaacgaccagaagaagcucaugagcaacaacgugcagaucgugcggcagcaguccuacagcaucaugugcaucaucaaggaggagguccuggcguacguggugcaacugccccucuacggggucaucgacacccccugcuggaagcugcacacguccccgcugugcaccaccaacaccaaggagggcagcaacaucugccucacgcgcaccgaccgggggugguacugcgacaacgcaggcuccgugagcuucuucccccaggccgagaccugcaaggugugcuccaaccgcgucuucugcgacaccaugaacagccugacgcugcccuccgaggugaaccucugcaacaucgacaucuucaaccccaaguacgacuguaagaucaugaccagcaagaccgaugucuccagcuccgugaucaccagccugggcgccauaguguccuguuaugggaagacgaagugcaccgccagcaacaagaacaaaggcaucaucaagaccuucuccaacgggugcgacuacgucagcaacaagggcguggacacaguguccgucggcaacacgcuguacuacgugaacaagcaggaggggcagagccucuacgugaagggcgagccgaucaucaacuucuacgauccccuggucuuccccagcgacgaguucgacgcguccaucagccaagugaacgagaagaucaaccagucccuggccuucauccgcaagagcgacgagcuccugcacaacgugaacgucgggaaguccaccaccaacaucaugaucaccaccaucaucaucgugaucaucgucauccugcuccugcugaucgccgucggccucuuccuguacugcaaggcccggagcacgcccgugacccuguccaaggaccagcugucgggcaucaacaacaucgccuucuccaacugaggacuagugaagggaacacccaaauuuaauucagccuuaagcacaauuaauuaagagugaaacguaauuguacaagcaguuggucacccaccauagggcaugaucaacaccgcaaccuuuccuuuuucccccagugauucugaaaaaccccucuucccuucagcuugcuuagauguuccaaauuuaguaagcuuaaggcggccuacagaagaaaaagaaaaaaaaggccacaaaaguucccucucacuuucaguaaauaaaauaaaagcagcaacagaaauaaagaaauaaaugaaauucaaaaugaaauaaauauuguguugugcagcauuaaaaaaucaauaaaaauuaaaaaugagcaagaucuaaaaaaaaaaaaaaaaaaaaaaaaaaaaaaaaaaaaaaaaaaaaaaaaaaaaaaaaaaaaaaaaugcaucccccccccccccccccccccccccccccccaaaggcucuuuucagagccaccagaauu

SEQ ID NO: 17855 - RNA, 1973 nt, Artificial Sequence
  mRNA product Design f-2 comprising derived and/or modified sequence from HRSV(Memphis-37)__AIY60640.1__F_DSCav1_mut6 (opt1)
gggagagcggcucggccauuuugucccagucaguccggaggcugcggcugcagaaguaccgccugcggaguaacugcaaagaagcuuaccauggagcugcccauccucaagaccaacgccaucaccacgauccuggccgcggugacccugugcuucgccagcucccagaacaucaccgaggaguucuaccagagcacgugcuccgccgucagcaagggcuaccucggcgcccugcgcaccgggugguacaccagcgugaucaccaucgagcuguccaacaucaaggagaacaagugcaacggcaccgacgccaaggugaagcucaucaagcaggagcuggacaaguacaagaacgcggucacggaccugcagaugcugaugugcagcaccccggccgccggcuccgggagcgcgaucgccuccggcaucgccgucugcaaggugcugcaccucgagggcgaggugaacaagaucaagaacgcccugcuguccaccaacaaggccgucgugagccucuccaacggggugagcguccugaccuucaaggugcuggaccucaagaacuacaucgacaagcagcugcugcccauccugaacaagcagagcugcuccauccccaaccccgagaccgucauggaguuccagcagaagaacaaccgccuccuggagaucacgcgggaguucagcgugaacgcgggcgugaccacccccgucuccaccuacaugcugacgaacagcgagcuccugucccugaucaacgacaugccgaucaccaacgaccagaagaagcucaugagcaacaacgugcagaucgugcgccagcaguccuacagcaucaugugcaucaucaaggaggagguccuggccuacguggugcagcugccccucuacggggucaucgacacccccugcuggaagcugcacaccagcccccugugcacgaccaacaccaaggagggcuccaacaucugccucacccggacggaccgcgggugguacugcgacaacgccggcagcguguccuucuucccgcaggccgagaccugcaaggucugcagcaaccggguguucugcgacaccaugaacucccugacccugcccagcgaggugaaccucugcaacaucgacaucuucaaccccaaguacgacugcaagaucaugacguccaagaccgacgucagcuccagcgugaucaccucccugggcgccaucgugagcugcuacgggaagaccaagugcacggcgagcaacaagaacaagggcaucaucaagaccuucuccaacgggugcgacuacgucagcaacaagggcguggacaccguguccgucggcaacacccuguacuacgugaacaagcaggagggccagagccucuacgugaagggggagcccaucaucaacuucuacgacccgcuggucuuccccuccgacgaguucgacgccagcaucucccaggugaacgagaagaucaaccagagccuggccuucauccggaaguccgacgagcuccugcacaacgugaacgucggcaagagcaccacgaacaucaugaucaccaccaucaucaucgugaucaucgugauccugcugcuccugaucgccgucgggcuguuccucuacugcaaggcccgcuccacccccgugacgcugagcaaggaccagcuguccgggaucaacaacaucgcguucagcaacugaggacuaguggaagcauuuuccuggcugauuaaaagaaauuacucagcuauggucaucuguuccuguuagaaggcuaugcagcauauuauauacuaugcgcauguuaugaaaugcauaauaaaaaauuuuaaaaaaucuaaaagaucuaaaaaaaaaaaaaaaaaaaaaaaaaaaaaaaaaaaaaaaaaaaaaaaaaaaaaaaaaaaaaaaaugcaucccccccccccccccccccccccccccccccaaaggcucuuuucagagccaccagaauu

SEQ ID NO: 17856 - RNA, 1973 nt, Artificial Sequence
  mRNA product Design f-2 comprising derived and/or modified sequence from HRSV(Memphis-37)__AIY60640.1__F_DSCav1_mut6 (opt1)
gggagagcggcucggccauuuugucccagucaguccggaggcugcggcugcagaaguaccgccugcggaguaacugcaaagaagcuuaccauggagcugcccauccucaagaccaacgccaucaccacgauccuggccgcggugacccugugcuucgccagcucccagaacaucaccgaggaguucuaccagagcacgugcuccgccgucagcaagggcuaccucggggcccugcgcaccggcugguacaccuccgugaucaccaucgagcugagcaacaucaaggagaacaagugcaacgggaccgacgccaaggugaagcucaucaagcaggagcuggacaaguacaagaacgcggucacggaccugcagaugcucaugugcuccaccccggccgccggcagcggguccgccaucgcgagcggcaucgccgugugcaaggugcugcaccuggagggcgaggucaacaagaucaagaacgcccuccuguccaccaacaaggccguggugagccuguccaacggggucagcgugcucaccuucaaggugcuggaccugaagaacuacaucgacaagcagcuccugcccauccugaacaagcaguccugcagcauccccaaccccgagacggucauggaguuccagcagaagaacaaccggcuccuggagaucacccgcgaguucuccgugaacgccggcgugaccaccccggucagcacguacaugcugaccaacuccgagcuccugagccugaucaacgacaugcccaucaccaacgaccagaagaagcucaugagcaacaacgugcagaucgugcggcagcaguccuacagcaucaugugcaucaucaaggaggagguccuggcguacguggugcagcugccccucuacggggucaucgacacccccugcuggaagcugcacacguccccgcugugcaccaccaacaccaaggagggcagcaacaucugccucacgcgcaccgaccgggggugguacugcgacaacgccggcuccgugagcuucuucccccaggccgagaccugcaaggugugcuccaaccgcgucuucugcgacaccaugaacagccugacgcugcccuccgaggugaaccucugcaacaucgacaucuucaaccccaaguacgacugcaagaucaugaccagcaagaccgacgucuccagcuccgugaucaccagccugggcgccaucguguccugcuacgggaagacgaagugcaccgccagcaacaagaacaagggcaucaucaagaccuucuccaacgggugcgacuacgucagcaacaagggcguggacaccguguccgucggcaacacgcuguacuacgugaacaagcaggaggggcagagccucuacgugaagggcgagccgaucaucaacuucuacgacccccuggucuuccccagcgacgaguucgacgcguccaucagccaggugaacgagaagaucaaccagucccuggccuucauccgcaagagcgacgagcuccugcacaacgugaacgucgggaaguccaccaccaacaucaugaucaccaccaucaucaucgugaucaucgugauccugcuccugcugaucgccgucggccucuuccuguacugcaaggcccggagcacgcccgugacccuguccaaggaccagcugagcgggaucaacaacaucgccuucuccaacugaggacuaguggaagcauuuuccuggcugauuaaaagaaauuacucagcuauggucaucuguuccuguuagaaggcuaugcagcauauuauauacuaugcgcauguuaugaaaugcauaauaaaaaauuuuaaaaaaucuaaaagaucuaaaaaaaaaaaaaaaaaaaaaaaaaaaaaaaaaaaaaaaaaaaaaaaaaaaaaaaaaaaaaaaaugcaucccccccccccccccccccccccccccccccaaaggcucuuuucagagccaccagaauu

SEQ ID NO: 17857 - RNA, 1973 nt, Artificial Sequence
  mRNA product Design f-2 comprising derived and/or modified sequence from HRSV(Memphis-37)__AIY60640.1__F_DSCav1_mut6 (opt2)
gggagagcggcucggccauuuugucccagucaguccggaggcugcggcugcagaaguaccgccugcggaguaacugcaaagaagcuuaccauggagcuccccauccucaagaccaacgccaucaccaccauccucgccgccgucacccucugcuucgccuccucccagaacaucaccgaggaguucuaccaguccaccugcuccgccgucuccaagggcuaccucggcgcccuccgcaccggcugguacaccuccgucaucaccaucgagcucuccaacaucaaggagaacaagugcaacggcaccgacgccaaggucaagcucaucaagcaggagcucgacaaguacaagaacgccgucaccgaccuccagaugcucaugugcuccacccccgccgccggcuccggcuccgccaucgccuccggcaucgccgucugcaagguccuccaccucgagggcgaggucaacaagaucaagaacgcccuccucuccaccaacaaggccgucgucucccucuccaacggcgucuccguccucaccuucaagguccucgaccucaagaacuacaucgacaagcagcuccuccccauccucaacaagcaguccugcuccauccccaaccccgagaccgucauggaguuccagcagaagaacaaccgccuccucgagaucacccgcgaguucuccgucaacgccggcgucaccacccccgucuccaccuacaugcucaccaacuccgagcuccucucccucaucaacgacaugcccaucaccaacgaccagaagaagcucauguccaacaacguccagaucguccgccagcaguccuacuccaucaugugcaucaucaaggaggagguccucgccuacgucguccagcucccccucuacggcgucaucgacacccccugcuggaagcuccacaccuccccccucugcaccaccaacaccaaggagggcuccaacaucugccucacccgcaccgaccgcggcugguacugcgacaacgccggcuccgucuccuucuucccccaggccgagaccugcaaggucugcuccaaccgcgucuucugcgacaccaugaacucccucacccuccccuccgaggucaaccucugcaacaucgacaucuucaaccccaaguacgacugcaagaucaugaccuccaagaccgacgucuccuccuccgucaucaccucccucggcgccaucgucuccugcuacggcaagaccaagugcaccgccuccaacaagaacaagggcaucaucaagaccuucuccaacggcugcgacuacgucuccaacaagggcgucgacaccgucuccgucggcaacacccucuacuacgucaacaagcaggagggccagucccucuacgucaagggcgagcccaucaucaacuucuacgacccccucgucuuccccuccgacgaguucgacgccuccaucucccaggucaacgagaagaucaaccagucccucgccuucauccgcaaguccgacgagcuccuccacaacgucaacgucggcaaguccaccaccaacaucaugaucaccaccaucaucaucgucaucaucgucauccuccuccuccucaucgccgucggccucuuccucuacugcaaggcccgcuccacccccgucacccucuccaaggaccagcucuccggcaucaacaacaucgccuucuccaacugaggacuaguggaagcauuuuccuggcugauuaaaagaaauuacucagcuauggucaucuguuccuguuagaaggcuaugcagcauauuauauacuaugcgcauguuaugaaaugcauaauaaaaaauuuuaaaaaaucuaaaagaucuaaaaaaaaaaaaaaaaaaaaaaaaaaaaaaaaaaaaaaaaaaaaaaaaaaaaaaaaaaaaaaaaugcaucccccccccccccccccccccccccccccccaaaggcucuuuucagagccaccagaauu

SEQ ID NO: 17858 - RNA, 1973 nt, Artificial Sequence
  mRNA product Design f-2 comprising derived and/or modified sequence from HRSV(Memphis-37)__AIY60640.1__F_DSCav1_mut6 (opt3)
gggagagcggcucggccauuuugucccagucaguccggaggcugcggcugcagaaguaccgccugcggaguaacugcaaagaagcuuaccauggagcugcccauccucaagaccaacgccauuacaacuauacuugcugcagugacgcugugcuucgccagcucccagaauaucaccgaagaguuuuaccaaucuacauguucagcggucaguaaaggcuauuugggggcuuuaagaacuggaugguacaccagcguuauuacaaucgaacuguccaacauuaaggagaauaaaugcaacgguaccgacgccaaggugaaacuaaucaagcaggaacucgauaaguauaaaaaugcaguaacugaccugcagaugcuuauguguucuacuccugccgcuggcucggggucagcaauagccagcggaaucgcugugugcaagguccugcacuuggagggcgaggugaacaaaauuaagaaugcccuccugaguaccaacaaagcgguugugucccugucuaauggugucagcgugcucacguucaagguauuagaucugaagaacuacaucgacaaacagcuuuugccaauucugaauaagcaauccuguucaaucccgaaccccgaaacuguuauggaguuucagcagaaaaauaacaggcuacucgaaauaacccgggaguucagugugaaugcaggggucacaacuccugugagcaccuauaugcugacaaacucugagcuucuguccuugauuaacgauaugccaaucaccaaugaccagaagaaacucaugucaaacaaugugcaaauuguccgccagcagagcuacaguaucaugugcaucauuaaggaagagguucuggccuaugugguacaguuaccccuguacggagugauagauacgccuuguuggaaacuccauacuucuccacuuugcacaaccaacacuaaggaaggcuccaauaucugucugacacgaaccgaccguggcugguacugcgauaacgcugggagcgucucguuuuucccccaagccgagacguguaaggugugcucuaauagaguuuucugcgacaccaugaacuccuugacacuaccuucagaagugaaucuguguaacauugauaucuucaauccaaaauaugacugcaagauaaugacaaguaaaaccgaugucagcuccucugugauuacaagccucggagcaaucguaucauguuacgguaagacuaaaugcaccgcuaguaacaagaauaagggcaucauuaaaacauuuuccaacgggugugacuauguuagcaauaagggaguggacaccgucucugugggcaacacucuguacuaugucaacaaacaggagggucagucacuuuacgugaagggggagccgaucauuaauuucuaugauccccugguuuuuccuagugacgaauuugaugccagcauaucccaagugaacgagaaaaucaaucagucuuuggcguuuauuaggaagucggacgaacuccugcacaacguaaaugucggaaagagcacgacaaacaucaugaucaccacuauuauaaucgugauuaucguuauuuuacugcuacucaucgccgugggccuguuccuuuacugcaaagcacgguccaccccagucacauugucaaaggaucagcugaguggcauaaauaacaucgcuuucucuaauugaggacuaguggaagcauuuuccuggcugauuaaaagaaauuacucagcuauggucaucuguuccuguuagaaggcuaugcagcauauuauauacuaugcgcauguuaugaaaugcauaauaaaaaauuuuaaaaaaucuaaaagaucuaaaaaaaaaaaaaaaaaaaaaaaaaaaaaaaaaaaaaaaaaaaaaaaaaaaaaaaaaaaaaaaaugcaucccccccccccccccccccccccccccccccaaaggcucuuuucagagccaccagaauu

SEQ ID NO: 17859 - RNA, 1973 nt, Artificial Sequence
  mRNA product Design f-2 comprising derived and/or modified sequence from HRSV(Memphis-37)__AIY60640.1__F_DSCav1_mut6 (opt4)
gggagagcggcucggccauuuugucccagucaguccggaggcugcggcugcagaaguaccgccugcggaguaacugcaaagaagcuuaccauggagcugcccauccugaagaccaacgccaucaccaccauccuggccgccgugacccugugcuucgccagcagccagaacaucaccgaggaguucuaccagagcaccugcagcgccgugagcaagggcuaccugggcgcccugagaaccggcugguacaccagcgugaucaccaucgagcugagcaacaucaaggagaacaagugcaacggcaccgacgccaaggugaagcugaucaagcaggagcuggacaaguacaagaacgccgugaccgaccugcagaugcugaugugcagcacccccgccgccggcagcggcagcgccaucgccagcggcaucgccgugugcaaggugcugcaccuggagggcgaggugaacaagaucaagaacgcccugcugagcaccaacaaggccguggugagccugagcaacggcgugagcgugcugaccuucaaggugcuggaccugaagaacuacaucgacaagcagcugcugcccauccugaacaagcagagcugcagcauccccaaccccgagaccgugauggaguuccagcagaagaacaacagacugcuggagaucaccagagaguucagcgugaacgccggcgugaccacccccgugagcaccuacaugcugaccaacagcgagcugcugagccugaucaacgacaugcccaucaccaacgaccagaagaagcugaugagcaacaacgugcagaucgugagacagcagagcuacagcaucaugugcaucaucaaggaggaggugcuggccuacguggugcagcugccccuguacggcgugaucgacacccccugcuggaagcugcacaccagcccccugugcaccaccaacaccaaggagggcagcaacaucugccugaccagaaccgacagaggcugguacugcgacaacgccggcagcgugagcuucuucccccaggccgagaccugcaaggugugcagcaacagaguguucugcgacaccaugaacagccugacccugcccagcgaggugaaccugugcaacaucgacaucuucaaccccaaguacgacugcaagaucaugaccagcaagaccgacgugagcagcagcgugaucaccagccugggcgccaucgugagcugcuacggcaagaccaagugcaccgccagcaacaagaacaagggcaucaucaagaccuucagcaacggcugcgacuacgugagcaacaagggcguggacaccgugagcgugggcaacacccuguacuacgugaacaagcaggagggccagagccuguacgugaagggcgagcccaucaucaacuucuacgacccccugguguuccccagcgacgaguucgacgccagcaucagccaggugaacgagaagaucaaccagagccuggccuucaucagaaagagcgacgagcugcugcacaacgugaacgugggcaagagcaccaccaacaucaugaucaccaccaucaucaucgugaucaucgugauccugcugcugcugaucgccgugggccuguuccuguacugcaaggccagaagcacccccgugacccugagcaaggaccagcugagcggcaucaacaacaucgccuucagcaacugaggacuaguggaagcauuuuccuggcugauuaaaagaaauuacucagcuauggucaucuguuccuguuagaaggcuaugcagcauauuauauacuaugcgcauguuaugaaaugcauaauaaaaaauuuuaaaaaaucuaaaagaucuaaaaaaaaaaaaaaaaaaaaaaaaaaaaaaaaaaaaaaaaaaaaaaaaaaaaaaaaaaaaaaaaugcaucccccccccccccccccccccccccccccccaaaggcucuuuucagagccaccagaauu

SEQ ID NO: 17860 - RNA, 1973 nt, Artificial Sequence
  mRNA product Design f-2 comprising derived and/or modified sequence from HRSV(Memphis-37)__AIY60640.1__F_DSCav1_mut6 (opt5)
gggagagcggcucggccauuuugucccagucaguccggaggcugcggcugcagaaguaccgccugcggaguaacugcaaagaagcuuaccauggagcugcccauccucaagaccaacgccauuacaacgauccuggcugccgugacccuuugcuucgcgagcucccagaauauuacagaagaguuuuaccaaucuaccuguagcgcugucuccaaaggcuaucugggggcccucagaacaggaugguacaccucuguuaucacaauugaacugagcaacaucaaggagaauaaaugcaacggcaccgacgccaaggugaaacuuaucaagcaggaacuggauaaguauaaaaaugcugugacggaccuccagaugcugauguguuccaccccugccgcugggucuggaagcgccauugcguccggcaucgccgucugcaaggugcugcaccucgagggggagguuaacaaaauuaagaaugcucugcuuagcacaaacaaagccguggucucucuguccaauggagugagcguucucaccuucaaggugcuggaucuuaagaacuacaucgacaaacagcugcucccgauucugaauaagcaaucuuguuccauccccaacccugaaacagucauggaguuucagcagaaaaauaaccggcugcucgaaauuacccgcgaguucagcgugaaugcuggcgugacgacacccgucucuaccuauaugcugacaaacuccgagcuucugagccucaucaacgauaugccuaucaccaaugaccagaagaaacugauguccaacaauguucaaauugugagacagcagucuuacagcaucaugugcauuaucaaggaagaggugcuugccuaugucgugcagcugccccucuacggcguuauugauaccccuuguuggaaacugcauacauccccgcugugcacgaccaacacaaaggaagggagcaauaucugucucacccggacagaccgcggaugguacugcgauaacgcgggcucuguguccuuuuucccccaagccgagaccuguaaggucugcagcaauagaguguuuugcgacacgaugaacucucugacacuuccuagcgaaguuaaucuguguaacaucgauauuuucaaucccaaauaugacugcaagaucaugaccuccaaaaccgaugugucuagcuccgucauuacaagccucggggcuaucgugucuuguuacggaaagaccaaaugcacagccuccaacaagaauaagggcauuaucaaaacguuuagcaacgggugugacuaugucucuaauaagggaguggacaccguuuccgugggcaacacacuguacuaugucaacaaacaggagggccagagccuuuacgugaagggggagccuaucauuaauuucuaugauccccugguuuuuccguccgacgaauuugaugcuucuaucagccaagugaacgagaaaauuaaucagucccucgccuucauccggaagucugacgaacugcugcacaacgucaaugugggaaagagcaccacaaacauuaugaucaccacgauuaucaucgugauuaucguuauucuccugcuucugaucgccgucggccucuuccuguacugcaaagcucgcuccaccccugugacacugagcaaggaucagcuuucugggauuaauaacaucgcguucuccaauugaggacuaguggaagcauuuuccuggcugauuaaaagaaauuacucagcuauggucaucuguuccuguuagaaggcuaugcagcauauuauauacuaugcgcauguuaugaaaugcauaauaaaaaauuuuaaaaaaucuaaaagaucuaaaaaaaaaaaaaaaaaaaaaaaaaaaaaaaaaaaaaaaaaaaaaaaaaaaaaaaaaaaaaaaaugcaucccccccccccccccccccccccccccccccaaaggcucuuuucagagccaccagaauu

SEQ ID NO: 17861 - RNA, 1973 nt, Artificial Sequence
  mRNA product Design f-2 comprising derived and/or modified sequence from HRSV(Memphis-37)__AIY60640.1__F_DSCav1_mut6 (opt6)
gggagagcggcucggccauuuugucccagucaguccggaggcugcggcugcagaaguaccgccugcggaguaacugcaaagaagcuuaccauggaacuaccaauuuuaaaaacaaacgcaauuacaacuauacucgcagcaguaacauuauguuucgccucaucccaaaacauaacagaagaauuuuaccaaucaacaugcagcgcaguaucaaaaggauaucucggagcauuacgaacagguugguacacaucuguaaucacuauagaacuaucaaacauaaaagaaaacaaaugcaauggaaccgacgcaaaaguaaaauuaauaaaacaagaacucgauaaauacaaaaaugcaguaacagaccuccaaaugcucauguguucaacaccagccgcaggaucagguuccgccauagcaucuggcauagcaguaugcaaaguacuccacuuagaaggagaaguuaacaaaauaaaaaacgcacuauuaucaacaaacaaagcaguaguaucccucucaaacggagucucaguauuaacauucaaaguauuagaccuaaaaaacuacauagacaaacaacuacuuccaauacucaacaaacaaucaugcucaauaccaaacccagaaaccguaauggaauuucaacaaaaaaacaaccgacuacuagaaaucacacgagaauuuucaguaaacgccggugucacaacuccaguaucaacuuauauguuaaccaacucagaacuauuaucauuaauaaacgauaugcccauaacuaacgaccaaaaaaaauuaaugucaaacaacguacaaauaguacgccaacaaaguuacucaauaaugugcaucauaaaagaagaaguauuagcguacguuguacaacuaccucuauacggagucauagacacaccaugcuggaaacuucacacaucaccacuauguacaacaaacacaaaagaaggcaguaacauaugccuaacaagaacagaccguggaugguauugugacaacgcuggaucuguaucauucuucccucaagcagaaaccuguaaaguuugcucaaacagagucuucugugacacaaugaacucucuaacacuaccuuccgaagugaaccucuguaacauagacauauucaauccaaaauaugauugcaaaauaaugacuucaaaaacagauguaucauccucuguuauaacaucauuaggcgccauaguuucaugcuacggaaaaacuaaaugcacagcaucaaacaaaaacaaaggaauaauaaaaaccuucucaaauggaugcgacuacguaagcaacaaaggcguagacacaguaucaguagguaauacauuauacuacguaaacaaacaagaaggacaaucacuuuauguuaaaggagaaccuauaauaaacuucuacgacccacuuguauuuccauccgaugaauuugacgcaucuauaucacaagucaacgaaaaaauaaaccaaucauuagcauucauucgaaaauccgaugaacuacuccauaacguaaaugucggaaaaucaacaaccaacauaaugaucacaacaauaaucauagugauaauaguaauacuccuacuacuaaucgcaguaggucuauuccuauauuguaaagcaagaucuacuccaguuacacucucuaaagaccaauuaagcgguaucaacaacaucgccuucagcaauuaaggacuaguggaagcauuuuccuggcugauuaaaagaaauuacucagcuauggucaucuguuccuguuagaaggcuaugcagcauauuauauacuaugcgcauguuaugaaaugcauaauaaaaaauuuuaaaaaaucuaaaagaucuaaaaaaaaaaaaaaaaaaaaaaaaaaaaaaaaaaaaaaaaaaaaaaaaaaaaaaaaaaaaaaaaugcaucccccccccccccccccccccccccccccccaaaggcucuuuucagagccaccagaauu

SEQ ID NO: 17862 - RNA, 1973 nt, Artificial Sequence
  mRNA product Design f-2 comprising derived and/or modified sequence from HRSV(Memphis-37)__AIY60640.1__F_DSCav1_mut6 (opt11)
gggagagcggcucggccauuuugucccagucaguccggaggcugcggcugcagaaguaccgccugcggaguaacugcaaagaagcuuaccauggagcugcccauccucaagaccaacgccaucaccacgauccuggccgcggugacccugugcuucgcgagcucccaaaacaucaccgaggaguucuaccagagcacgugcuccgccgucagcaagggcuaccucggggcccugcgcaccggcugguacaccuccgugaucaccaucgagcugagcaacaucaaggaaaacaagugcaacgggacggacgcaaaggugaagcucaucaagcaggagcuggauaaguacaagaacgcggucacggaccugcagaugcucaugugcuccaccccggccgccggcagcggguccgccaucgcguccggcaucgccgugugcaagguguugcaccuggagggcgaggucaacaagaucaagaacgcccuccuuuccaccaauaaggcuguugugagccuguccaacggggucagcgugcucaccuucaaggugcuggaccugaagaacuacaucgacaagcagcuccugcccauccugaacaagcaguccugcagcauccccaaccccgagacagucauggaguuccagcagaagaacaaccggcuccuggagaucacccgcgaguucuccguuaacgccggggugaccaccccgguaagcacauacaugcugaccaacagcgagcuccugagccugaucaacgacaugcccaucaccaacgaccagaagaagcucaugagcaacaacgugcagaucgugcggcagcaguccuacagcaucaugugcaucaucaaggaggagguccuggcguacguggugcaacugccccucuacggggucaucgacacccccugcuggaagcugcacacguccccgcugugcaccaccaacaccaaggagggcagcaacaucugccucacgcgcaccgaccgggggugguacugcgacaacgcaggcuccgugagcuucuucccccaggccgagaccugcaaggugugcuccaaccgcgucuucugcgacaccaugaacagccugacgcugcccuccgaggugaaccucugcaacaucgacaucuucaaccccaaguacgacuguaagaucaugaccagcaagaccgaugucuccagcuccgugaucaccagccugggcgccauaguguccuguuaugggaagacgaagugcaccgccagcaacaagaacaaaggcaucaucaagaccuucuccaacgggugcgacuacgucagcaacaagggcguggacacaguguccgucggcaacacgcuguacuacgugaacaagcaggaggggcagagccucuacgugaagggcgagccgaucaucaacuucuacgauccccuggucuuccccagcgacgaguucgacgcguccaucagccaagugaacgagaagaucaaccagucccuggccuucauccgcaagagcgacgagcuccugcacaacgugaacgucgggaaguccaccaccaacaucaugaucaccaccaucaucaucgugaucaucgucauccugcuccugcugaucgccgucggccucuuccuguacugcaaggcccggagcacgcccgugacccuguccaaggaccagcugucgggcaucaacaacaucgccuucuccaacugaggacuaguggaagcauuuuccuggcugauuaaaagaaauuacucagcuauggucaucuguuccuguuagaaggcuaugcagcauauuauauacuaugcgcauguuaugaaaugcauaauaaaaaauuuuaaaaaaucuaaaagaucuaaaaaaaaaaaaaaaaaaaaaaaaaaaaaaaaaaaaaaaaaaaaaaaaaaaaaaaaaaaaaaaaugcaucccccccccccccccccccccccccccccccaaaggcucuuuucagagccaccagaauu

SEQ ID NO: 17863 - RNA, 1964 nt, Artificial Sequence
  mRNA product Design f-3 comprising derived and/or modified sequence from HRSV(Memphis-37)__AIY60640.1__F_DSCav1_mut6 (opt1)
gggagagucccgcagucggcguccagcggcucugcuuguucgugugugugucguugcaggccuuauucaagcuuaccauggagcugcccauccucaagaccaacgccaucaccacgauccuggccgcggugacccugugcuucgccagcucccagaacaucaccgaggaguucuaccagagcacgugcuccgccgucagcaagggcuaccucggcgcccugcgcaccgggugguacaccagcgugaucaccaucgagcuguccaacaucaaggagaacaagugcaacggcaccgacgccaaggugaagcucaucaagcaggagcuggacaaguacaagaacgcggucacggaccugcagaugcugaugugcagcaccccggccgccggcuccgggagcgcgaucgccuccggcaucgccgucugcaaggugcugcaccucgagggcgaggugaacaagaucaagaacgcccugcuguccaccaacaaggccgucgugagccucuccaacggggugagcguccugaccuucaaggugcuggaccucaagaacuacaucgacaagcagcugcugcccauccugaacaagcagagcugcuccauccccaaccccgagaccgucauggaguuccagcagaagaacaaccgccuccuggagaucacgcgggaguucagcgugaacgcgggcgugaccacccccgucuccaccuacaugcugacgaacagcgagcuccugucccugaucaacgacaugccgaucaccaacgaccagaagaagcucaugagcaacaacgugcagaucgugcgccagcaguccuacagcaucaugugcaucaucaaggaggagguccuggccuacguggugcagcugccccucuacggggucaucgacacccccugcuggaagcugcacaccagcccccugugcacgaccaacaccaaggagggcuccaacaucugccucacccggacggaccgcgggugguacugcgacaacgccggcagcguguccuucuucccgcaggccgagaccugcaaggucugcagcaaccggguguucugcgacaccaugaacucccugacccugcccagcgaggugaaccucugcaacaucgacaucuucaaccccaaguacgacugcaagaucaugacguccaagaccgacgucagcuccagcgugaucaccucccugggcgccaucgugagcugcuacgggaagaccaagugcacggcgagcaacaagaacaagggcaucaucaagaccuucuccaacgggugcgacuacgucagcaacaagggcguggacaccguguccgucggcaacacccuguacuacgugaacaagcaggagggccagagccucuacgugaagggggagcccaucaucaacuucuacgacccgcuggucuuccccuccgacgaguucgacgccagcaucucccaggugaacgagaagaucaaccagagccuggccuucauccggaaguccgacgagcuccugcacaacgugaacgucggcaagagcaccacgaacaucaugaucaccaccaucaucaucgugaucaucgugauccugcugcuccugaucgccgucgggcuguuccucuacugcaaggcccgcuccacccccgugacgcugagcaaggaccagcuguccgggaucaacaacaucgcguucagcaacugaggacuaguacuggcugcaucucccuuuccucuguccuccauccuucucccaggauggugaagggggaccugguacccagugauccccaccccaggauccuaaaucaugacuuaccugcuaauaaaaacucauuggaaaagugagaagaucuaaaaaaaaaaaaaaaaaaaaaaaaaaaaaaaaaaaaaaaaaaaaaaaaaaaaaaaaaaaaaaaaugcaucccccccccccccccccccccccccccccccaaaggcucuuuucagagccaccagaauu

SEQ ID NO: 17864 - RNA, 1964 nt, Artificial Sequence
  mRNA product Design f-3 comprising derived and/or modified sequence from HRSV(Memphis-37)__AIY60640.1__F_DSCav1_mut6 (opt1)
gggagagucccgcagucggcguccagcggcucugcuuguucgugugugugucguugcaggccuuauucaagcuuaccauggagcugcccauccucaagaccaacgccaucaccacgauccuggccgcggugacccugugcuucgccagcucccagaacaucaccgaggaguucuaccagagcacgugcuccgccgucagcaagggcuaccucggggcccugcgcaccggcugguacaccuccgugaucaccaucgagcugagcaacaucaaggagaacaagugcaacgggaccgacgccaaggugaagcucaucaagcaggagcuggacaaguacaagaacgcggucacggaccugcagaugcucaugugcuccaccccggccgccggcagcggguccgccaucgcgagcggcaucgccgugugcaaggugcugcaccuggagggcgaggucaacaagaucaagaacgcccuccuguccaccaacaaggccguggugagccuguccaacggggucagcgugcucaccuucaaggugcuggaccugaagaacuacaucgacaagcagcuccugcccauccugaacaagcaguccugcagcauccccaaccccgagacggucauggaguuccagcagaagaacaaccggcuccuggagaucacccgcgaguucuccgugaacgccggcgugaccaccccggucagcacguacaugcugaccaacuccgagcuccugagccugaucaacgacaugcccaucaccaacgaccagaagaagcucaugagcaacaacgugcagaucgugcggcagcaguccuacagcaucaugugcaucaucaaggaggagguccuggcguacguggugcagcugccccucuacggggucaucgacacccccugcuggaagcugcacacguccccgcugugcaccaccaacaccaaggagggcagcaacaucugccucacgcgcaccgaccgggggugguacugcgacaacgccggcuccgugagcuucuucccccaggccgagaccugcaaggugugcuccaaccgcgucuucugcgacaccaugaacagccugacgcugcccuccgaggugaaccucugcaacaucgacaucuucaaccccaaguacgacugcaagaucaugaccagcaagaccgacgucuccagcuccgugaucaccagccugggcgccaucguguccugcuacgggaagacgaagugcaccgccagcaacaagaacaagggcaucaucaagaccuucuccaacgggugcgacuacgucagcaacaagggcguggacaccguguccgucggcaacacgcuguacuacgugaacaagcaggaggggcagagccucuacgugaagggcgagccgaucaucaacuucuacgacccccuggucuuccccagcgacgaguucgacgcguccaucagccaggugaacgagaagaucaaccagucccuggccuucauccgcaagagcgacgagcuccugcacaacgugaacgucgggaaguccaccaccaacaucaugaucaccaccaucaucaucgugaucaucgugauccugcuccugcugaucgccgucggccucuuccuguacugcaaggcccggagcacgcccgugacccuguccaaggaccagcugagcgggaucaacaacaucgccuucuccaacugaggacuaguacuggcugcaucucccuuuccucuguccuccauccuucucccaggauggugaagggggaccugguacccagugauccccaccccaggauccuaaaucaugacuuaccugcuaauaaaaacucauuggaaaagugagaagaucuaaaaaaaaaaaaaaaaaaaaaaaaaaaaaaaaaaaaaaaaaaaaaaaaaaaaaaaaaaaaaaaaugcaucccccccccccccccccccccccccccccccaaaggcucuuuucagagccaccagaauu

SEQ ID NO: 17865 - RNA, 1964 nt, Artificial Sequence
  mRNA product Design f-3 comprising derived and/or modified sequence from HRSV(Memphis-37)__AIY60640.1__F_DSCav1_mut6 (opt2)
gggagagucccgcagucggcguccagcggcucugcuuguucgugugugugucguugcaggccuuauucaagcuuaccauggagcuccccauccucaagaccaacgccaucaccaccauccucgccgccgucacccucugcuucgccuccucccagaacaucaccgaggaguucuaccaguccaccugcuccgccgucuccaagggcuaccucggcgcccuccgcaccggcugguacaccuccgucaucaccaucgagcucuccaacaucaaggagaacaagugcaacggcaccgacgccaaggucaagcucaucaagcaggagcucgacaaguacaagaacgccgucaccgaccuccagaugcucaugugcuccacccccgccgccggcuccggcuccgccaucgccuccggcaucgccgucugcaagguccuccaccucgagggcgaggucaacaagaucaagaacgcccuccucuccaccaacaaggccgucgucucccucuccaacggcgucuccguccucaccuucaagguccucgaccucaagaacuacaucgacaagcagcuccuccccauccucaacaagcaguccugcuccauccccaaccccgagaccgucauggaguuccagcagaagaacaaccgccuccucgagaucacccgcgaguucuccgucaacgccggcgucaccacccccgucuccaccuacaugcucaccaacuccgagcuccucucccucaucaacgacaugcccaucaccaacgaccagaagaagcucauguccaacaacguccagaucguccgccagcaguccuacuccaucaugugcaucaucaaggaggagguccucgccuacgucguccagcucccccucuacggcgucaucgacacccccugcuggaagcuccacaccuccccccucugcaccaccaacaccaaggagggcuccaacaucugccucacccgcaccgaccgcggcugguacugcgacaacgccggcuccgucuccuucuucccccaggccgagaccugcaaggucugcuccaaccgcgucuucugcgacaccaugaacucccucacccuccccuccgaggucaaccucugcaacaucgacaucuucaaccccaaguacgacugcaagaucaugaccuccaagaccgacgucuccuccuccgucaucaccucccucggcgccaucgucuccugcuacggcaagaccaagugcaccgccuccaacaagaacaagggcaucaucaagaccuucuccaacggcugcgacuacgucuccaacaagggcgucgacaccgucuccgucggcaacacccucuacuacgucaacaagcaggagggccagucccucuacgucaagggcgagcccaucaucaacuucuacgacccccucgucuuccccuccgacgaguucgacgccuccaucucccaggucaacgagaagaucaaccagucccucgccuucauccgcaaguccgacgagcuccuccacaacgucaacgucggcaaguccaccaccaacaucaugaucaccaccaucaucaucgucaucaucgucauccuccuccuccucaucgccgucggccucuuccucuacugcaaggcccgcuccacccccgucacccucuccaaggaccagcucuccggcaucaacaacaucgccuucuccaacugaggacuaguacuggcugcaucucccuuuccucuguccuccauccuucucccaggauggugaagggggaccugguacccagugauccccaccccaggauccuaaaucaugacuuaccugcuaauaaaaacucauuggaaaagugagaagaucuaaaaaaaaaaaaaaaaaaaaaaaaaaaaaaaaaaaaaaaaaaaaaaaaaaaaaaaaaaaaaaaaugcaucccccccccccccccccccccccccccccccaaaggcucuuuucagagccaccagaauu

SEQ ID NO: 17866 - RNA, 1964 nt, Artificial Sequence
  mRNA product Design f-3 comprising derived and/or modified sequence from HRSV(Memphis-37)__AIY60640.1__F_DSCav1_mut6 (opt3)
gggagagucccgcagucggcguccagcggcucugcuuguucgugugugugucguugcaggccuuauucaagcuuaccauggagcugcccauccucaagaccaacgccauuacaacuauacuugcugcagugacgcugugcuucgccagcucccagaauaucaccgaagaguuuuaccaaucuacauguucagcggucaguaaaggcuauuugggggcuuuaagaacuggaugguacaccagcguuauuacaaucgaacuguccaacauuaaggagaauaaaugcaacgguaccgacgccaaggugaaacuaaucaagcaggaacucgauaaguauaaaaaugcaguaacugaccugcagaugcuuauguguucuacuccugccgcuggcucggggucagcaauagccagcggaaucgcugugugcaagguccugcacuuggagggcgaggugaacaaaauuaagaaugcccuccugaguaccaacaaagcgguugugucccugucuaauggugucagcgugcucacguucaagguauuagaucugaagaacuacaucgacaaacagcuuuugccaauucugaauaagcaauccuguucaaucccgaaccccgaaacuguuauggaguuucagcagaaaaauaacaggcuacucgaaauaacccgggaguucagugugaaugcaggggucacaacuccugugagcaccuauaugcugacaaacucugagcuucuguccuugauuaacgauaugccaaucaccaaugaccagaagaaacucaugucaaacaaugugcaaauuguccgccagcagagcuacaguaucaugugcaucauuaaggaagagguucuggccuaugugguacaguuaccccuguacggagugauagauacgccuuguuggaaacuccauacuucuccacuuugcacaaccaacacuaaggaaggcuccaauaucugucugacacgaaccgaccguggcugguacugcgauaacgcugggagcgucucguuuuucccccaagccgagacguguaaggugugcucuaauagaguuuucugcgacaccaugaacuccuugacacuaccuucagaagugaaucuguguaacauugauaucuucaauccaaaauaugacugcaagauaaugacaaguaaaaccgaugucagcuccucugugauuacaagccucggagcaaucguaucauguuacgguaagacuaaaugcaccgcuaguaacaagaauaagggcaucauuaaaacauuuuccaacgggugugacuauguuagcaauaagggaguggacaccgucucugugggcaacacucuguacuaugucaacaaacaggagggucagucacuuuacgugaagggggagccgaucauuaauuucuaugauccccugguuuuuccuagugacgaauuugaugccagcauaucccaagugaacgagaaaaucaaucagucuuuggcguuuauuaggaagucggacgaacuccugcacaacguaaaugucggaaagagcacgacaaacaucaugaucaccacuauuauaaucgugauuaucguuauuuuacugcuacucaucgccgugggccuguuccuuuacugcaaagcacgguccaccccagucacauugucaaaggaucagcugaguggcauaaauaacaucgcuuucucuaauugaggacuaguacuggcugcaucucccuuuccucuguccuccauccuucucccaggauggugaagggggaccugguacccagugauccccaccccaggauccuaaaucaugacuuaccugcuaauaaaaacucauuggaaaagugagaagaucuaaaaaaaaaaaaaaaaaaaaaaaaaaaaaaaaaaaaaaaaaaaaaaaaaaaaaaaaaaaaaaaaugcaucccccccccccccccccccccccccccccccaaaggcucuuuucagagccaccagaauu

SEQ ID NO: 17867 - RNA, 1964 nt, Artificial Sequence
  mRNA product Design f-3 comprising derived and/or modified sequence from HRSV(Memphis-37)__AIY60640.1__F_DSCav1_mut6 (opt4)
gggagagucccgcagucggcguccagcggcucugcuuguucgugugugugucguugcaggccuuauucaagcuuaccauggagcugcccauccugaagaccaacgccaucaccaccauccuggccgccgugacccugugcuucgccagcagccagaacaucaccgaggaguucuaccagagcaccugcagcgccgugagcaagggcuaccugggcgcccugagaaccggcugguacaccagcgugaucaccaucgagcugagcaacaucaaggagaacaagugcaacggcaccgacgccaaggugaagcugaucaagcaggagcuggacaaguacaagaacgccgugaccgaccugcagaugcugaugugcagcacccccgccgccggcagcggcagcgccaucgccagcggcaucgccgugugcaaggugcugcaccuggagggcgaggugaacaagaucaagaacgcccugcugagcaccaacaaggccguggugagccugagcaacggcgugagcgugcugaccuucaaggugcuggaccugaagaacuacaucgacaagcagcugcugcccauccugaacaagcagagcugcagcauccccaaccccgagaccgugauggaguuccagcagaagaacaacagacugcuggagaucaccagagaguucagcgugaacgccggcgugaccacccccgugagcaccuacaugcugaccaacagcgagcugcugagccugaucaacgacaugcccaucaccaacgaccagaagaagcugaugagcaacaacgugcagaucgugagacagcagagcuacagcaucaugugcaucaucaaggaggaggugcuggccuacguggugcagcugccccuguacggcgugaucgacacccccugcuggaagcugcacaccagcccccugugcaccaccaacaccaaggagggcagcaacaucugccugaccagaaccgacagaggcugguacugcgacaacgccggcagcgugagcuucuucccccaggccgagaccugcaaggugugcagcaacagaguguucugcgacaccaugaacagccugacccugcccagcgaggugaaccugugcaacaucgacaucuucaaccccaaguacgacugcaagaucaugaccagcaagaccgacgugagcagcagcgugaucaccagccugggcgccaucgugagcugcuacggcaagaccaagugcaccgccagcaacaagaacaagggcaucaucaagaccuucagcaacggcugcgacuacgugagcaacaagggcguggacaccgugagcgugggcaacacccuguacuacgugaacaagcaggagggccagagccuguacgugaagggcgagcccaucaucaacuucuacgacccccugguguuccccagcgacgaguucgacgccagcaucagccaggugaacgagaagaucaaccagagccuggccuucaucagaaagagcgacgagcugcugcacaacgugaacgugggcaagagcaccaccaacaucaugaucaccaccaucaucaucgugaucaucgugauccugcugcugcugaucgccgugggccuguuccuguacugcaaggccagaagcacccccgugacccugagcaaggaccagcugagcggcaucaacaacaucgccuucagcaacugaggacuaguacuggcugcaucucccuuuccucuguccuccauccuucucccaggauggugaagggggaccugguacccagugauccccaccccaggauccuaaaucaugacuuaccugcuaauaaaaacucauuggaaaagugagaagaucuaaaaaaaaaaaaaaaaaaaaaaaaaaaaaaaaaaaaaaaaaaaaaaaaaaaaaaaaaaaaaaaaugcaucccccccccccccccccccccccccccccccaaaggcucuuuucagagccaccagaauu

SEQ ID NO: 17868 - RNA, 1964 nt, Artificial Sequence
  mRNA product Design f-3 comprising derived and/or modified sequence from HRSV(Memphis-37)__AIY60640.1__F_DSCav1_mut6 (opt5)
gggagagucccgcagucggcguccagcggcucugcuuguucgugugugugucguugcaggccuuauucaagcuuaccauggagcugcccauccucaagaccaacgccauuacaacgauccuggcugccgugacccuuugcuucgcgagcucccagaauauuacagaagaguuuuaccaaucuaccuguagcgcugucuccaaaggcuaucugggggcccucagaacaggaugguacaccucuguuaucacaauugaacugagcaacaucaaggagaauaaaugcaacggcaccgacgccaaggugaaacuuaucaagcaggaacuggauaaguauaaaaaugcugugacggaccuccagaugcugauguguuccaccccugccgcugggucuggaagcgccauugcguccggcaucgccgucugcaaggugcugcaccucgagggggagguuaacaaaauuaagaaugcucugcuuagcacaaacaaagccguggucucucuguccaauggagugagcguucucaccuucaaggugcuggaucuuaagaacuacaucgacaaacagcugcucccgauucugaauaagcaaucuuguuccauccccaacccugaaacagucauggaguuucagcagaaaaauaaccggcugcucgaaauuacccgcgaguucagcgugaaugcuggcgugacgacacccgucucuaccuauaugcugacaaacuccgagcuucugagccucaucaacgauaugccuaucaccaaugaccagaagaaacugauguccaacaauguucaaauugugagacagcagucuuacagcaucaugugcauuaucaaggaagaggugcuugccuaugucgugcagcugccccucuacggcguuauugauaccccuuguuggaaacugcauacauccccgcugugcacgaccaacacaaaggaagggagcaauaucugucucacccggacagaccgcggaugguacugcgauaacgcgggcucuguguccuuuuucccccaagccgagaccuguaaggucugcagcaauagaguguuuugcgacacgaugaacucucugacacuuccuagcgaaguuaaucuguguaacaucgauauuuucaaucccaaauaugacugcaagaucaugaccuccaaaaccgaugugucuagcuccgucauuacaagccucggggcuaucgugucuuguuacggaaagaccaaaugcacagccuccaacaagaauaagggcauuaucaaaacguuuagcaacgggugugacuaugucucuaauaagggaguggacaccguuuccgugggcaacacacuguacuaugucaacaaacaggagggccagagccuuuacgugaagggggagccuaucauuaauuucuaugauccccugguuuuuccguccgacgaauuugaugcuucuaucagccaagugaacgagaaaauuaaucagucccucgccuucauccggaagucugacgaacugcugcacaacgucaaugugggaaagagcaccacaaacauuaugaucaccacgauuaucaucgugauuaucguuauucuccugcuucugaucgccgucggccucuuccuguacugcaaagcucgcuccaccccugugacacugagcaaggaucagcuuucugggauuaauaacaucgcguucuccaauugaggacuaguacuggcugcaucucccuuuccucuguccuccauccuucucccaggauggugaagggggaccugguacccagugauccccaccccaggauccuaaaucaugacuuaccugcuaauaaaaacucauuggaaaagugagaagaucuaaaaaaaaaaaaaaaaaaaaaaaaaaaaaaaaaaaaaaaaaaaaaaaaaaaaaaaaaaaaaaaaugcaucccccccccccccccccccccccccccccccaaaggcucuuuucagagccaccagaauu

SEQ ID NO: 17869 - RNA, 1964 nt, Artificial Sequence
  mRNA product Design f-3 comprising derived and/or modified sequence from HRSV(Memphis-37)__AIY60640.1__F_DSCav1_mut6 (opt6)
gggagagucccgcagucggcguccagcggcucugcuuguucgugugugugucguugcaggccuuauucaagcuuaccauggaacuaccaauuuuaaaaacaaacgcaauuacaacuauacucgcagcaguaacauuauguuucgccucaucccaaaacauaacagaagaauuuuaccaaucaacaugcagcgcaguaucaaaaggauaucucggagcauuacgaacagguugguacacaucuguaaucacuauagaacuaucaaacauaaaagaaaacaaaugcaauggaaccgacgcaaaaguaaaauuaauaaaacaagaacucgauaaauacaaaaaugcaguaacagaccuccaaaugcucauguguucaacaccagccgcaggaucagguuccgccauagcaucuggcauagcaguaugcaaaguacuccacuuagaaggagaaguuaacaaaauaaaaaacgcacuauuaucaacaaacaaagcaguaguaucccucucaaacggagucucaguauuaacauucaaaguauuagaccuaaaaaacuacauagacaaacaacuacuuccaauacucaacaaacaaucaugcucaauaccaaacccagaaaccguaauggaauuucaacaaaaaaacaaccgacuacuagaaaucacacgagaauuuucaguaaacgccggugucacaacuccaguaucaacuuauauguuaaccaacucagaacuauuaucauuaauaaacgauaugcccauaacuaacgaccaaaaaaaauuaaugucaaacaacguacaaauaguacgccaacaaaguuacucaauaaugugcaucauaaaagaagaaguauuagcguacguuguacaacuaccucuauacggagucauagacacaccaugcuggaaacuucacacaucaccacuauguacaacaaacacaaaagaaggcaguaacauaugccuaacaagaacagaccguggaugguauugugacaacgcuggaucuguaucauucuucccucaagcagaaaccuguaaaguuugcucaaacagagucuucugugacacaaugaacucucuaacacuaccuuccgaagugaaccucuguaacauagacauauucaauccaaaauaugauugcaaaauaaugacuucaaaaacagauguaucauccucuguuauaacaucauuaggcgccauaguuucaugcuacggaaaaacuaaaugcacagcaucaaacaaaaacaaaggaauaauaaaaaccuucucaaauggaugcgacuacguaagcaacaaaggcguagacacaguaucaguagguaauacauuauacuacguaaacaaacaagaaggacaaucacuuuauguuaaaggagaaccuauaauaaacuucuacgacccacuuguauuuccauccgaugaauuugacgcaucuauaucacaagucaacgaaaaaauaaaccaaucauuagcauucauucgaaaauccgaugaacuacuccauaacguaaaugucggaaaaucaacaaccaacauaaugaucacaacaauaaucauagugauaauaguaauacuccuacuacuaaucgcaguaggucuauuccuauauuguaaagcaagaucuacuccaguuacacucucuaaagaccaauuaagcgguaucaacaacaucgccuucagcaauuaaggacuaguacuggcugcaucucccuuuccucuguccuccauccuucucccaggauggugaagggggaccugguacccagugauccccaccccaggauccuaaaucaugacuuaccugcuaauaaaaacucauuggaaaagugagaagaucuaaaaaaaaaaaaaaaaaaaaaaaaaaaaaaaaaaaaaaaaaaaaaaaaaaaaaaaaaaaaaaaaugcaucccccccccccccccccccccccccccccccaaaggcucuuuucagagccaccagaauu

SEQ ID NO: 17870 - RNA, 1964 nt, Artificial Sequence
  mRNA product Design f-3 comprising derived and/or modified sequence from HRSV(Memphis-37)__AIY60640.1__F_DSCav1_mut6 (opt11)
gggagagucccgcagucggcguccagcggcucugcuuguucgugugugugucguugcaggccuuauucaagcuuaccauggagcugcccauccucaagaccaacgccaucaccacgauccuggccgcggugacccugugcuucgcgagcucccaaaacaucaccgaggaguucuaccagagcacgugcuccgccgucagcaagggcuaccucggggcccugcgcaccggcugguacaccuccgugaucaccaucgagcugagcaacaucaaggaaaacaagugcaacgggacggacgcaaaggugaagcucaucaagcaggagcuggauaaguacaagaacgcggucacggaccugcagaugcucaugugcuccaccccggccgccggcagcggguccgccaucgcguccggcaucgccgugugcaagguguugcaccuggagggcgaggucaacaagaucaagaacgcccuccuuuccaccaauaaggcuguugugagccuguccaacggggucagcgugcucaccuucaaggugcuggaccugaagaacuacaucgacaagcagcuccugcccauccugaacaagcaguccugcagcauccccaaccccgagacagucauggaguuccagcagaagaacaaccggcuccuggagaucacccgcgaguucuccguuaacgccggggugaccaccccgguaagcacauacaugcugaccaacagcgagcuccugagccugaucaacgacaugcccaucaccaacgaccagaagaagcucaugagcaacaacgugcagaucgugcggcagcaguccuacagcaucaugugcaucaucaaggaggagguccuggcguacguggugcaacugccccucuacggggucaucgacacccccugcuggaagcugcacacguccccgcugugcaccaccaacaccaaggagggcagcaacaucugccucacgcgcaccgaccgggggugguacugcgacaacgcaggcuccgugagcuucuucccccaggccgagaccugcaaggugugcuccaaccgcgucuucugcgacaccaugaacagccugacgcugcccuccgaggugaaccucugcaacaucgacaucuucaaccccaaguacgacuguaagaucaugaccagcaagaccgaugucuccagcuccgugaucaccagccugggcgccauaguguccuguuaugggaagacgaagugcaccgccagcaacaagaacaaaggcaucaucaagaccuucuccaacgggugcgacuacgucagcaacaagggcguggacacaguguccgucggcaacacgcuguacuacgugaacaagcaggaggggcagagccucuacgugaagggcgagccgaucaucaacuucuacgauccccuggucuuccccagcgacgaguucgacgcguccaucagccaagugaacgagaagaucaaccagucccuggccuucauccgcaagagcgacgagcuccugcacaacgugaacgucgggaaguccaccaccaacaucaugaucaccaccaucaucaucgugaucaucgucauccugcuccugcugaucgccgucggccucuuccuguacugcaaggcccggagcacgcccgugacccuguccaaggaccagcugucgggcaucaacaacaucgccuucuccaacugaggacuaguacuggcugcaucucccuuuccucuguccuccauccuucucccaggauggugaagggggaccugguacccagugauccccaccccaggauccuaaaucaugacuuaccugcuaauaaaaacucauuggaaaagugagaagaucuaaaaaaaaaaaaaaaaaaaaaaaaaaaaaaaaaaaaaaaaaaaaaaaaaaaaaaaaaaaaaaaaugcaucccccccccccccccccccccccccccccccaaaggcucuuuucagagccaccagaauu

SEQ ID NO: 17871 - RNA, 2180 nt, Artificial Sequence
  mRNA product Design f-4 comprising derived and/or modified sequence from HRSV(Memphis-37)__AIY60640.1__F_DSCav1_mut6 (opt1)
gggagagucccgcagucggcguccagcggcucugcuuguucgugugugugucguugcaggccuuauucaagcuuaccauggagcugcccauccucaagaccaacgccaucaccacgauccuggccgcggugacccugugcuucgccagcucccagaacaucaccgaggaguucuaccagagcacgugcuccgccgucagcaagggcuaccucggcgcccugcgcaccgggugguacaccagcgugaucaccaucgagcuguccaacaucaaggagaacaagugcaacggcaccgacgccaaggugaagcucaucaagcaggagcuggacaaguacaagaacgcggucacggaccugcagaugcugaugugcagcaccccggccgccggcuccgggagcgcgaucgccuccggcaucgccgucugcaaggugcugcaccucgagggcgaggugaacaagaucaagaacgcccugcuguccaccaacaaggccgucgugagccucuccaacggggugagcguccugaccuucaaggugcuggaccucaagaacuacaucgacaagcagcugcugcccauccugaacaagcagagcugcuccauccccaaccccgagaccgucauggaguuccagcagaagaacaaccgccuccuggagaucacgcgggaguucagcgugaacgcgggcgugaccacccccgucuccaccuacaugcugacgaacagcgagcuccugucccugaucaacgacaugccgaucaccaacgaccagaagaagcucaugagcaacaacgugcagaucgugcgccagcaguccuacagcaucaugugcaucaucaaggaggagguccuggccuacguggugcagcugccccucuacggggucaucgacacccccugcuggaagcugcacaccagcccccugugcacgaccaacaccaaggagggcuccaacaucugccucacccggacggaccgcgggugguacugcgacaacgccggcagcguguccuucuucccgcaggccgagaccugcaaggucugcagcaaccggguguucugcgacaccaugaacucccugacccugcccagcgaggugaaccucugcaacaucgacaucuucaaccccaaguacgacugcaagaucaugacguccaagaccgacgucagcuccagcgugaucaccucccugggcgccaucgugagcugcuacgggaagaccaagugcacggcgagcaacaagaacaagggcaucaucaagaccuucuccaacgggugcgacuacgucagcaacaagggcguggacaccguguccgucggcaacacccuguacuacgugaacaagcaggagggccagagccucuacgugaagggggagcccaucaucaacuucuacgacccgcuggucuuccccuccgacgaguucgacgccagcaucucccaggugaacgagaagaucaaccagagccuggccuucauccggaaguccgacgagcuccugcacaacgugaacgucggcaagagcaccacgaacaucaugaucaccaccaucaucaucgugaucaucgugauccugcugcuccugaucgccgucgggcuguuccucuacugcaaggcccgcuccacccccgugacgcugagcaaggaccagcuguccgggaucaacaacaucgcguucagcaacugaggacuagugaagggaacacccaaauuuaauucagccuuaagcacaauuaauuaagagugaaacguaauuguacaagcaguuggucacccaccauagggcaugaucaacaccgcaaccuuuccuuuuucccccagugauucugaaaaaccccucuucccuucagcuugcuuagauguuccaaauuuaguaagcuuaaggcggccuacagaagaaaaagaaaaaaaaggccacaaaaguucccucucacuuucaguaaauaaaauaaaagcagcaacagaaauaaagaaauaaaugaaauucaaaaugaaauaaauauuguguugugcagcauuaaaaaaucaauaaaaauuaaaaaugagcaagaucuaaaaaaaaaaaaaaaaaaaaaaaaaaaaaaaaaaaaaaaaaaaaaaaaaaaaaaaaaaaaaaaaugcaucccccccccccccccccccccccccccccccaaaggcucuuuucagagccaccagaauu

SEQ ID NO: 17872 - RNA, 2180 nt, Artificial Sequence
  mRNA product Design f-4 comprising derived and/or modified sequence from HRSV(Memphis-37)__AIY60640.1__F_DSCav1_mut6 (opt1)
gggagagucccgcagucggcguccagcggcucugcuuguucgugugugugucguugcaggccuuauucaagcuuaccauggagcugcccauccucaagaccaacgccaucaccacgauccuggccgcggugacccugugcuucgccagcucccagaacaucaccgaggaguucuaccagagcacgugcuccgccgucagcaagggcuaccucggggcccugcgcaccggcugguacaccuccgugaucaccaucgagcugagcaacaucaaggagaacaagugcaacgggaccgacgccaaggugaagcucaucaagcaggagcuggacaaguacaagaacgcggucacggaccugcagaugcucaugugcuccaccccggccgccggcagcggguccgccaucgcgagcggcaucgccgugugcaaggugcugcaccuggagggcgaggucaacaagaucaagaacgcccuccuguccaccaacaaggccguggugagccuguccaacggggucagcgugcucaccuucaaggugcuggaccugaagaacuacaucgacaagcagcuccugcccauccugaacaagcaguccugcagcauccccaaccccgagacggucauggaguuccagcagaagaacaaccggcuccuggagaucacccgcgaguucuccgugaacgccggcgugaccaccccggucagcacguacaugcugaccaacuccgagcuccugagccugaucaacgacaugcccaucaccaacgaccagaagaagcucaugagcaacaacgugcagaucgugcggcagcaguccuacagcaucaugugcaucaucaaggaggagguccuggcguacguggugcagcugccccucuacggggucaucgacacccccugcuggaagcugcacacguccccgcugugcaccaccaacaccaaggagggcagcaacaucugccucacgcgcaccgaccgggggugguacugcgacaacgccggcuccgugagcuucuucccccaggccgagaccugcaaggugugcuccaaccgcgucuucugcgacaccaugaacagccugacgcugcccuccgaggugaaccucugcaacaucgacaucuucaaccccaaguacgacugcaagaucaugaccagcaagaccgacgucuccagcuccgugaucaccagccugggcgccaucguguccugcuacgggaagacgaagugcaccgccagcaacaagaacaagggcaucaucaagaccuucuccaacgggugcgacuacgucagcaacaagggcguggacaccguguccgucggcaacacgcuguacuacgugaacaagcaggaggggcagagccucuacgugaagggcgagccgaucaucaacuucuacgacccccuggucuuccccagcgacgaguucgacgcguccaucagccaggugaacgagaagaucaaccagucccuggccuucauccgcaagagcgacgagcuccugcacaacgugaacgucgggaaguccaccaccaacaucaugaucaccaccaucaucaucgugaucaucgugauccugcuccugcugaucgccgucggccucuuccuguacugcaaggcccggagcacgcccgugacccuguccaaggaccagcugagcgggaucaacaacaucgccuucuccaacugaggacuagugaagggaacacccaaauuuaauucagccuuaagcacaauuaauuaagagugaaacguaauuguacaagcaguuggucacccaccauagggcaugaucaacaccgcaaccuuuccuuuuucccccagugauucugaaaaaccccucuucccuucagcuugcuuagauguuccaaauuuaguaagcuuaaggcggccuacagaagaaaaagaaaaaaaaggccacaaaaguucccucucacuuucaguaaauaaaauaaaagcagcaacagaaauaaagaaauaaaugaaauucaaaaugaaauaaauauuguguugugcagcauuaaaaaaucaauaaaaauuaaaaaugagcaagaucuaaaaaaaaaaaaaaaaaaaaaaaaaaaaaaaaaaaaaaaaaaaaaaaaaaaaaaaaaaaaaaaaugcaucccccccccccccccccccccccccccccccaaaggcucuuuucagagccaccagaauu

SEQ ID NO: 17873 - RNA, 2180 nt, Artificial Sequence
  mRNA product Design f-4 comprising derived and/or modified sequence from HRSV(Memphis-37)__AIY60640.1__F_DSCav1_mut6 (opt2)
gggagagucccgcagucggcguccagcggcucugcuuguucgugugugugucguugcaggccuuauucaagcuuaccauggagcuccccauccucaagaccaacgccaucaccaccauccucgccgccgucacccucugcuucgccuccucccagaacaucaccgaggaguucuaccaguccaccugcuccgccgucuccaagggcuaccucggcgcccuccgcaccggcugguacaccuccgucaucaccaucgagcucuccaacaucaaggagaacaagugcaacggcaccgacgccaaggucaagcucaucaagcaggagcucgacaaguacaagaacgccgucaccgaccuccagaugcucaugugcuccacccccgccgccggcuccggcuccgccaucgccuccggcaucgccgucugcaagguccuccaccucgagggcgaggucaacaagaucaagaacgcccuccucuccaccaacaaggccgucgucucccucuccaacggcgucuccguccucaccuucaagguccucgaccucaagaacuacaucgacaagcagcuccuccccauccucaacaagcaguccugcuccauccccaaccccgagaccgucauggaguuccagcagaagaacaaccgccuccucgagaucacccgcgaguucuccgucaacgccggcgucaccacccccgucuccaccuacaugcucaccaacuccgagcuccucucccucaucaacgacaugcccaucaccaacgaccagaagaagcucauguccaacaacguccagaucguccgccagcaguccuacuccaucaugugcaucaucaaggaggagguccucgccuacgucguccagcucccccucuacggcgucaucgacacccccugcuggaagcuccacaccuccccccucugcaccaccaacaccaaggagggcuccaacaucugccucacccgcaccgaccgcggcugguacugcgacaacgccggcuccgucuccuucuucccccaggccgagaccugcaaggucugcuccaaccgcgucuucugcgacaccaugaacucccucacccuccccuccgaggucaaccucugcaacaucgacaucuucaaccccaaguacgacugcaagaucaugaccuccaagaccgacgucuccuccuccgucaucaccucccucggcgccaucgucuccugcuacggcaagaccaagugcaccgccuccaacaagaacaagggcaucaucaagaccuucuccaacggcugcgacuacgucuccaacaagggcgucgacaccgucuccgucggcaacacccucuacuacgucaacaagcaggagggccagucccucuacgucaagggcgagcccaucaucaacuucuacgacccccucgucuuccccuccgacgaguucgacgccuccaucucccaggucaacgagaagaucaaccagucccucgccuucauccgcaaguccgacgagcuccuccacaacgucaacgucggcaaguccaccaccaacaucaugaucaccaccaucaucaucgucaucaucgucauccuccuccuccucaucgccgucggccucuuccucuacugcaaggcccgcuccacccccgucacccucuccaaggaccagcucuccggcaucaacaacaucgccuucuccaacugaggacuagugaagggaacacccaaauuuaauucagccuuaagcacaauuaauuaagagugaaacguaauuguacaagcaguuggucacccaccauagggcaugaucaacaccgcaaccuuuccuuuuucccccagugauucugaaaaaccccucuucccuucagcuugcuuagauguuccaaauuuaguaagcuuaaggcggccuacagaagaaaaagaaaaaaaaggccacaaaaguucccucucacuuucaguaaauaaaauaaaagcagcaacagaaauaaagaaauaaaugaaauucaaaaugaaauaaauauuguguugugcagcauuaaaaaaucaauaaaaauuaaaaaugagcaagaucuaaaaaaaaaaaaaaaaaaaaaaaaaaaaaaaaaaaaaaaaaaaaaaaaaaaaaaaaaaaaaaaaugcaucccccccccccccccccccccccccccccccaaaggcucuuuucagagccaccagaauu

SEQ ID NO: 17874 - RNA, 2180 nt, Artificial Sequence
  mRNA product Design f-4 comprising derived and/or modified sequence from HRSV(Memphis-37)__AIY60640.1__F_DSCav1_mut6 (opt3)
gggagagucccgcagucggcguccagcggcucugcuuguucgugugugugucguugcaggccuuauucaagcuuaccauggagcugcccauccucaagaccaacgccauuacaacuauacuugcugcagugacgcugugcuucgccagcucccagaauaucaccgaagaguuuuaccaaucuacauguucagcggucaguaaaggcuauuugggggcuuuaagaacuggaugguacaccagcguuauuacaaucgaacuguccaacauuaaggagaauaaaugcaacgguaccgacgccaaggugaaacuaaucaagcaggaacucgauaaguauaaaaaugcaguaacugaccugcagaugcuuauguguucuacuccugccgcuggcucggggucagcaauagccagcggaaucgcugugugcaagguccugcacuuggagggcgaggugaacaaaauuaagaaugcccuccugaguaccaacaaagcgguugugucccugucuaauggugucagcgugcucacguucaagguauuagaucugaagaacuacaucgacaaacagcuuuugccaauucugaauaagcaauccuguucaaucccgaaccccgaaacuguuauggaguuucagcagaaaaauaacaggcuacucgaaauaacccgggaguucagugugaaugcaggggucacaacuccugugagcaccuauaugcugacaaacucugagcuucuguccuugauuaacgauaugccaaucaccaaugaccagaagaaacucaugucaaacaaugugcaaauuguccgccagcagagcuacaguaucaugugcaucauuaaggaagagguucuggccuaugugguacaguuaccccuguacggagugauagauacgccuuguuggaaacuccauacuucuccacuuugcacaaccaacacuaaggaaggcuccaauaucugucugacacgaaccgaccguggcugguacugcgauaacgcugggagcgucucguuuuucccccaagccgagacguguaaggugugcucuaauagaguuuucugcgacaccaugaacuccuugacacuaccuucagaagugaaucuguguaacauugauaucuucaauccaaaauaugacugcaagauaaugacaaguaaaaccgaugucagcuccucugugauuacaagccucggagcaaucguaucauguuacgguaagacuaaaugcaccgcuaguaacaagaauaagggcaucauuaaaacauuuuccaacgggugugacuauguuagcaauaagggaguggacaccgucucugugggcaacacucuguacuaugucaacaaacaggagggucagucacuuuacgugaagggggagccgaucauuaauuucuaugauccccugguuuuuccuagugacgaauuugaugccagcauaucccaagugaacgagaaaaucaaucagucuuuggcguuuauuaggaagucggacgaacuccugcacaacguaaaugucggaaagagcacgacaaacaucaugaucaccacuauuauaaucgugauuaucguuauuuuacugcuacucaucgccgugggccuguuccuuuacugcaaagcacgguccaccccagucacauugucaaaggaucagcugaguggcauaaauaacaucgcuuucucuaauugaggacuagugaagggaacacccaaauuuaauucagccuuaagcacaauuaauuaagagugaaacguaauuguacaagcaguuggucacccaccauagggcaugaucaacaccgcaaccuuuccuuuuucccccagugauucugaaaaaccccucuucccuucagcuugcuuagauguuccaaauuuaguaagcuuaaggcggccuacagaagaaaaagaaaaaaaaggccacaaaaguucccucucacuuucaguaaauaaaauaaaagcagcaacagaaauaaagaaauaaaugaaauucaaaaugaaauaaauauuguguugugcagcauuaaaaaaucaauaaaaauuaaaaaugagcaagaucuaaaaaaaaaaaaaaaaaaaaaaaaaaaaaaaaaaaaaaaaaaaaaaaaaaaaaaaaaaaaaaaaugcaucccccccccccccccccccccccccccccccaaaggcucuuuucagagccaccagaauu

SEQ ID NO: 17875 - RNA, 2180 nt, Artificial Sequence
  mRNA product Design f-4 comprising derived and/or modified sequence from HRSV(Memphis-37)__AIY60640.1__F_DSCav1_mut6 (opt4)
gggagagucccgcagucggcguccagcggcucugcuuguucgugugugugucguugcaggccuuauucaagcuuaccauggagcugcccauccugaagaccaacgccaucaccaccauccuggccgccgugacccugugcuucgccagcagccagaacaucaccgaggaguucuaccagagcaccugcagcgccgugagcaagggcuaccugggcgcccugagaaccggcugguacaccagcgugaucaccaucgagcugagcaacaucaaggagaacaagugcaacggcaccgacgccaaggugaagcugaucaagcaggagcuggacaaguacaagaacgccgugaccgaccugcagaugcugaugugcagcacccccgccgccggcagcggcagcgccaucgccagcggcaucgccgugugcaaggugcugcaccuggagggcgaggugaacaagaucaagaacgcccugcugagcaccaacaaggccguggugagccugagcaacggcgugagcgugcugaccuucaaggugcuggaccugaagaacuacaucgacaagcagcugcugcccauccugaacaagcagagcugcagcauccccaaccccgagaccgugauggaguuccagcagaagaacaacagacugcuggagaucaccagagaguucagcgugaacgccggcgugaccacccccgugagcaccuacaugcugaccaacagcgagcugcugagccugaucaacgacaugcccaucaccaacgaccagaagaagcugaugagcaacaacgugcagaucgugagacagcagagcuacagcaucaugugcaucaucaaggaggaggugcuggccuacguggugcagcugccccuguacggcgugaucgacacccccugcuggaagcugcacaccagcccccugugcaccaccaacaccaaggagggcagcaacaucugccugaccagaaccgacagaggcugguacugcgacaacgccggcagcgugagcuucuucccccaggccgagaccugcaaggugugcagcaacagaguguucugcgacaccaugaacagccugacccugcccagcgaggugaaccugugcaacaucgacaucuucaaccccaaguacgacugcaagaucaugaccagcaagaccgacgugagcagcagcgugaucaccagccugggcgccaucgugagcugcuacggcaagaccaagugcaccgccagcaacaagaacaagggcaucaucaagaccuucagcaacggcugcgacuacgugagcaacaagggcguggacaccgugagcgugggcaacacccuguacuacgugaacaagcaggagggccagagccuguacgugaagggcgagcccaucaucaacuucuacgacccccugguguuccccagcgacgaguucgacgccagcaucagccaggugaacgagaagaucaaccagagccuggccuucaucagaaagagcgacgagcugcugcacaacgugaacgugggcaagagcaccaccaacaucaugaucaccaccaucaucaucgugaucaucgugauccugcugcugcugaucgccgugggccuguuccuguacugcaaggccagaagcacccccgugacccugagcaaggaccagcugagcggcaucaacaacaucgccuucagcaacugaggacuagugaagggaacacccaaauuuaauucagccuuaagcacaauuaauuaagagugaaacguaauuguacaagcaguuggucacccaccauagggcaugaucaacaccgcaaccuuuccuuuuucccccagugauucugaaaaaccccucuucccuucagcuugcuuagauguuccaaauuuaguaagcuuaaggcggccuacagaagaaaaagaaaaaaaaggccacaaaaguucccucucacuuucaguaaauaaaauaaaagcagcaacagaaauaaagaaauaaaugaaauucaaaaugaaauaaauauuguguugugcagcauuaaaaaaucaauaaaaauuaaaaaugagcaagaucuaaaaaaaaaaaaaaaaaaaaaaaaaaaaaaaaaaaaaaaaaaaaaaaaaaaaaaaaaaaaaaaaugcaucccccccccccccccccccccccccccccccaaaggcucuuuucagagccaccagaauu

SEQ ID NO: 17876 - RNA, 2180 nt, Artificial Sequence
  mRNA product Design f-4 comprising derived and/or modified sequence from HRSV(Memphis-37)__AIY60640.1__F_DSCav1_mut6 (opt5)
gggagagucccgcagucggcguccagcggcucugcuuguucgugugugugucguugcaggccuuauucaagcuuaccauggagcugcccauccucaagaccaacgccauuacaacgauccuggcugccgugacccuuugcuucgcgagcucccagaauauuacagaagaguuuuaccaaucuaccuguagcgcugucuccaaaggcuaucugggggcccucagaacaggaugguacaccucuguuaucacaauugaacugagcaacaucaaggagaauaaaugcaacggcaccgacgccaaggugaaacuuaucaagcaggaacuggauaaguauaaaaaugcugugacggaccuccagaugcugauguguuccaccccugccgcugggucuggaagcgccauugcguccggcaucgccgucugcaaggugcugcaccucgagggggagguuaacaaaauuaagaaugcucugcuuagcacaaacaaagccguggucucucuguccaauggagugagcguucucaccuucaaggugcuggaucuuaagaacuacaucgacaaacagcugcucccgauucugaauaagcaaucuuguuccauccccaacccugaaacagucauggaguuucagcagaaaaauaaccggcugcucgaaauuacccgcgaguucagcgugaaugcuggcgugacgacacccgucucuaccuauaugcugacaaacuccgagcuucugagccucaucaacgauaugccuaucaccaaugaccagaagaaacugauguccaacaauguucaaauugugagacagcagucuuacagcaucaugugcauuaucaaggaagaggugcuugccuaugucgugcagcugccccucuacggcguuauugauaccccuuguuggaaacugcauacauccccgcugugcacgaccaacacaaaggaagggagcaauaucugucucacccggacagaccgcggaugguacugcgauaacgcgggcucuguguccuuuuucccccaagccgagaccuguaaggucugcagcaauagaguguuuugcgacacgaugaacucucugacacuuccuagcgaaguuaaucuguguaacaucgauauuuucaaucccaaauaugacugcaagaucaugaccuccaaaaccgaugugucuagcuccgucauuacaagccucggggcuaucgugucuuguuacggaaagaccaaaugcacagccuccaacaagaauaagggcauuaucaaaacguuuagcaacgggugugacuaugucucuaauaagggaguggacaccguuuccgugggcaacacacuguacuaugucaacaaacaggagggccagagccuuuacgugaagggggagccuaucauuaauuucuaugauccccugguuuuuccguccgacgaauuugaugcuucuaucagccaagugaacgagaaaauuaaucagucccucgccuucauccggaagucugacgaacugcugcacaacgucaaugugggaaagagcaccacaaacauuaugaucaccacgauuaucaucgugauuaucguuauucuccugcuucugaucgccgucggccucuuccuguacugcaaagcucgcuccaccccugugacacugagcaaggaucagcuuucugggauuaauaacaucgcguucuccaauugaggacuagugaagggaacacccaaauuuaauucagccuuaagcacaauuaauuaagagugaaacguaauuguacaagcaguuggucacccaccauagggcaugaucaacaccgcaaccuuuccuuuuucccccagugauucugaaaaaccccucuucccuucagcuugcuuagauguuccaaauuuaguaagcuuaaggcggccuacagaagaaaaagaaaaaaaaggccacaaaaguucccucucacuuucaguaaauaaaauaaaagcagcaacagaaauaaagaaauaaaugaaauucaaaaugaaauaaauauuguguugugcagcauuaaaaaaucaauaaaaauuaaaaaugagcaagaucuaaaaaaaaaaaaaaaaaaaaaaaaaaaaaaaaaaaaaaaaaaaaaaaaaaaaaaaaaaaaaaaaugcaucccccccccccccccccccccccccccccccaaaggcucuuuucagagccaccagaauu

SEQ ID NO: 17877 - RNA, 2180 nt, Artificial Sequence
  mRNA product Design f-4 comprising derived and/or modified sequence from HRSV(Memphis-37)__AIY60640.1__F_DSCav1_mut6 (opt6)
gggagagucccgcagucggcguccagcggcucugcuuguucgugugugugucguugcaggccuuauucaagcuuaccauggaacuaccaauuuuaaaaacaaacgcaauuacaacuauacucgcagcaguaacauuauguuucgccucaucccaaaacauaacagaagaauuuuaccaaucaacaugcagcgcaguaucaaaaggauaucucggagcauuacgaacagguugguacacaucuguaaucacuauagaacuaucaaacauaaaagaaaacaaaugcaauggaaccgacgcaaaaguaaaauuaauaaaacaagaacucgauaaauacaaaaaugcaguaacagaccuccaaaugcucauguguucaacaccagccgcaggaucagguuccgccauagcaucuggcauagcaguaugcaaaguacuccacuuagaaggagaaguuaacaaaauaaaaaacgcacuauuaucaacaaacaaagcaguaguaucccucucaaacggagucucaguauuaacauucaaaguauuagaccuaaaaaacuacauagacaaacaacuacuuccaauacucaacaaacaaucaugcucaauaccaaacccagaaaccguaauggaauuucaacaaaaaaacaaccgacuacuagaaaucacacgagaauuuucaguaaacgccggugucacaacuccaguaucaacuuauauguuaaccaacucagaacuauuaucauuaauaaacgauaugcccauaacuaacgaccaaaaaaaauuaaugucaaacaacguacaaauaguacgccaacaaaguuacucaauaaugugcaucauaaaagaagaaguauuagcguacguuguacaacuaccucuauacggagucauagacacaccaugcuggaaacuucacacaucaccacuauguacaacaaacacaaaagaaggcaguaacauaugccuaacaagaacagaccguggaugguauugugacaacgcuggaucuguaucauucuucccucaagcagaaaccuguaaaguuugcucaaacagagucuucugugacacaaugaacucucuaacacuaccuuccgaagugaaccucuguaacauagacauauucaauccaaaauaugauugcaaaauaaugacuucaaaaacagauguaucauccucuguuauaacaucauuaggcgccauaguuucaugcuacggaaaaacuaaaugcacagcaucaaacaaaaacaaaggaauaauaaaaaccuucucaaauggaugcgacuacguaagcaacaaaggcguagacacaguaucaguagguaauacauuauacuacguaaacaaacaagaaggacaaucacuuuauguuaaaggagaaccuauaauaaacuucuacgacccacuuguauuuccauccgaugaauuugacgcaucuauaucacaagucaacgaaaaaauaaaccaaucauuagcauucauucgaaaauccgaugaacuacuccauaacguaaaugucggaaaaucaacaaccaacauaaugaucacaacaauaaucauagugauaauaguaauacuccuacuacuaaucgcaguaggucuauuccuauauuguaaagcaagaucuacuccaguuacacucucuaaagaccaauuaagcgguaucaacaacaucgccuucagcaauuaaggacuagugaagggaacacccaaauuuaauucagccuuaagcacaauuaauuaagagugaaacguaauuguacaagcaguuggucacccaccauagggcaugaucaacaccgcaaccuuuccuuuuucccccagugauucugaaaaaccccucuucccuucagcuugcuuagauguuccaaauuuaguaagcuuaaggcggccuacagaagaaaaagaaaaaaaaggccacaaaaguucccucucacuuucaguaaauaaaauaaaagcagcaacagaaauaaagaaauaaaugaaauucaaaaugaaauaaauauuguguugugcagcauuaaaaaaucaauaaaaauuaaaaaugagcaagaucuaaaaaaaaaaaaaaaaaaaaaaaaaaaaaaaaaaaaaaaaaaaaaaaaaaaaaaaaaaaaaaaaugcaucccccccccccccccccccccccccccccccaaaggcucuuuucagagccaccagaauu

SEQ ID NO: 17878 - RNA, 2180 nt, Artificial Sequence
  mRNA product Design f-4 comprising derived and/or modified sequence from HRSV(Memphis-37)__AIY60640.1__F_DSCav1_mut6 (opt11)
gggagagucccgcagucggcguccagcggcucugcuuguucgugugugugucguugcaggccuuauucaagcuuaccauggagcugcccauccucaagaccaacgccaucaccacgauccuggccgcggugacccugugcuucgcgagcucccaaaacaucaccgaggaguucuaccagagcacgugcuccgccgucagcaagggcuaccucggggcccugcgcaccggcugguacaccuccgugaucaccaucgagcugagcaacaucaaggaaaacaagugcaacgggacggacgcaaaggugaagcucaucaagcaggagcuggauaaguacaagaacgcggucacggaccugcagaugcucaugugcuccaccccggccgccggcagcggguccgccaucgcguccggcaucgccgugugcaagguguugcaccuggagggcgaggucaacaagaucaagaacgcccuccuuuccaccaauaaggcuguugugagccuguccaacggggucagcgugcucaccuucaaggugcuggaccugaagaacuacaucgacaagcagcuccugcccauccugaacaagcaguccugcagcauccccaaccccgagacagucauggaguuccagcagaagaacaaccggcuccuggagaucacccgcgaguucuccguuaacgccggggugaccaccccgguaagcacauacaugcugaccaacagcgagcuccugagccugaucaacgacaugcccaucaccaacgaccagaagaagcucaugagcaacaacgugcagaucgugcggcagcaguccuacagcaucaugugcaucaucaaggaggagguccuggcguacguggugcaacugccccucuacggggucaucgacacccccugcuggaagcugcacacguccccgcugugcaccaccaacaccaaggagggcagcaacaucugccucacgcgcaccgaccgggggugguacugcgacaacgcaggcuccgugagcuucuucccccaggccgagaccugcaaggugugcuccaaccgcgucuucugcgacaccaugaacagccugacgcugcccuccgaggugaaccucugcaacaucgacaucuucaaccccaaguacgacuguaagaucaugaccagcaagaccgaugucuccagcuccgugaucaccagccugggcgccauaguguccuguuaugggaagacgaagugcaccgccagcaacaagaacaaaggcaucaucaagaccuucuccaacgggugcgacuacgucagcaacaagggcguggacacaguguccgucggcaacacgcuguacuacgugaacaagcaggaggggcagagccucuacgugaagggcgagccgaucaucaacuucuacgauccccuggucuuccccagcgacgaguucgacgcguccaucagccaagugaacgagaagaucaaccagucccuggccuucauccgcaagagcgacgagcuccugcacaacgugaacgucgggaaguccaccaccaacaucaugaucaccaccaucaucaucgugaucaucgucauccugcuccugcugaucgccgucggccucuuccuguacugcaaggcccggagcacgcccgugacccuguccaaggaccagcugucgggcaucaacaacaucgccuucuccaacugaggacuagugaagggaacacccaaauuuaauucagccuuaagcacaauuaauuaagagugaaacguaauuguacaagcaguuggucacccaccauagggcaugaucaacaccgcaaccuuuccuuuuucccccagugauucugaaaaaccccucuucccuucagcuugcuuagauguuccaaauuuaguaagcuuaaggcggccuacagaagaaaaagaaaaaaaaggccacaaaaguucccucucacuuucaguaaauaaaauaaaagcagcaacagaaauaaagaaauaaaugaaauucaaaaugaaauaaauauuguguugugcagcauuaaaaaaucaauaaaaauuaaaaaugagcaagaucuaaaaaaaaaaaaaaaaaaaaaaaaaaaaaaaaaaaaaaaaaaaaaaaaaaaaaaaaaaaaaaaaugcaucccccccccccccccccccccccccccccccaaaggcucuuuucagagccaccagaauu

SEQ ID NO: 17879 - RNA, 1956 nt, Artificial Sequence
  mRNA product Design f-5 comprising derived and/or modified sequence from HRSV(Memphis-37)__AIY60640.1__F_DSCav1_mut6 (opt1)
gggagacuuucccauucuguagcagaauuugguguugccuguggucuuggucccgcggagaagcuuaccauggagcugcccauccucaagaccaacgccaucaccacgauccuggccgcggugacccugugcuucgccagcucccagaacaucaccgaggaguucuaccagagcacgugcuccgccgucagcaagggcuaccucggcgcccugcgcaccgggugguacaccagcgugaucaccaucgagcuguccaacaucaaggagaacaagugcaacggcaccgacgccaaggugaagcucaucaagcaggagcuggacaaguacaagaacgcggucacggaccugcagaugcugaugugcagcaccccggccgccggcuccgggagcgcgaucgccuccggcaucgccgucugcaaggugcugcaccucgagggcgaggugaacaagaucaagaacgcccugcuguccaccaacaaggccgucgugagccucuccaacggggugagcguccugaccuucaaggugcuggaccucaagaacuacaucgacaagcagcugcugcccauccugaacaagcagagcugcuccauccccaaccccgagaccgucauggaguuccagcagaagaacaaccgccuccuggagaucacgcgggaguucagcgugaacgcgggcgugaccacccccgucuccaccuacaugcugacgaacagcgagcuccugucccugaucaacgacaugccgaucaccaacgaccagaagaagcucaugagcaacaacgugcagaucgugcgccagcaguccuacagcaucaugugcaucaucaaggaggagguccuggccuacguggugcagcugccccucuacggggucaucgacacccccugcuggaagcugcacaccagcccccugugcacgaccaacaccaaggagggcuccaacaucugccucacccggacggaccgcgggugguacugcgacaacgccggcagcguguccuucuucccgcaggccgagaccugcaaggucugcagcaaccggguguucugcgacaccaugaacucccugacccugcccagcgaggugaaccucugcaacaucgacaucuucaaccccaaguacgacugcaagaucaugacguccaagaccgacgucagcuccagcgugaucaccucccugggcgccaucgugagcugcuacgggaagaccaagugcacggcgagcaacaagaacaagggcaucaucaagaccuucuccaacgggugcgacuacgucagcaacaagggcguggacaccguguccgucggcaacacccuguacuacgugaacaagcaggagggccagagccucuacgugaagggggagcccaucaucaacuucuacgacccgcuggucuuccccuccgacgaguucgacgccagcaucucccaggugaacgagaagaucaaccagagccuggccuucauccggaaguccgacgagcuccugcacaacgugaacgucggcaagagcaccacgaacaucaugaucaccaccaucaucaucgugaucaucgugauccugcugcuccugaucgccgucgggcuguuccucuacugcaaggcccgcuccacccccgugacgcugagcaaggaccagcuguccgggaucaacaacaucgcguucagcaacugaggacuaguacuggcugcaucucccuuuccucuguccuccauccuucucccaggauggugaagggggaccugguacccagugauccccaccccaggauccuaaaucaugacuuaccugcuaauaaaaacucauuggaaaagugagaagaucuaaaaaaaaaaaaaaaaaaaaaaaaaaaaaaaaaaaaaaaaaaaaaaaaaaaaaaaaaaaaaaaaugcaucccccccccccccccccccccccccccccccaaaggcucuuuucagagccaccagaauu

SEQ ID NO: 17880 - RNA, 1956 nt, Artificial Sequence
  mRNA product Design f-5 comprising derived and/or modified sequence from HRSV(Memphis-37)__AIY60640.1__F_DSCav1_mut6 (opt1)
gggagacuuucccauucuguagcagaauuugguguugccuguggucuuggucccgcggagaagcuuaccauggagcugcccauccucaagaccaacgccaucaccacgauccuggccgcggugacccugugcuucgccagcucccagaacaucaccgaggaguucuaccagagcacgugcuccgccgucagcaagggcuaccucggggcccugcgcaccggcugguacaccuccgugaucaccaucgagcugagcaacaucaaggagaacaagugcaacgggaccgacgccaaggugaagcucaucaagcaggagcuggacaaguacaagaacgcggucacggaccugcagaugcucaugugcuccaccccggccgccggcagcggguccgccaucgcgagcggcaucgccgugugcaaggugcugcaccuggagggcgaggucaacaagaucaagaacgcccuccuguccaccaacaaggccguggugagccuguccaacggggucagcgugcucaccuucaaggugcuggaccugaagaacuacaucgacaagcagcuccugcccauccugaacaagcaguccugcagcauccccaaccccgagacggucauggaguuccagcagaagaacaaccggcuccuggagaucacccgcgaguucuccgugaacgccggcgugaccaccccggucagcacguacaugcugaccaacuccgagcuccugagccugaucaacgacaugcccaucaccaacgaccagaagaagcucaugagcaacaacgugcagaucgugcggcagcaguccuacagcaucaugugcaucaucaaggaggagguccuggcguacguggugcagcugccccucuacggggucaucgacacccccugcuggaagcugcacacguccccgcugugcaccaccaacaccaaggagggcagcaacaucugccucacgcgcaccgaccgggggugguacugcgacaacgccggcuccgugagcuucuucccccaggccgagaccugcaaggugugcuccaaccgcgucuucugcgacaccaugaacagccugacgcugcccuccgaggugaaccucugcaacaucgacaucuucaaccccaaguacgacugcaagaucaugaccagcaagaccgacgucuccagcuccgugaucaccagccugggcgccaucguguccugcuacgggaagacgaagugcaccgccagcaacaagaacaagggcaucaucaagaccuucuccaacgggugcgacuacgucagcaacaagggcguggacaccguguccgucggcaacacgcuguacuacgugaacaagcaggaggggcagagccucuacgugaagggcgagccgaucaucaacuucuacgacccccuggucuuccccagcgacgaguucgacgcguccaucagccaggugaacgagaagaucaaccagucccuggccuucauccgcaagagcgacgagcuccugcacaacgugaacgucgggaaguccaccaccaacaucaugaucaccaccaucaucaucgugaucaucgugauccugcuccugcugaucgccgucggccucuuccuguacugcaaggcccggagcacgcccgugacccuguccaaggaccagcugagcgggaucaacaacaucgccuucuccaacugaggacuaguacuggcugcaucucccuuuccucuguccuccauccuucucccaggauggugaagggggaccugguacccagugauccccaccccaggauccuaaaucaugacuuaccugcuaauaaaaacucauuggaaaagugagaagaucuaaaaaaaaaaaaaaaaaaaaaaaaaaaaaaaaaaaaaaaaaaaaaaaaaaaaaaaaaaaaaaaaugcaucccccccccccccccccccccccccccccccaaaggcucuuuucagagccaccagaauu

SEQ ID NO: 17881 - RNA, 1956 nt, Artificial Sequence
  mRNA product Design f-5 comprising derived and/or modified sequence from HRSV(Memphis-37)__AIY60640.1__F_DSCav1_mut6 (opt2)
gggagacuuucccauucuguagcagaauuugguguugccuguggucuuggucccgcggagaagcuuaccauggagcuccccauccucaagaccaacgccaucaccaccauccucgccgccgucacccucugcuucgccuccucccagaacaucaccgaggaguucuaccaguccaccugcuccgccgucuccaagggcuaccucggcgcccuccgcaccggcugguacaccuccgucaucaccaucgagcucuccaacaucaaggagaacaagugcaacggcaccgacgccaaggucaagcucaucaagcaggagcucgacaaguacaagaacgccgucaccgaccuccagaugcucaugugcuccacccccgccgccggcuccggcuccgccaucgccuccggcaucgccgucugcaagguccuccaccucgagggcgaggucaacaagaucaagaacgcccuccucuccaccaacaaggccgucgucucccucuccaacggcgucuccguccucaccuucaagguccucgaccucaagaacuacaucgacaagcagcuccuccccauccucaacaagcaguccugcuccauccccaaccccgagaccgucauggaguuccagcagaagaacaaccgccuccucgagaucacccgcgaguucuccgucaacgccggcgucaccacccccgucuccaccuacaugcucaccaacuccgagcuccucucccucaucaacgacaugcccaucaccaacgaccagaagaagcucauguccaacaacguccagaucguccgccagcaguccuacuccaucaugugcaucaucaaggaggagguccucgccuacgucguccagcucccccucuacggcgucaucgacacccccugcuggaagcuccacaccuccccccucugcaccaccaacaccaaggagggcuccaacaucugccucacccgcaccgaccgcggcugguacugcgacaacgccggcuccgucuccuucuucccccaggccgagaccugcaaggucugcuccaaccgcgucuucugcgacaccaugaacucccucacccuccccuccgaggucaaccucugcaacaucgacaucuucaaccccaaguacgacugcaagaucaugaccuccaagaccgacgucuccuccuccgucaucaccucccucggcgccaucgucuccugcuacggcaagaccaagugcaccgccuccaacaagaacaagggcaucaucaagaccuucuccaacggcugcgacuacgucuccaacaagggcgucgacaccgucuccgucggcaacacccucuacuacgucaacaagcaggagggccagucccucuacgucaagggcgagcccaucaucaacuucuacgacccccucgucuuccccuccgacgaguucgacgccuccaucucccaggucaacgagaagaucaaccagucccucgccuucauccgcaaguccgacgagcuccuccacaacgucaacgucggcaaguccaccaccaacaucaugaucaccaccaucaucaucgucaucaucgucauccuccuccuccucaucgccgucggccucuuccucuacugcaaggcccgcuccacccccgucacccucuccaaggaccagcucuccggcaucaacaacaucgccuucuccaacugaggacuaguacuggcugcaucucccuuuccucuguccuccauccuucucccaggauggugaagggggaccugguacccagugauccccaccccaggauccuaaaucaugacuuaccugcuaauaaaaacucauuggaaaagugagaagaucuaaaaaaaaaaaaaaaaaaaaaaaaaaaaaaaaaaaaaaaaaaaaaaaaaaaaaaaaaaaaaaaaugcaucccccccccccccccccccccccccccccccaaaggcucuuuucagagccaccagaauu

SEQ ID NO: 17882 - RNA, 1956 nt, Artificial Sequence
  mRNA product Design f-5 comprising derived and/or modified sequence from HRSV(Memphis-37)__AIY60640.1__F_DSCav1_mut6 (opt3)
gggagacuuucccauucuguagcagaauuugguguugccuguggucuuggucccgcggagaagcuuaccauggagcugcccauccucaagaccaacgccauuacaacuauacuugcugcagugacgcugugcuucgccagcucccagaauaucaccgaagaguuuuaccaaucuacauguucagcggucaguaaaggcuauuugggggcuuuaagaacuggaugguacaccagcguuauuacaaucgaacuguccaacauuaaggagaauaaaugcaacgguaccgacgccaaggugaaacuaaucaagcaggaacucgauaaguauaaaaaugcaguaacugaccugcagaugcuuauguguucuacuccugccgcuggcucggggucagcaauagccagcggaaucgcugugugcaagguccugcacuuggagggcgaggugaacaaaauuaagaaugcccuccugaguaccaacaaagcgguugugucccugucuaauggugucagcgugcucacguucaagguauuagaucugaagaacuacaucgacaaacagcuuuugccaauucugaauaagcaauccuguucaaucccgaaccccgaaacuguuauggaguuucagcagaaaaauaacaggcuacucgaaauaacccgggaguucagugugaaugcaggggucacaacuccugugagcaccuauaugcugacaaacucugagcuucuguccuugauuaacgauaugccaaucaccaaugaccagaagaaacucaugucaaacaaugugcaaauuguccgccagcagagcuacaguaucaugugcaucauuaaggaagagguucuggccuaugugguacaguuaccccuguacggagugauagauacgccuuguuggaaacuccauacuucuccacuuugcacaaccaacacuaaggaaggcuccaauaucugucugacacgaaccgaccguggcugguacugcgauaacgcugggagcgucucguuuuucccccaagccgagacguguaaggugugcucuaauagaguuuucugcgacaccaugaacuccuugacacuaccuucagaagugaaucuguguaacauugauaucuucaauccaaaauaugacugcaagauaaugacaaguaaaaccgaugucagcuccucugugauuacaagccucggagcaaucguaucauguuacgguaagacuaaaugcaccgcuaguaacaagaauaagggcaucauuaaaacauuuuccaacgggugugacuauguuagcaauaagggaguggacaccgucucugugggcaacacucuguacuaugucaacaaacaggagggucagucacuuuacgugaagggggagccgaucauuaauuucuaugauccccugguuuuuccuagugacgaauuugaugccagcauaucccaagugaacgagaaaaucaaucagucuuuggcguuuauuaggaagucggacgaacuccugcacaacguaaaugucggaaagagcacgacaaacaucaugaucaccacuauuauaaucgugauuaucguuauuuuacugcuacucaucgccgugggccuguuccuuuacugcaaagcacgguccaccccagucacauugucaaaggaucagcugaguggcauaaauaacaucgcuuucucuaauugaggacuaguacuggcugcaucucccuuuccucuguccuccauccuucucccaggauggugaagggggaccugguacccagugauccccaccccaggauccuaaaucaugacuuaccugcuaauaaaaacucauuggaaaagugagaagaucuaaaaaaaaaaaaaaaaaaaaaaaaaaaaaaaaaaaaaaaaaaaaaaaaaaaaaaaaaaaaaaaaugcaucccccccccccccccccccccccccccccccaaaggcucuuuucagagccaccagaauu

SEQ ID NO: 17883 - RNA, 1956 nt, Artificial Sequence
  mRNA product Design f-5 comprising derived and/or modified sequence from HRSV(Memphis-37)__AIY60640.1__F_DSCav1_mut6 (opt4)
gggagacuuucccauucuguagcagaauuugguguugccuguggucuuggucccgcggagaagcuuaccauggagcugcccauccugaagaccaacgccaucaccaccauccuggccgccgugacccugugcuucgccagcagccagaacaucaccgaggaguucuaccagagcaccugcagcgccgugagcaagggcuaccugggcgcccugagaaccggcugguacaccagcgugaucaccaucgagcugagcaacaucaaggagaacaagugcaacggcaccgacgccaaggugaagcugaucaagcaggagcuggacaaguacaagaacgccgugaccgaccugcagaugcugaugugcagcacccccgccgccggcagcggcagcgccaucgccagcggcaucgccgugugcaaggugcugcaccuggagggcgaggugaacaagaucaagaacgcccugcugagcaccaacaaggccguggugagccugagcaacggcgugagcgugcugaccuucaaggugcuggaccugaagaacuacaucgacaagcagcugcugcccauccugaacaagcagagcugcagcauccccaaccccgagaccgugauggaguuccagcagaagaacaacagacugcuggagaucaccagagaguucagcgugaacgccggcgugaccacccccgugagcaccuacaugcugaccaacagcgagcugcugagccugaucaacgacaugcccaucaccaacgaccagaagaagcugaugagcaacaacgugcagaucgugagacagcagagcuacagcaucaugugcaucaucaaggaggaggugcuggccuacguggugcagcugccccuguacggcgugaucgacacccccugcuggaagcugcacaccagcccccugugcaccaccaacaccaaggagggcagcaacaucugccugaccagaaccgacagaggcugguacugcgacaacgccggcagcgugagcuucuucccccaggccgagaccugcaaggugugcagcaacagaguguucugcgacaccaugaacagccugacccugcccagcgaggugaaccugugcaacaucgacaucuucaaccccaaguacgacugcaagaucaugaccagcaagaccgacgugagcagcagcgugaucaccagccugggcgccaucgugagcugcuacggcaagaccaagugcaccgccagcaacaagaacaagggcaucaucaagaccuucagcaacggcugcgacuacgugagcaacaagggcguggacaccgugagcgugggcaacacccuguacuacgugaacaagcaggagggccagagccuguacgugaagggcgagcccaucaucaacuucuacgacccccugguguuccccagcgacgaguucgacgccagcaucagccaggugaacgagaagaucaaccagagccuggccuucaucagaaagagcgacgagcugcugcacaacgugaacgugggcaagagcaccaccaacaucaugaucaccaccaucaucaucgugaucaucgugauccugcugcugcugaucgccgugggccuguuccuguacugcaaggccagaagcacccccgugacccugagcaaggaccagcugagcggcaucaacaacaucgccuucagcaacugaggacuaguacuggcugcaucucccuuuccucuguccuccauccuucucccaggauggugaagggggaccugguacccagugauccccaccccaggauccuaaaucaugacuuaccugcuaauaaaaacucauuggaaaagugagaagaucuaaaaaaaaaaaaaaaaaaaaaaaaaaaaaaaaaaaaaaaaaaaaaaaaaaaaaaaaaaaaaaaaugcaucccccccccccccccccccccccccccccccaaaggcucuuuucagagccaccagaauu

SEQ ID NO: 17884 - RNA, 1956 nt, Artificial Sequence
  mRNA product Design f-5 comprising derived and/or modified sequence from HRSV(Memphis-37)__AIY60640.1__F_DSCav1_mut6 (opt5)
gggagacuuucccauucuguagcagaauuugguguugccuguggucuuggucccgcggagaagcuuaccauggagcugcccauccucaagaccaacgccauuacaacgauccuggcugccgugacccuuugcuucgcgagcucccagaauauuacagaagaguuuuaccaaucuaccuguagcgcugucuccaaaggcuaucugggggcccucagaacaggaugguacaccucuguuaucacaauugaacugagcaacaucaaggagaauaaaugcaacggcaccgacgccaaggugaaacuuaucaagcaggaacuggauaaguauaaaaaugcugugacggaccuccagaugcugauguguuccaccccugccgcugggucuggaagcgccauugcguccggcaucgccgucugcaaggugcugcaccucgagggggagguuaacaaaauuaagaaugcucugcuuagcacaaacaaagccguggucucucuguccaauggagugagcguucucaccuucaaggugcuggaucuuaagaacuacaucgacaaacagcugcucccgauucugaauaagcaaucuuguuccauccccaacccugaaacagucauggaguuucagcagaaaaauaaccggcugcucgaaauuacccgcgaguucagcgugaaugcuggcgugacgacacccgucucuaccuauaugcugacaaacuccgagcuucugagccucaucaacgauaugccuaucaccaaugaccagaagaaacugauguccaacaauguucaaauugugagacagcagucuuacagcaucaugugcauuaucaaggaagaggugcuugccuaugucgugcagcugccccucuacggcguuauugauaccccuuguuggaaacugcauacauccccgcugugcacgaccaacacaaaggaagggagcaauaucugucucacccggacagaccgcggaugguacugcgauaacgcgggcucuguguccuuuuucccccaagccgagaccuguaaggucugcagcaauagaguguuuugcgacacgaugaacucucugacacuuccuagcgaaguuaaucuguguaacaucgauauuuucaaucccaaauaugacugcaagaucaugaccuccaaaaccgaugugucuagcuccgucauuacaagccucggggcuaucgugucuuguuacggaaagaccaaaugcacagccuccaacaagaauaagggcauuaucaaaacguuuagcaacgggugugacuaugucucuaauaagggaguggacaccguuuccgugggcaacacacuguacuaugucaacaaacaggagggccagagccuuuacgugaagggggagccuaucauuaauuucuaugauccccugguuuuuccguccgacgaauuugaugcuucuaucagccaagugaacgagaaaauuaaucagucccucgccuucauccggaagucugacgaacugcugcacaacgucaaugugggaaagagcaccacaaacauuaugaucaccacgauuaucaucgugauuaucguuauucuccugcuucugaucgccgucggccucuuccuguacugcaaagcucgcuccaccccugugacacugagcaaggaucagcuuucugggauuaauaacaucgcguucuccaauugaggacuaguacuggcugcaucucccuuuccucuguccuccauccuucucccaggauggugaagggggaccugguacccagugauccccaccccaggauccuaaaucaugacuuaccugcuaauaaaaacucauuggaaaagugagaagaucuaaaaaaaaaaaaaaaaaaaaaaaaaaaaaaaaaaaaaaaaaaaaaaaaaaaaaaaaaaaaaaaaugcaucccccccccccccccccccccccccccccccaaaggcucuuuucagagccaccagaauu

SEQ ID NO: 17885 - RNA, 1956 nt, Artificial Sequence
  mRNA product Design f-5 comprising derived and/or modified sequence from HRSV(Memphis-37)__AIY60640.1__F_DSCav1_mut6 (opt6)
gggagacuuucccauucuguagcagaauuugguguugccuguggucuuggucccgcggagaagcuuaccauggaacuaccaauuuuaaaaacaaacgcaauuacaacuauacucgcagcaguaacauuauguuucgccucaucccaaaacauaacagaagaauuuuaccaaucaacaugcagcgcaguaucaaaaggauaucucggagcauuacgaacagguugguacacaucuguaaucacuauagaacuaucaaacauaaaagaaaacaaaugcaauggaaccgacgcaaaaguaaaauuaauaaaacaagaacucgauaaauacaaaaaugcaguaacagaccuccaaaugcucauguguucaacaccagccgcaggaucagguuccgccauagcaucuggcauagcaguaugcaaaguacuccacuuagaaggagaaguuaacaaaauaaaaaacgcacuauuaucaacaaacaaagcaguaguaucccucucaaacggagucucaguauuaacauucaaaguauuagaccuaaaaaacuacauagacaaacaacuacuuccaauacucaacaaacaaucaugcucaauaccaaacccagaaaccguaauggaauuucaacaaaaaaacaaccgacuacuagaaaucacacgagaauuuucaguaaacgccggugucacaacuccaguaucaacuuauauguuaaccaacucagaacuauuaucauuaauaaacgauaugcccauaacuaacgaccaaaaaaaauuaaugucaaacaacguacaaauaguacgccaacaaaguuacucaauaaugugcaucauaaaagaagaaguauuagcguacguuguacaacuaccucuauacggagucauagacacaccaugcuggaaacuucacacaucaccacuauguacaacaaacacaaaagaaggcaguaacauaugccuaacaagaacagaccguggaugguauugugacaacgcuggaucuguaucauucuucccucaagcagaaaccuguaaaguuugcucaaacagagucuucugugacacaaugaacucucuaacacuaccuuccgaagugaaccucuguaacauagacauauucaauccaaaauaugauugcaaaauaaugacuucaaaaacagauguaucauccucuguuauaacaucauuaggcgccauaguuucaugcuacggaaaaacuaaaugcacagcaucaaacaaaaacaaaggaauaauaaaaaccuucucaaauggaugcgacuacguaagcaacaaaggcguagacacaguaucaguagguaauacauuauacuacguaaacaaacaagaaggacaaucacuuuauguuaaaggagaaccuauaauaaacuucuacgacccacuuguauuuccauccgaugaauuugacgcaucuauaucacaagucaacgaaaaaauaaaccaaucauuagcauucauucgaaaauccgaugaacuacuccauaacguaaaugucggaaaaucaacaaccaacauaaugaucacaacaauaaucauagugauaauaguaauacuccuacuacuaaucgcaguaggucuauuccuauauuguaaagcaagaucuacuccaguuacacucucuaaagaccaauuaagcgguaucaacaacaucgccuucagcaauuaaggacuaguacuggcugcaucucccuuuccucuguccuccauccuucucccaggauggugaagggggaccugguacccagugauccccaccccaggauccuaaaucaugacuuaccugcuaauaaaaacucauuggaaaagugagaagaucuaaaaaaaaaaaaaaaaaaaaaaaaaaaaaaaaaaaaaaaaaaaaaaaaaaaaaaaaaaaaaaaaugcaucccccccccccccccccccccccccccccccaaaggcucuuuucagagccaccagaauu

SEQ ID NO: 17886 - RNA, 1956 nt, Artificial Sequence
  mRNA product Design f-5 comprising derived and/or modified sequence from HRSV(Memphis-37)__AIY60640.1__F_DSCav1_mut6 (opt11)
gggagacuuucccauucuguagcagaauuugguguugccuguggucuuggucccgcggagaagcuuaccauggagcugcccauccucaagaccaacgccaucaccacgauccuggccgcggugacccugugcuucgcgagcucccaaaacaucaccgaggaguucuaccagagcacgugcuccgccgucagcaagggcuaccucggggcccugcgcaccggcugguacaccuccgugaucaccaucgagcugagcaacaucaaggaaaacaagugcaacgggacggacgcaaaggugaagcucaucaagcaggagcuggauaaguacaagaacgcggucacggaccugcagaugcucaugugcuccaccccggccgccggcagcggguccgccaucgcguccggcaucgccgugugcaagguguugcaccuggagggcgaggucaacaagaucaagaacgcccuccuuuccaccaauaaggcuguugugagccuguccaacggggucagcgugcucaccuucaaggugcuggaccugaagaacuacaucgacaagcagcuccugcccauccugaacaagcaguccugcagcauccccaaccccgagacagucauggaguuccagcagaagaacaaccggcuccuggagaucacccgcgaguucuccguuaacgccggggugaccaccccgguaagcacauacaugcugaccaacagcgagcuccugagccugaucaacgacaugcccaucaccaacgaccagaagaagcucaugagcaacaacgugcagaucgugcggcagcaguccuacagcaucaugugcaucaucaaggaggagguccuggcguacguggugcaacugccccucuacggggucaucgacacccccugcuggaagcugcacacguccccgcugugcaccaccaacaccaaggagggcagcaacaucugccucacgcgcaccgaccgggggugguacugcgacaacgcaggcuccgugagcuucuucccccaggccgagaccugcaaggugugcuccaaccgcgucuucugcgacaccaugaacagccugacgcugcccuccgaggugaaccucugcaacaucgacaucuucaaccccaaguacgacuguaagaucaugaccagcaagaccgaugucuccagcuccgugaucaccagccugggcgccauaguguccuguuaugggaagacgaagugcaccgccagcaacaagaacaaaggcaucaucaagaccuucuccaacgggugcgacuacgucagcaacaagggcguggacacaguguccgucggcaacacgcuguacuacgugaacaagcaggaggggcagagccucuacgugaagggcgagccgaucaucaacuucuacgauccccuggucuuccccagcgacgaguucgacgcguccaucagccaagugaacgagaagaucaaccagucccuggccuucauccgcaagagcgacgagcuccugcacaacgugaacgucgggaaguccaccaccaacaucaugaucaccaccaucaucaucgugaucaucgucauccugcuccugcugaucgccgucggccucuuccuguacugcaaggcccggagcacgcccgugacccuguccaaggaccagcugucgggcaucaacaacaucgccuucuccaacugaggacuaguacuggcugcaucucccuuuccucuguccuccauccuucucccaggauggugaagggggaccugguacccagugauccccaccccaggauccuaaaucaugacuuaccugcuaauaaaaacucauuggaaaagugagaagaucuaaaaaaaaaaaaaaaaaaaaaaaaaaaaaaaaaaaaaaaaaaaaaaaaaaaaaaaaaaaaaaaaugcaucccccccccccccccccccccccccccccccaaaggcucuuuucagagccaccagaauu

SEQ ID NO: 17887 - RNA, 1952 nt, Artificial Sequence
  mRNA product Design g-1 comprising derived and/or modified sequence from HRSV(Memphis-37)__AIY60640.1__F_DSCav1_mut6 (opt1)
gggagacuuucccauucuguagcagaauuugguguugccuguggucuuggucccgcggagaagcuuaccauggagcugcccauccucaagaccaacgccaucaccacgauccuggccgcggugacccugugcuucgccagcucccagaacaucaccgaggaguucuaccagagcacgugcuccgccgucagcaagggcuaccucggcgcccugcgcaccgggugguacaccagcgugaucaccaucgagcuguccaacaucaaggagaacaagugcaacggcaccgacgccaaggugaagcucaucaagcaggagcuggacaaguacaagaacgcggucacggaccugcagaugcugaugugcagcaccccggccgccggcuccgggagcgcgaucgccuccggcaucgccgucugcaaggugcugcaccucgagggcgaggugaacaagaucaagaacgcccugcuguccaccaacaaggccgucgugagccucuccaacggggugagcguccugaccuucaaggugcuggaccucaagaacuacaucgacaagcagcugcugcccauccugaacaagcagagcugcuccauccccaaccccgagaccgucauggaguuccagcagaagaacaaccgccuccuggagaucacgcgggaguucagcgugaacgcgggcgugaccacccccgucuccaccuacaugcugacgaacagcgagcuccugucccugaucaacgacaugccgaucaccaacgaccagaagaagcucaugagcaacaacgugcagaucgugcgccagcaguccuacagcaucaugugcaucaucaaggaggagguccuggccuacguggugcagcugccccucuacggggucaucgacacccccugcuggaagcugcacaccagcccccugugcacgaccaacaccaaggagggcuccaacaucugccucacccggacggaccgcgggugguacugcgacaacgccggcagcguguccuucuucccgcaggccgagaccugcaaggucugcagcaaccggguguucugcgacaccaugaacucccugacccugcccagcgaggugaaccucugcaacaucgacaucuucaaccccaaguacgacugcaagaucaugacguccaagaccgacgucagcuccagcgugaucaccucccugggcgccaucgugagcugcuacgggaagaccaagugcacggcgagcaacaagaacaagggcaucaucaagaccuucuccaacgggugcgacuacgucagcaacaagggcguggacaccguguccgucggcaacacccuguacuacgugaacaagcaggagggccagagccucuacgugaagggggagcccaucaucaacuucuacgacccgcuggucuuccccuccgacgaguucgacgccagcaucucccaggugaacgagaagaucaaccagagccuggccuucauccggaaguccgacgagcuccugcacaacgugaacgucggcaagagcaccacgaacaucaugaucaccaccaucaucaucgugaucaucgugauccugcugcuccugaucgccgucgggcuguuccucuacugcaaggcccgcuccacccccgugacgcugagcaaggaccagcuguccgggaucaacaacaucgcguucagcaacugaggacuaguggaagcauuuuccuggcugauuaaaagaaauuacucagcuauggucaucuguuccuguuagaaggcuaugcagcauauuauauacuaugcgcauguuaugaaaugcauaauaaaaaauuuuaaaaaaucuaaaagaucuaaaaaaaaaaaaaaaaaaaaaaaaaaaaaaaaaaaaaaaaaaaaaaaaaaaaaaaaaaaaaaaaugcaucccccccccccccccccccccccccccccccaaaggcucuuuucagagccaccagaauu

SEQ ID NO: 17888 - RNA, 1952 nt, Artificial Sequence
  mRNA product Design g-1 comprising derived and/or modified sequence from HRSV(Memphis-37)__AIY60640.1__F_DSCav1_mut6 (opt1)
gggagacuuucccauucuguagcagaauuugguguugccuguggucuuggucccgcggagaagcuuaccauggagcugcccauccucaagaccaacgccaucaccacgauccuggccgcggugacccugugcuucgccagcucccagaacaucaccgaggaguucuaccagagcacgugcuccgccgucagcaagggcuaccucggggcccugcgcaccggcugguacaccuccgugaucaccaucgagcugagcaacaucaaggagaacaagugcaacgggaccgacgccaaggugaagcucaucaagcaggagcuggacaaguacaagaacgcggucacggaccugcagaugcucaugugcuccaccccggccgccggcagcggguccgccaucgcgagcggcaucgccgugugcaaggugcugcaccuggagggcgaggucaacaagaucaagaacgcccuccuguccaccaacaaggccguggugagccuguccaacggggucagcgugcucaccuucaaggugcuggaccugaagaacuacaucgacaagcagcuccugcccauccugaacaagcaguccugcagcauccccaaccccgagacggucauggaguuccagcagaagaacaaccggcuccuggagaucacccgcgaguucuccgugaacgccggcgugaccaccccggucagcacguacaugcugaccaacuccgagcuccugagccugaucaacgacaugcccaucaccaacgaccagaagaagcucaugagcaacaacgugcagaucgugcggcagcaguccuacagcaucaugugcaucaucaaggaggagguccuggcguacguggugcagcugccccucuacggggucaucgacacccccugcuggaagcugcacacguccccgcugugcaccaccaacaccaaggagggcagcaacaucugccucacgcgcaccgaccgggggugguacugcgacaacgccggcuccgugagcuucuucccccaggccgagaccugcaaggugugcuccaaccgcgucuucugcgacaccaugaacagccugacgcugcccuccgaggugaaccucugcaacaucgacaucuucaaccccaaguacgacugcaagaucaugaccagcaagaccgacgucuccagcuccgugaucaccagccugggcgccaucguguccugcuacgggaagacgaagugcaccgccagcaacaagaacaagggcaucaucaagaccuucuccaacgggugcgacuacgucagcaacaagggcguggacaccguguccgucggcaacacgcuguacuacgugaacaagcaggaggggcagagccucuacgugaagggcgagccgaucaucaacuucuacgacccccuggucuuccccagcgacgaguucgacgcguccaucagccaggugaacgagaagaucaaccagucccuggccuucauccgcaagagcgacgagcuccugcacaacgugaacgucgggaaguccaccaccaacaucaugaucaccaccaucaucaucgugaucaucgugauccugcuccugcugaucgccgucggccucuuccuguacugcaaggcccggagcacgcccgugacccuguccaaggaccagcugagcgggaucaacaacaucgccuucuccaacugaggacuaguggaagcauuuuccuggcugauuaaaagaaauuacucagcuauggucaucuguuccuguuagaaggcuaugcagcauauuauauacuaugcgcauguuaugaaaugcauaauaaaaaauuuuaaaaaaucuaaaagaucuaaaaaaaaaaaaaaaaaaaaaaaaaaaaaaaaaaaaaaaaaaaaaaaaaaaaaaaaaaaaaaaaugcaucccccccccccccccccccccccccccccccaaaggcucuuuucagagccaccagaauu

SEQ ID NO: 17889 - RNA, 1952 nt, Artificial Sequence
  mRNA product Design g-1 comprising derived and/or modified sequence from HRSV(Memphis-37)__AIY60640.1__F_DSCav1_mut6 (opt2)
gggagacuuucccauucuguagcagaauuugguguugccuguggucuuggucccgcggagaagcuuaccauggagcuccccauccucaagaccaacgccaucaccaccauccucgccgccgucacccucugcuucgccuccucccagaacaucaccgaggaguucuaccaguccaccugcuccgccgucuccaagggcuaccucggcgcccuccgcaccggcugguacaccuccgucaucaccaucgagcucuccaacaucaaggagaacaagugcaacggcaccgacgccaaggucaagcucaucaagcaggagcucgacaaguacaagaacgccgucaccgaccuccagaugcucaugugcuccacccccgccgccggcuccggcuccgccaucgccuccggcaucgccgucugcaagguccuccaccucgagggcgaggucaacaagaucaagaacgcccuccucuccaccaacaaggccgucgucucccucuccaacggcgucuccguccucaccuucaagguccucgaccucaagaacuacaucgacaagcagcuccuccccauccucaacaagcaguccugcuccauccccaaccccgagaccgucauggaguuccagcagaagaacaaccgccuccucgagaucacccgcgaguucuccgucaacgccggcgucaccacccccgucuccaccuacaugcucaccaacuccgagcuccucucccucaucaacgacaugcccaucaccaacgaccagaagaagcucauguccaacaacguccagaucguccgccagcaguccuacuccaucaugugcaucaucaaggaggagguccucgccuacgucguccagcucccccucuacggcgucaucgacacccccugcuggaagcuccacaccuccccccucugcaccaccaacaccaaggagggcuccaacaucugccucacccgcaccgaccgcggcugguacugcgacaacgccggcuccgucuccuucuucccccaggccgagaccugcaaggucugcuccaaccgcgucuucugcgacaccaugaacucccucacccuccccuccgaggucaaccucugcaacaucgacaucuucaaccccaaguacgacugcaagaucaugaccuccaagaccgacgucuccuccuccgucaucaccucccucggcgccaucgucuccugcuacggcaagaccaagugcaccgccuccaacaagaacaagggcaucaucaagaccuucuccaacggcugcgacuacgucuccaacaagggcgucgacaccgucuccgucggcaacacccucuacuacgucaacaagcaggagggccagucccucuacgucaagggcgagcccaucaucaacuucuacgacccccucgucuuccccuccgacgaguucgacgccuccaucucccaggucaacgagaagaucaaccagucccucgccuucauccgcaaguccgacgagcuccuccacaacgucaacgucggcaaguccaccaccaacaucaugaucaccaccaucaucaucgucaucaucgucauccuccuccuccucaucgccgucggccucuuccucuacugcaaggcccgcuccacccccgucacccucuccaaggaccagcucuccggcaucaacaacaucgccuucuccaacugaggacuaguggaagcauuuuccuggcugauuaaaagaaauuacucagcuauggucaucuguuccuguuagaaggcuaugcagcauauuauauacuaugcgcauguuaugaaaugcauaauaaaaaauuuuaaaaaaucuaaaagaucuaaaaaaaaaaaaaaaaaaaaaaaaaaaaaaaaaaaaaaaaaaaaaaaaaaaaaaaaaaaaaaaaugcaucccccccccccccccccccccccccccccccaaaggcucuuuucagagccaccagaauu

SEQ ID NO: 17890 - RNA, 1952 nt, Artificial Sequence
  mRNA product Design g-1 comprising derived and/or modified sequence from HRSV(Memphis-37)__AIY60640.1__F_DSCav1_mut6 (opt3)
gggagacuuucccauucuguagcagaauuugguguugccuguggucuuggucccgcggagaagcuuaccauggagcugcccauccucaagaccaacgccauuacaacuauacuugcugcagugacgcugugcuucgccagcucccagaauaucaccgaagaguuuuaccaaucuacauguucagcggucaguaaaggcuauuugggggcuuuaagaacuggaugguacaccagcguuauuacaaucgaacuguccaacauuaaggagaauaaaugcaacgguaccgacgccaaggugaaacuaaucaagcaggaacucgauaaguauaaaaaugcaguaacugaccugcagaugcuuauguguucuacuccugccgcuggcucggggucagcaauagccagcggaaucgcugugugcaagguccugcacuuggagggcgaggugaacaaaauuaagaaugcccuccugaguaccaacaaagcgguugugucccugucuaauggugucagcgugcucacguucaagguauuagaucugaagaacuacaucgacaaacagcuuuugccaauucugaauaagcaauccuguucaaucccgaaccccgaaacuguuauggaguuucagcagaaaaauaacaggcuacucgaaauaacccgggaguucagugugaaugcaggggucacaacuccugugagcaccuauaugcugacaaacucugagcuucuguccuugauuaacgauaugccaaucaccaaugaccagaagaaacucaugucaaacaaugugcaaauuguccgccagcagagcuacaguaucaugugcaucauuaaggaagagguucuggccuaugugguacaguuaccccuguacggagugauagauacgccuuguuggaaacuccauacuucuccacuuugcacaaccaacacuaaggaaggcuccaauaucugucugacacgaaccgaccguggcugguacugcgauaacgcugggagcgucucguuuuucccccaagccgagacguguaaggugugcucuaauagaguuuucugcgacaccaugaacuccuugacacuaccuucagaagugaaucuguguaacauugauaucuucaauccaaaauaugacugcaagauaaugacaaguaaaaccgaugucagcuccucugugauuacaagccucggagcaaucguaucauguuacgguaagacuaaaugcaccgcuaguaacaagaauaagggcaucauuaaaacauuuuccaacgggugugacuauguuagcaauaagggaguggacaccgucucugugggcaacacucuguacuaugucaacaaacaggagggucagucacuuuacgugaagggggagccgaucauuaauuucuaugauccccugguuuuuccuagugacgaauuugaugccagcauaucccaagugaacgagaaaaucaaucagucuuuggcguuuauuaggaagucggacgaacuccugcacaacguaaaugucggaaagagcacgacaaacaucaugaucaccacuauuauaaucgugauuaucguuauuuuacugcuacucaucgccgugggccuguuccuuuacugcaaagcacgguccaccccagucacauugucaaaggaucagcugaguggcauaaauaacaucgcuuucucuaauugaggacuaguggaagcauuuuccuggcugauuaaaagaaauuacucagcuauggucaucuguuccuguuagaaggcuaugcagcauauuauauacuaugcgcauguuaugaaaugcauaauaaaaaauuuuaaaaaaucuaaaagaucuaaaaaaaaaaaaaaaaaaaaaaaaaaaaaaaaaaaaaaaaaaaaaaaaaaaaaaaaaaaaaaaaugcaucccccccccccccccccccccccccccccccaaaggcucuuuucagagccaccagaauu

SEQ ID NO: 17891 - RNA, 1952 nt, Artificial Sequence
  mRNA product Design g-1 comprising derived and/or modified sequence from HRSV(Memphis-37)__AIY60640.1__F_DSCav1_mut6 (opt4)
gggagacuuucccauucuguagcagaauuugguguugccuguggucuuggucccgcggagaagcuuaccauggagcugcccauccugaagaccaacgccaucaccaccauccuggccgccgugacccugugcuucgccagcagccagaacaucaccgaggaguucuaccagagcaccugcagcgccgugagcaagggcuaccugggcgcccugagaaccggcugguacaccagcgugaucaccaucgagcugagcaacaucaaggagaacaagugcaacggcaccgacgccaaggugaagcugaucaagcaggagcuggacaaguacaagaacgccgugaccgaccugcagaugcugaugugcagcacccccgccgccggcagcggcagcgccaucgccagcggcaucgccgugugcaaggugcugcaccuggagggcgaggugaacaagaucaagaacgcccugcugagcaccaacaaggccguggugagccugagcaacggcgugagcgugcugaccuucaaggugcuggaccugaagaacuacaucgacaagcagcugcugcccauccugaacaagcagagcugcagcauccccaaccccgagaccgugauggaguuccagcagaagaacaacagacugcuggagaucaccagagaguucagcgugaacgccggcgugaccacccccgugagcaccuacaugcugaccaacagcgagcugcugagccugaucaacgacaugcccaucaccaacgaccagaagaagcugaugagcaacaacgugcagaucgugagacagcagagcuacagcaucaugugcaucaucaaggaggaggugcuggccuacguggugcagcugccccuguacggcgugaucgacacccccugcuggaagcugcacaccagcccccugugcaccaccaacaccaaggagggcagcaacaucugccugaccagaaccgacagaggcugguacugcgacaacgccggcagcgugagcuucuucccccaggccgagaccugcaaggugugcagcaacagaguguucugcgacaccaugaacagccugacccugcccagcgaggugaaccugugcaacaucgacaucuucaaccccaaguacgacugcaagaucaugaccagcaagaccgacgugagcagcagcgugaucaccagccugggcgccaucgugagcugcuacggcaagaccaagugcaccgccagcaacaagaacaagggcaucaucaagaccuucagcaacggcugcgacuacgugagcaacaagggcguggacaccgugagcgugggcaacacccuguacuacgugaacaagcaggagggccagagccuguacgugaagggcgagcccaucaucaacuucuacgacccccugguguuccccagcgacgaguucgacgccagcaucagccaggugaacgagaagaucaaccagagccuggccuucaucagaaagagcgacgagcugcugcacaacgugaacgugggcaagagcaccaccaacaucaugaucaccaccaucaucaucgugaucaucgugauccugcugcugcugaucgccgugggccuguuccuguacugcaaggccagaagcacccccgugacccugagcaaggaccagcugagcggcaucaacaacaucgccuucagcaacugaggacuaguggaagcauuuuccuggcugauuaaaagaaauuacucagcuauggucaucuguuccuguuagaaggcuaugcagcauauuauauacuaugcgcauguuaugaaaugcauaauaaaaaauuuuaaaaaaucuaaaagaucuaaaaaaaaaaaaaaaaaaaaaaaaaaaaaaaaaaaaaaaaaaaaaaaaaaaaaaaaaaaaaaaaugcaucccccccccccccccccccccccccccccccaaaggcucuuuucagagccaccagaauu

SEQ ID NO: 17892 - RNA, 1952 nt, Artificial Sequence
  mRNA product Design g-1 comprising derived and/or modified sequence from HRSV(Memphis-37)__AIY60640.1__F_DSCav1_mut6 (opt5)
gggagacuuucccauucuguagcagaauuugguguugccuguggucuuggucccgcggagaagcuuaccauggagcugcccauccucaagaccaacgccauuacaacgauccuggcugccgugacccuuugcuucgcgagcucccagaauauuacagaagaguuuuaccaaucuaccuguagcgcugucuccaaaggcuaucugggggcccucagaacaggaugguacaccucuguuaucacaauugaacugagcaacaucaaggagaauaaaugcaacggcaccgacgccaaggugaaacuuaucaagcaggaacuggauaaguauaaaaaugcugugacggaccuccagaugcugauguguuccaccccugccgcugggucuggaagcgccauugcguccggcaucgccgucugcaaggugcugcaccucgagggggagguuaacaaaauuaagaaugcucugcuuagcacaaacaaagccguggucucucuguccaauggagugagcguucucaccuucaaggugcuggaucuuaagaacuacaucgacaaacagcugcucccgauucugaauaagcaaucuuguuccauccccaacccugaaacagucauggaguuucagcagaaaaauaaccggcugcucgaaauuacccgcgaguucagcgugaaugcuggcgugacgacacccgucucuaccuauaugcugacaaacuccgagcuucugagccucaucaacgauaugccuaucaccaaugaccagaagaaacugauguccaacaauguucaaauugugagacagcagucuuacagcaucaugugcauuaucaaggaagaggugcuugccuaugucgugcagcugccccucuacggcguuauugauaccccuuguuggaaacugcauacauccccgcugugcacgaccaacacaaaggaagggagcaauaucugucucacccggacagaccgcggaugguacugcgauaacgcgggcucuguguccuuuuucccccaagccgagaccuguaaggucugcagcaauagaguguuuugcgacacgaugaacucucugacacuuccuagcgaaguuaaucuguguaacaucgauauuuucaaucccaaauaugacugcaagaucaugaccuccaaaaccgaugugucuagcuccgucauuacaagccucggggcuaucgugucuuguuacggaaagaccaaaugcacagccuccaacaagaauaagggcauuaucaaaacguuuagcaacgggugugacuaugucucuaauaagggaguggacaccguuuccgugggcaacacacuguacuaugucaacaaacaggagggccagagccuuuacgugaagggggagccuaucauuaauuucuaugauccccugguuuuuccguccgacgaauuugaugcuucuaucagccaagugaacgagaaaauuaaucagucccucgccuucauccggaagucugacgaacugcugcacaacgucaaugugggaaagagcaccacaaacauuaugaucaccacgauuaucaucgugauuaucguuauucuccugcuucugaucgccgucggccucuuccuguacugcaaagcucgcuccaccccugugacacugagcaaggaucagcuuucugggauuaauaacaucgcguucuccaauugaggacuaguggaagcauuuuccuggcugauuaaaagaaauuacucagcuauggucaucuguuccuguuagaaggcuaugcagcauauuauauacuaugcgcauguuaugaaaugcauaauaaaaaauuuuaaaaaaucuaaaagaucuaaaaaaaaaaaaaaaaaaaaaaaaaaaaaaaaaaaaaaaaaaaaaaaaaaaaaaaaaaaaaaaaugcaucccccccccccccccccccccccccccccccaaaggcucuuuucagagccaccagaauu

SEQ ID NO: 17893 - RNA, 1952 nt, Artificial Sequence
  mRNA product Design g-1 comprising derived and/or modified sequence from HRSV(Memphis-37)__AIY60640.1__F_DSCav1_mut6 (opt6)
gggagacuuucccauucuguagcagaauuugguguugccuguggucuuggucccgcggagaagcuuaccauggaacuaccaauuuuaaaaacaaacgcaauuacaacuauacucgcagcaguaacauuauguuucgccucaucccaaaacauaacagaagaauuuuaccaaucaacaugcagcgcaguaucaaaaggauaucucggagcauuacgaacagguugguacacaucuguaaucacuauagaacuaucaaacauaaaagaaaacaaaugcaauggaaccgacgcaaaaguaaaauuaauaaaacaagaacucgauaaauacaaaaaugcaguaacagaccuccaaaugcucauguguucaacaccagccgcaggaucagguuccgccauagcaucuggcauagcaguaugcaaaguacuccacuuagaaggagaaguuaacaaaauaaaaaacgcacuauuaucaacaaacaaagcaguaguaucccucucaaacggagucucaguauuaacauucaaaguauuagaccuaaaaaacuacauagacaaacaacuacuuccaauacucaacaaacaaucaugcucaauaccaaacccagaaaccguaauggaauuucaacaaaaaaacaaccgacuacuagaaaucacacgagaauuuucaguaaacgccggugucacaacuccaguaucaacuuauauguuaaccaacucagaacuauuaucauuaauaaacgauaugcccauaacuaacgaccaaaaaaaauuaaugucaaacaacguacaaauaguacgccaacaaaguuacucaauaaugugcaucauaaaagaagaaguauuagcguacguuguacaacuaccucuauacggagucauagacacaccaugcuggaaacuucacacaucaccacuauguacaacaaacacaaaagaaggcaguaacauaugccuaacaagaacagaccguggaugguauugugacaacgcuggaucuguaucauucuucccucaagcagaaaccuguaaaguuugcucaaacagagucuucugugacacaaugaacucucuaacacuaccuuccgaagugaaccucuguaacauagacauauucaauccaaaauaugauugcaaaauaaugacuucaaaaacagauguaucauccucuguuauaacaucauuaggcgccauaguuucaugcuacggaaaaacuaaaugcacagcaucaaacaaaaacaaaggaauaauaaaaaccuucucaaauggaugcgacuacguaagcaacaaaggcguagacacaguaucaguagguaauacauuauacuacguaaacaaacaagaaggacaaucacuuuauguuaaaggagaaccuauaauaaacuucuacgacccacuuguauuuccauccgaugaauuugacgcaucuauaucacaagucaacgaaaaaauaaaccaaucauuagcauucauucgaaaauccgaugaacuacuccauaacguaaaugucggaaaaucaacaaccaacauaaugaucacaacaauaaucauagugauaauaguaauacuccuacuacuaaucgcaguaggucuauuccuauauuguaaagcaagaucuacuccaguuacacucucuaaagaccaauuaagcgguaucaacaacaucgccuucagcaauuaaggacuaguggaagcauuuuccuggcugauuaaaagaaauuacucagcuauggucaucuguuccuguuagaaggcuaugcagcauauuauauacuaugcgcauguuaugaaaugcauaauaaaaaauuuuaaaaaaucuaaaagaucuaaaaaaaaaaaaaaaaaaaaaaaaaaaaaaaaaaaaaaaaaaaaaaaaaaaaaaaaaaaaaaaaugcaucccccccccccccccccccccccccccccccaaaggcucuuuucagagccaccagaauu

SEQ ID NO: 17894 - RNA, 1952 nt, Artificial Sequence
  mRNA product Design g-1 comprising derived and/or modified sequence from HRSV(Memphis-37)__AIY60640.1__F_DSCav1_mut6 (opt11)
gggagacuuucccauucuguagcagaauuugguguugccuguggucuuggucccgcggagaagcuuaccauggagcugcccauccucaagaccaacgccaucaccacgauccuggccgcggugacccugugcuucgcgagcucccaaaacaucaccgaggaguucuaccagagcacgugcuccgccgucagcaagggcuaccucggggcccugcgcaccggcugguacaccuccgugaucaccaucgagcugagcaacaucaaggaaaacaagugcaacgggacggacgcaaaggugaagcucaucaagcaggagcuggauaaguacaagaacgcggucacggaccugcagaugcucaugugcuccaccccggccgccggcagcggguccgccaucgcguccggcaucgccgugugcaagguguugcaccuggagggcgaggucaacaagaucaagaacgcccuccuuuccaccaauaaggcuguugugagccuguccaacggggucagcgugcucaccuucaaggugcuggaccugaagaacuacaucgacaagcagcuccugcccauccugaacaagcaguccugcagcauccccaaccccgagacagucauggaguuccagcagaagaacaaccggcuccuggagaucacccgcgaguucuccguuaacgccggggugaccaccccgguaagcacauacaugcugaccaacagcgagcuccugagccugaucaacgacaugcccaucaccaacgaccagaagaagcucaugagcaacaacgugcagaucgugcggcagcaguccuacagcaucaugugcaucaucaaggaggagguccuggcguacguggugcaacugccccucuacggggucaucgacacccccugcuggaagcugcacacguccccgcugugcaccaccaacaccaaggagggcagcaacaucugccucacgcgcaccgaccgggggugguacugcgacaacgcaggcuccgugagcuucuucccccaggccgagaccugcaaggugugcuccaaccgcgucuucugcgacaccaugaacagccugacgcugcccuccgaggugaaccucugcaacaucgacaucuucaaccccaaguacgacuguaagaucaugaccagcaagaccgaugucuccagcuccgugaucaccagccugggcgccauaguguccuguuaugggaagacgaagugcaccgccagcaacaagaacaaaggcaucaucaagaccuucuccaacgggugcgacuacgucagcaacaagggcguggacacaguguccgucggcaacacgcuguacuacgugaacaagcaggaggggcagagccucuacgugaagggcgagccgaucaucaacuucuacgauccccuggucuuccccagcgacgaguucgacgcguccaucagccaagugaacgagaagaucaaccagucccuggccuucauccgcaagagcgacgagcuccugcacaacgugaacgucgggaaguccaccaccaacaucaugaucaccaccaucaucaucgugaucaucgucauccugcuccugcugaucgccgucggccucuuccuguacugcaaggcccggagcacgcccgugacccuguccaaggaccagcugucgggcaucaacaacaucgccuucuccaacugaggacuaguggaagcauuuuccuggcugauuaaaagaaauuacucagcuauggucaucuguuccuguuagaaggcuaugcagcauauuauauacuaugcgcauguuaugaaaugcauaauaaaaaauuuuaaaaaaucuaaaagaucuaaaaaaaaaaaaaaaaaaaaaaaaaaaaaaaaaaaaaaaaaaaaaaaaaaaaaaaaaaaaaaaaugcaucccccccccccccccccccccccccccccccaaaggcucuuuucagagccaccagaauu

SEQ ID NO: 17895 - RNA, 1967 nt, Artificial Sequence
  mRNA product Design g-2 comprising derived and/or modified sequence from HRSV(Memphis-37)__AIY60640.1__F_DSCav1_mut6 (opt1)
gggagaguccgcucagccagguugcagaagcggcuuagcguguguccuaaucuucucucugcguguagguaggccugugccgcaaacaagcuuaccauggagcugcccauccucaagaccaacgccaucaccacgauccuggccgcggugacccugugcuucgccagcucccagaacaucaccgaggaguucuaccagagcacgugcuccgccgucagcaagggcuaccucggcgcccugcgcaccgggugguacaccagcgugaucaccaucgagcuguccaacaucaaggagaacaagugcaacggcaccgacgccaaggugaagcucaucaagcaggagcuggacaaguacaagaacgcggucacggaccugcagaugcugaugugcagcaccccggccgccggcuccgggagcgcgaucgccuccggcaucgccgucugcaaggugcugcaccucgagggcgaggugaacaagaucaagaacgcccugcuguccaccaacaaggccgucgugagccucuccaacggggugagcguccugaccuucaaggugcuggaccucaagaacuacaucgacaagcagcugcugcccauccugaacaagcagagcugcuccauccccaaccccgagaccgucauggaguuccagcagaagaacaaccgccuccuggagaucacgcgggaguucagcgugaacgcgggcgugaccacccccgucuccaccuacaugcugacgaacagcgagcuccugucccugaucaacgacaugccgaucaccaacgaccagaagaagcucaugagcaacaacgugcagaucgugcgccagcaguccuacagcaucaugugcaucaucaaggaggagguccuggccuacguggugcagcugccccucuacggggucaucgacacccccugcuggaagcugcacaccagcccccugugcacgaccaacaccaaggagggcuccaacaucugccucacccggacggaccgcgggugguacugcgacaacgccggcagcguguccuucuucccgcaggccgagaccugcaaggucugcagcaaccggguguucugcgacaccaugaacucccugacccugcccagcgaggugaaccucugcaacaucgacaucuucaaccccaaguacgacugcaagaucaugacguccaagaccgacgucagcuccagcgugaucaccucccugggcgccaucgugagcugcuacgggaagaccaagugcacggcgagcaacaagaacaagggcaucaucaagaccuucuccaacgggugcgacuacgucagcaacaagggcguggacaccguguccgucggcaacacccuguacuacgugaacaagcaggagggccagagccucuacgugaagggggagcccaucaucaacuucuacgacccgcuggucuuccccuccgacgaguucgacgccagcaucucccaggugaacgagaagaucaaccagagccuggccuucauccggaaguccgacgagcuccugcacaacgugaacgucggcaagagcaccacgaacaucaugaucaccaccaucaucaucgugaucaucgugauccugcugcuccugaucgccgucgggcuguuccucuacugcaaggcccgcuccacccccgugacgcugagcaaggaccagcuguccgggaucaacaacaucgcguucagcaacugaggacuaguaauaaggaaacuguaugaaugucugugggcaggaagugaagagauccuucuguaaagguuuuuggaauuaugucugcugaauaauaaacuuuuuugaaauaauaaaucugguagaaaaaugagaucuaaaaaaaaaaaaaaaaaaaaaaaaaaaaaaaaaaaaaaaaaaaaaaaaaaaaaaaaaaaaaaaaugcaucccccccccccccccccccccccccccccccaaaggcucuuuucagagccaccagaauu

SEQ ID NO: 17896 - RNA, 1967 nt, Artificial Sequence
  mRNA product Design g-2 comprising derived and/or modified sequence from HRSV(Memphis-37)__AIY60640.1__F_DSCav1_mut6 (opt1)
gggagaguccgcucagccagguugcagaagcggcuuagcguguguccuaaucuucucucugcguguagguaggccugugccgcaaacaagcuuaccauggagcugcccauccucaagaccaacgccaucaccacgauccuggccgcggugacccugugcuucgccagcucccagaacaucaccgaggaguucuaccagagcacgugcuccgccgucagcaagggcuaccucggggcccugcgcaccggcugguacaccuccgugaucaccaucgagcugagcaacaucaaggagaacaagugcaacgggaccgacgccaaggugaagcucaucaagcaggagcuggacaaguacaagaacgcggucacggaccugcagaugcucaugugcuccaccccggccgccggcagcggguccgccaucgcgagcggcaucgccgugugcaaggugcugcaccuggagggcgaggucaacaagaucaagaacgcccuccuguccaccaacaaggccguggugagccuguccaacggggucagcgugcucaccuucaaggugcuggaccugaagaacuacaucgacaagcagcuccugcccauccugaacaagcaguccugcagcauccccaaccccgagacggucauggaguuccagcagaagaacaaccggcuccuggagaucacccgcgaguucuccgugaacgccggcgugaccaccccggucagcacguacaugcugaccaacuccgagcuccugagccugaucaacgacaugcccaucaccaacgaccagaagaagcucaugagcaacaacgugcagaucgugcggcagcaguccuacagcaucaugugcaucaucaaggaggagguccuggcguacguggugcagcugccccucuacggggucaucgacacccccugcuggaagcugcacacguccccgcugugcaccaccaacaccaaggagggcagcaacaucugccucacgcgcaccgaccgggggugguacugcgacaacgccggcuccgugagcuucuucccccaggccgagaccugcaaggugugcuccaaccgcgucuucugcgacaccaugaacagccugacgcugcccuccgaggugaaccucugcaacaucgacaucuucaaccccaaguacgacugcaagaucaugaccagcaagaccgacgucuccagcuccgugaucaccagccugggcgccaucguguccugcuacgggaagacgaagugcaccgccagcaacaagaacaagggcaucaucaagaccuucuccaacgggugcgacuacgucagcaacaagggcguggacaccguguccgucggcaacacgcuguacuacgugaacaagcaggaggggcagagccucuacgugaagggcgagccgaucaucaacuucuacgacccccuggucuuccccagcgacgaguucgacgcguccaucagccaggugaacgagaagaucaaccagucccuggccuucauccgcaagagcgacgagcuccugcacaacgugaacgucgggaaguccaccaccaacaucaugaucaccaccaucaucaucgugaucaucgugauccugcuccugcugaucgccgucggccucuuccuguacugcaaggcccggagcacgcccgugacccuguccaaggaccagcugagcgggaucaacaacaucgccuucuccaacugaggacuaguaauaaggaaacuguaugaaugucugugggcaggaagugaagagauccuucuguaaagguuuuuggaauuaugucugcugaauaauaaacuuuuuugaaauaauaaaucugguagaaaaaugagaucuaaaaaaaaaaaaaaaaaaaaaaaaaaaaaaaaaaaaaaaaaaaaaaaaaaaaaaaaaaaaaaaaugcaucccccccccccccccccccccccccccccccaaaggcucuuuucagagccaccagaauu

SEQ ID NO: 17897 - RNA, 1967 nt, Artificial Sequence
  mRNA product Design g-2 comprising derived and/or modified sequence from HRSV(Memphis-37)__AIY60640.1__F_DSCav1_mut6 (opt2)
gggagaguccgcucagccagguugcagaagcggcuuagcguguguccuaaucuucucucugcguguagguaggccugugccgcaaacaagcuuaccauggagcuccccauccucaagaccaacgccaucaccaccauccucgccgccgucacccucugcuucgccuccucccagaacaucaccgaggaguucuaccaguccaccugcuccgccgucuccaagggcuaccucggcgcccuccgcaccggcugguacaccuccgucaucaccaucgagcucuccaacaucaaggagaacaagugcaacggcaccgacgccaaggucaagcucaucaagcaggagcucgacaaguacaagaacgccgucaccgaccuccagaugcucaugugcuccacccccgccgccggcuccggcuccgccaucgccuccggcaucgccgucugcaagguccuccaccucgagggcgaggucaacaagaucaagaacgcccuccucuccaccaacaaggccgucgucucccucuccaacggcgucuccguccucaccuucaagguccucgaccucaagaacuacaucgacaagcagcuccuccccauccucaacaagcaguccugcuccauccccaaccccgagaccgucauggaguuccagcagaagaacaaccgccuccucgagaucacccgcgaguucuccgucaacgccggcgucaccacccccgucuccaccuacaugcucaccaacuccgagcuccucucccucaucaacgacaugcccaucaccaacgaccagaagaagcucauguccaacaacguccagaucguccgccagcaguccuacuccaucaugugcaucaucaaggaggagguccucgccuacgucguccagcucccccucuacggcgucaucgacacccccugcuggaagcuccacaccuccccccucugcaccaccaacaccaaggagggcuccaacaucugccucacccgcaccgaccgcggcugguacugcgacaacgccggcuccgucuccuucuucccccaggccgagaccugcaaggucugcuccaaccgcgucuucugcgacaccaugaacucccucacccuccccuccgaggucaaccucugcaacaucgacaucuucaaccccaaguacgacugcaagaucaugaccuccaagaccgacgucuccuccuccgucaucaccucccucggcgccaucgucuccugcuacggcaagaccaagugcaccgccuccaacaagaacaagggcaucaucaagaccuucuccaacggcugcgacuacgucuccaacaagggcgucgacaccgucuccgucggcaacacccucuacuacgucaacaagcaggagggccagucccucuacgucaagggcgagcccaucaucaacuucuacgacccccucgucuuccccuccgacgaguucgacgccuccaucucccaggucaacgagaagaucaaccagucccucgccuucauccgcaaguccgacgagcuccuccacaacgucaacgucggcaaguccaccaccaacaucaugaucaccaccaucaucaucgucaucaucgucauccuccuccuccucaucgccgucggccucuuccucuacugcaaggcccgcuccacccccgucacccucuccaaggaccagcucuccggcaucaacaacaucgccuucuccaacugaggacuaguaauaaggaaacuguaugaaugucugugggcaggaagugaagagauccuucuguaaagguuuuuggaauuaugucugcugaauaauaaacuuuuuugaaauaauaaaucugguagaaaaaugagaucuaaaaaaaaaaaaaaaaaaaaaaaaaaaaaaaaaaaaaaaaaaaaaaaaaaaaaaaaaaaaaaaaugcaucccccccccccccccccccccccccccccccaaaggcucuuuucagagccaccagaauu

SEQ ID NO: 17898 - RNA, 1967 nt, Artificial Sequence
  mRNA product Design g-2 comprising derived and/or modified sequence from HRSV(Memphis-37)__AIY60640.1__F_DSCav1_mut6 (opt3)
gggagaguccgcucagccagguugcagaagcggcuuagcguguguccuaaucuucucucugcguguagguaggccugugccgcaaacaagcuuaccauggagcugcccauccucaagaccaacgccauuacaacuauacuugcugcagugacgcugugcuucgccagcucccagaauaucaccgaagaguuuuaccaaucuacauguucagcggucaguaaaggcuauuugggggcuuuaagaacuggaugguacaccagcguuauuacaaucgaacuguccaacauuaaggagaauaaaugcaacgguaccgacgccaaggugaaacuaaucaagcaggaacucgauaaguauaaaaaugcaguaacugaccugcagaugcuuauguguucuacuccugccgcuggcucggggucagcaauagccagcggaaucgcugugugcaagguccugcacuuggagggcgaggugaacaaaauuaagaaugcccuccugaguaccaacaaagcgguugugucccugucuaauggugucagcgugcucacguucaagguauuagaucugaagaacuacaucgacaaacagcuuuugccaauucugaauaagcaauccuguucaaucccgaaccccgaaacuguuauggaguuucagcagaaaaauaacaggcuacucgaaauaacccgggaguucagugugaaugcaggggucacaacuccugugagcaccuauaugcugacaaacucugagcuucuguccuugauuaacgauaugccaaucaccaaugaccagaagaaacucaugucaaacaaugugcaaauuguccgccagcagagcuacaguaucaugugcaucauuaaggaagagguucuggccuaugugguacaguuaccccuguacggagugauagauacgccuuguuggaaacuccauacuucuccacuuugcacaaccaacacuaaggaaggcuccaauaucugucugacacgaaccgaccguggcugguacugcgauaacgcugggagcgucucguuuuucccccaagccgagacguguaaggugugcucuaauagaguuuucugcgacaccaugaacuccuugacacuaccuucagaagugaaucuguguaacauugauaucuucaauccaaaauaugacugcaagauaaugacaaguaaaaccgaugucagcuccucugugauuacaagccucggagcaaucguaucauguuacgguaagacuaaaugcaccgcuaguaacaagaauaagggcaucauuaaaacauuuuccaacgggugugacuauguuagcaauaagggaguggacaccgucucugugggcaacacucuguacuaugucaacaaacaggagggucagucacuuuacgugaagggggagccgaucauuaauuucuaugauccccugguuuuuccuagugacgaauuugaugccagcauaucccaagugaacgagaaaaucaaucagucuuuggcguuuauuaggaagucggacgaacuccugcacaacguaaaugucggaaagagcacgacaaacaucaugaucaccacuauuauaaucgugauuaucguuauuuuacugcuacucaucgccgugggccuguuccuuuacugcaaagcacgguccaccccagucacauugucaaaggaucagcugaguggcauaaauaacaucgcuuucucuaauugaggacuaguaauaaggaaacuguaugaaugucugugggcaggaagugaagagauccuucuguaaagguuuuuggaauuaugucugcugaauaauaaacuuuuuugaaauaauaaaucugguagaaaaaugagaucuaaaaaaaaaaaaaaaaaaaaaaaaaaaaaaaaaaaaaaaaaaaaaaaaaaaaaaaaaaaaaaaaugcaucccccccccccccccccccccccccccccccaaaggcucuuuucagagccaccagaauu

SEQ ID NO: 17899 - RNA, 1967 nt, Artificial Sequence
  mRNA product Design g-2 comprising derived and/or modified sequence from HRSV(Memphis-37)__AIY60640.1__F_DSCav1_mut6 (opt4)
gggagaguccgcucagccagguugcagaagcggcuuagcguguguccuaaucuucucucugcguguagguaggccugugccgcaaacaagcuuaccauggagcugcccauccugaagaccaacgccaucaccaccauccuggccgccgugacccugugcuucgccagcagccagaacaucaccgaggaguucuaccagagcaccugcagcgccgugagcaagggcuaccugggcgcccugagaaccggcugguacaccagcgugaucaccaucgagcugagcaacaucaaggagaacaagugcaacggcaccgacgccaaggugaagcugaucaagcaggagcuggacaaguacaagaacgccgugaccgaccugcagaugcugaugugcagcacccccgccgccggcagcggcagcgccaucgccagcggcaucgccgugugcaaggugcugcaccuggagggcgaggugaacaagaucaagaacgcccugcugagcaccaacaaggccguggugagccugagcaacggcgugagcgugcugaccuucaaggugcuggaccugaagaacuacaucgacaagcagcugcugcccauccugaacaagcagagcugcagcauccccaaccccgagaccgugauggaguuccagcagaagaacaacagacugcuggagaucaccagagaguucagcgugaacgccggcgugaccacccccgugagcaccuacaugcugaccaacagcgagcugcugagccugaucaacgacaugcccaucaccaacgaccagaagaagcugaugagcaacaacgugcagaucgugagacagcagagcuacagcaucaugugcaucaucaaggaggaggugcuggccuacguggugcagcugccccuguacggcgugaucgacacccccugcuggaagcugcacaccagcccccugugcaccaccaacaccaaggagggcagcaacaucugccugaccagaaccgacagaggcugguacugcgacaacgccggcagcgugagcuucuucccccaggccgagaccugcaaggugugcagcaacagaguguucugcgacaccaugaacagccugacccugcccagcgaggugaaccugugcaacaucgacaucuucaaccccaaguacgacugcaagaucaugaccagcaagaccgacgugagcagcagcgugaucaccagccugggcgccaucgugagcugcuacggcaagaccaagugcaccgccagcaacaagaacaagggcaucaucaagaccuucagcaacggcugcgacuacgugagcaacaagggcguggacaccgugagcgugggcaacacccuguacuacgugaacaagcaggagggccagagccuguacgugaagggcgagcccaucaucaacuucuacgacccccugguguuccccagcgacgaguucgacgccagcaucagccaggugaacgagaagaucaaccagagccuggccuucaucagaaagagcgacgagcugcugcacaacgugaacgugggcaagagcaccaccaacaucaugaucaccaccaucaucaucgugaucaucgugauccugcugcugcugaucgccgugggccuguuccuguacugcaaggccagaagcacccccgugacccugagcaaggaccagcugagcggcaucaacaacaucgccuucagcaacugaggacuaguaauaaggaaacuguaugaaugucugugggcaggaagugaagagauccuucuguaaagguuuuuggaauuaugucugcugaauaauaaacuuuuuugaaauaauaaaucugguagaaaaaugagaucuaaaaaaaaaaaaaaaaaaaaaaaaaaaaaaaaaaaaaaaaaaaaaaaaaaaaaaaaaaaaaaaaugcaucccccccccccccccccccccccccccccccaaaggcucuuuucagagccaccagaauu

SEQ ID NO: 17900 - RNA, 1967 nt, Artificial Sequence
  mRNA product Design g-2 comprising derived and/or modified sequence from HRSV(Memphis-37)__AIY60640.1__F_DSCav1_mut6 (opt5)
gggagaguccgcucagccagguugcagaagcggcuuagcguguguccuaaucuucucucugcguguagguaggccugugccgcaaacaagcuuaccauggagcugcccauccucaagaccaacgccauuacaacgauccuggcugccgugacccuuugcuucgcgagcucccagaauauuacagaagaguuuuaccaaucuaccuguagcgcugucuccaaaggcuaucugggggcccucagaacaggaugguacaccucuguuaucacaauugaacugagcaacaucaaggagaauaaaugcaacggcaccgacgccaaggugaaacuuaucaagcaggaacuggauaaguauaaaaaugcugugacggaccuccagaugcugauguguuccaccccugccgcugggucuggaagcgccauugcguccggcaucgccgucugcaaggugcugcaccucgagggggagguuaacaaaauuaagaaugcucugcuuagcacaaacaaagccguggucucucuguccaauggagugagcguucucaccuucaaggugcuggaucuuaagaacuacaucgacaaacagcugcucccgauucugaauaagcaaucuuguuccauccccaacccugaaacagucauggaguuucagcagaaaaauaaccggcugcucgaaauuacccgcgaguucagcgugaaugcuggcgugacgacacccgucucuaccuauaugcugacaaacuccgagcuucugagccucaucaacgauaugccuaucaccaaugaccagaagaaacugauguccaacaauguucaaauugugagacagcagucuuacagcaucaugugcauuaucaaggaagaggugcuugccuaugucgugcagcugccccucuacggcguuauugauaccccuuguuggaaacugcauacauccccgcugugcacgaccaacacaaaggaagggagcaauaucugucucacccggacagaccgcggaugguacugcgauaacgcgggcucuguguccuuuuucccccaagccgagaccuguaaggucugcagcaauagaguguuuugcgacacgaugaacucucugacacuuccuagcgaaguuaaucuguguaacaucgauauuuucaaucccaaauaugacugcaagaucaugaccuccaaaaccgaugugucuagcuccgucauuacaagccucggggcuaucgugucuuguuacggaaagaccaaaugcacagccuccaacaagaauaagggcauuaucaaaacguuuagcaacgggugugacuaugucucuaauaagggaguggacaccguuuccgugggcaacacacuguacuaugucaacaaacaggagggccagagccuuuacgugaagggggagccuaucauuaauuucuaugauccccugguuuuuccguccgacgaauuugaugcuucuaucagccaagugaacgagaaaauuaaucagucccucgccuucauccggaagucugacgaacugcugcacaacgucaaugugggaaagagcaccacaaacauuaugaucaccacgauuaucaucgugauuaucguuauucuccugcuucugaucgccgucggccucuuccuguacugcaaagcucgcuccaccccugugacacugagcaaggaucagcuuucugggauuaauaacaucgcguucuccaauugaggacuaguaauaaggaaacuguaugaaugucugugggcaggaagugaagagauccuucuguaaagguuuuuggaauuaugucugcugaauaauaaacuuuuuugaaauaauaaaucugguagaaaaaugagaucuaaaaaaaaaaaaaaaaaaaaaaaaaaaaaaaaaaaaaaaaaaaaaaaaaaaaaaaaaaaaaaaaugcaucccccccccccccccccccccccccccccccaaaggcucuuuucagagccaccagaauu

SEQ ID NO: 17901 - RNA, 1967 nt, Artificial Sequence
  mRNA product Design g-2 comprising derived and/or modified sequence from HRSV(Memphis-37)__AIY60640.1__F_DSCav1_mut6 (opt6)
gggagaguccgcucagccagguugcagaagcggcuuagcguguguccuaaucuucucucugcguguagguaggccugugccgcaaacaagcuuaccauggaacuaccaauuuuaaaaacaaacgcaauuacaacuauacucgcagcaguaacauuauguuucgccucaucccaaaacauaacagaagaauuuuaccaaucaacaugcagcgcaguaucaaaaggauaucucggagcauuacgaacagguugguacacaucuguaaucacuauagaacuaucaaacauaaaagaaaacaaaugcaauggaaccgacgcaaaaguaaaauuaauaaaacaagaacucgauaaauacaaaaaugcaguaacagaccuccaaaugcucauguguucaacaccagccgcaggaucagguuccgccauagcaucuggcauagcaguaugcaaaguacuccacuuagaaggagaaguuaacaaaauaaaaaacgcacuauuaucaacaaacaaagcaguaguaucccucucaaacggagucucaguauuaacauucaaaguauuagaccuaaaaaacuacauagacaaacaacuacuuccaauacucaacaaacaaucaugcucaauaccaaacccagaaaccguaauggaauuucaacaaaaaaacaaccgacuacuagaaaucacacgagaauuuucaguaaacgccggugucacaacuccaguaucaacuuauauguuaaccaacucagaacuauuaucauuaauaaacgauaugcccauaacuaacgaccaaaaaaaauuaaugucaaacaacguacaaauaguacgccaacaaaguuacucaauaaugugcaucauaaaagaagaaguauuagcguacguuguacaacuaccucuauacggagucauagacacaccaugcuggaaacuucacacaucaccacuauguacaacaaacacaaaagaaggcaguaacauaugccuaacaagaacagaccguggaugguauugugacaacgcuggaucuguaucauucuucccucaagcagaaaccuguaaaguuugcucaaacagagucuucugugacacaaugaacucucuaacacuaccuuccgaagugaaccucuguaacauagacauauucaauccaaaauaugauugcaaaauaaugacuucaaaaacagauguaucauccucuguuauaacaucauuaggcgccauaguuucaugcuacggaaaaacuaaaugcacagcaucaaacaaaaacaaaggaauaauaaaaaccuucucaaauggaugcgacuacguaagcaacaaaggcguagacacaguaucaguagguaauacauuauacuacguaaacaaacaagaaggacaaucacuuuauguuaaaggagaaccuauaauaaacuucuacgacccacuuguauuuccauccgaugaauuugacgcaucuauaucacaagucaacgaaaaaauaaaccaaucauuagcauucauucgaaaauccgaugaacuacuccauaacguaaaugucggaaaaucaacaaccaacauaaugaucacaacaauaaucauagugauaauaguaauacuccuacuacuaaucgcaguaggucuauuccuauauuguaaagcaagaucuacuccaguuacacucucuaaagaccaauuaagcgguaucaacaacaucgccuucagcaauuaaggacuaguaauaaggaaacuguaugaaugucugugggcaggaagugaagagauccuucuguaaagguuuuuggaauuaugucugcugaauaauaaacuuuuuugaaauaauaaaucugguagaaaaaugagaucuaaaaaaaaaaaaaaaaaaaaaaaaaaaaaaaaaaaaaaaaaaaaaaaaaaaaaaaaaaaaaaaaugcaucccccccccccccccccccccccccccccccaaaggcucuuuucagagccaccagaauu

SEQ ID NO: 17902 - RNA, 1967 nt, Artificial Sequence
  mRNA product Design g-2 comprising derived and/or modified sequence from HRSV(Memphis-37)__AIY60640.1__F_DSCav1_mut6 (opt11)
gggagaguccgcucagccagguugcagaagcggcuuagcguguguccuaaucuucucucugcguguagguaggccugugccgcaaacaagcuuaccauggagcugcccauccucaagaccaacgccaucaccacgauccuggccgcggugacccugugcuucgcgagcucccaaaacaucaccgaggaguucuaccagagcacgugcuccgccgucagcaagggcuaccucggggcccugcgcaccggcugguacaccuccgugaucaccaucgagcugagcaacaucaaggaaaacaagugcaacgggacggacgcaaaggugaagcucaucaagcaggagcuggauaaguacaagaacgcggucacggaccugcagaugcucaugugcuccaccccggccgccggcagcggguccgccaucgcguccggcaucgccgugugcaagguguugcaccuggagggcgaggucaacaagaucaagaacgcccuccuuuccaccaauaaggcuguugugagccuguccaacggggucagcgugcucaccuucaaggugcuggaccugaagaacuacaucgacaagcagcuccugcccauccugaacaagcaguccugcagcauccccaaccccgagacagucauggaguuccagcagaagaacaaccggcuccuggagaucacccgcgaguucuccguuaacgccggggugaccaccccgguaagcacauacaugcugaccaacagcgagcuccugagccugaucaacgacaugcccaucaccaacgaccagaagaagcucaugagcaacaacgugcagaucgugcggcagcaguccuacagcaucaugugcaucaucaaggaggagguccuggcguacguggugcaacugccccucuacggggucaucgacacccccugcuggaagcugcacacguccccgcugugcaccaccaacaccaaggagggcagcaacaucugccucacgcgcaccgaccgggggugguacugcgacaacgcaggcuccgugagcuucuucccccaggccgagaccugcaaggugugcuccaaccgcgucuucugcgacaccaugaacagccugacgcugcccuccgaggugaaccucugcaacaucgacaucuucaaccccaaguacgacuguaagaucaugaccagcaagaccgaugucuccagcuccgugaucaccagccugggcgccauaguguccuguuaugggaagacgaagugcaccgccagcaacaagaacaaaggcaucaucaagaccuucuccaacgggugcgacuacgucagcaacaagggcguggacacaguguccgucggcaacacgcuguacuacgugaacaagcaggaggggcagagccucuacgugaagggcgagccgaucaucaacuucuacgauccccuggucuuccccagcgacgaguucgacgcguccaucagccaagugaacgagaagaucaaccagucccuggccuucauccgcaagagcgacgagcuccugcacaacgugaacgucgggaaguccaccaccaacaucaugaucaccaccaucaucaucgugaucaucgucauccugcuccugcugaucgccgucggccucuuccuguacugcaaggcccggagcacgcccgugacccuguccaaggaccagcugucgggcaucaacaacaucgccuucuccaacugaggacuaguaauaaggaaacuguaugaaugucugugggcaggaagugaagagauccuucuguaaagguuuuuggaauuaugucugcugaauaauaaacuuuuuugaaauaauaaaucugguagaaaaaugagaucuaaaaaaaaaaaaaaaaaaaaaaaaaaaaaaaaaaaaaaaaaaaaaaaaaaaaaaaaaaaaaaaaugcaucccccccccccccccccccccccccccccccaaaggcucuuuucagagccaccagaauu

SEQ ID NO: 17903 - RNA, 2199 nt, Artificial Sequence
  mRNA product Design g-3 comprising derived and/or modified sequence from HRSV(Memphis-37)__AIY60640.1__F_DSCav1_mut6 (opt1)
gggagaguccgcucagccagguugcagaagcggcuuagcguguguccuaaucuucucucugcguguagguaggccugugccgcaaacaagcuuaccauggagcugcccauccucaagaccaacgccaucaccacgauccuggccgcggugacccugugcuucgccagcucccagaacaucaccgaggaguucuaccagagcacgugcuccgccgucagcaagggcuaccucggcgcccugcgcaccgggugguacaccagcgugaucaccaucgagcuguccaacaucaaggagaacaagugcaacggcaccgacgccaaggugaagcucaucaagcaggagcuggacaaguacaagaacgcggucacggaccugcagaugcugaugugcagcaccccggccgccggcuccgggagcgcgaucgccuccggcaucgccgucugcaaggugcugcaccucgagggcgaggugaacaagaucaagaacgcccugcuguccaccaacaaggccgucgugagccucuccaacggggugagcguccugaccuucaaggugcuggaccucaagaacuacaucgacaagcagcugcugcccauccugaacaagcagagcugcuccauccccaaccccgagaccgucauggaguuccagcagaagaacaaccgccuccuggagaucacgcgggaguucagcgugaacgcgggcgugaccacccccgucuccaccuacaugcugacgaacagcgagcuccugucccugaucaacgacaugccgaucaccaacgaccagaagaagcucaugagcaacaacgugcagaucgugcgccagcaguccuacagcaucaugugcaucaucaaggaggagguccuggccuacguggugcagcugccccucuacggggucaucgacacccccugcuggaagcugcacaccagcccccugugcacgaccaacaccaaggagggcuccaacaucugccucacccggacggaccgcgggugguacugcgacaacgccggcagcguguccuucuucccgcaggccgagaccugcaaggucugcagcaaccggguguucugcgacaccaugaacucccugacccugcccagcgaggugaaccucugcaacaucgacaucuucaaccccaaguacgacugcaagaucaugacguccaagaccgacgucagcuccagcgugaucaccucccugggcgccaucgugagcugcuacgggaagaccaagugcacggcgagcaacaagaacaagggcaucaucaagaccuucuccaacgggugcgacuacgucagcaacaagggcguggacaccguguccgucggcaacacccuguacuacgugaacaagcaggagggccagagccucuacgugaagggggagcccaucaucaacuucuacgacccgcuggucuuccccuccgacgaguucgacgccagcaucucccaggugaacgagaagaucaaccagagccuggccuucauccggaaguccgacgagcuccugcacaacgugaacgucggcaagagcaccacgaacaucaugaucaccaccaucaucaucgugaucaucgugauccugcugcuccugaucgccgucgggcuguuccucuacugcaaggcccgcuccacccccgugacgcugagcaaggaccagcuguccgggaucaacaacaucgcguucagcaacugaggacuagugaagggaacacccaaauuuaauucagccuuaagcacaauuaauuaagagugaaacguaauuguacaagcaguuggucacccaccauagggcaugaucaacaccgcaaccuuuccuuuuucccccagugauucugaaaaaccccucuucccuucagcuugcuuagauguuccaaauuuaguaagcuuaaggcggccuacagaagaaaaagaaaaaaaaggccacaaaaguucccucucacuuucaguaaauaaaauaaaagcagcaacagaaauaaagaaauaaaugaaauucaaaaugaaauaaauauuguguugugcagcauuaaaaaaucaauaaaaauuaaaaaugagcaagaucuaaaaaaaaaaaaaaaaaaaaaaaaaaaaaaaaaaaaaaaaaaaaaaaaaaaaaaaaaaaaaaaaugcaucccccccccccccccccccccccccccccccaaaggcucuuuucagagccaccagaauu

SEQ ID NO: 17904 - RNA, 2199 nt, Artificial Sequence
  mRNA product Design g-3 comprising derived and/or modified sequence from HRSV(Memphis-37)__AIY60640.1__F_DSCav1_mut6 (opt1)
gggagaguccgcucagccagguugcagaagcggcuuagcguguguccuaaucuucucucugcguguagguaggccugugccgcaaacaagcuuaccauggagcugcccauccucaagaccaacgccaucaccacgauccuggccgcggugacccugugcuucgccagcucccagaacaucaccgaggaguucuaccagagcacgugcuccgccgucagcaagggcuaccucggggcccugcgcaccggcugguacaccuccgugaucaccaucgagcugagcaacaucaaggagaacaagugcaacgggaccgacgccaaggugaagcucaucaagcaggagcuggacaaguacaagaacgcggucacggaccugcagaugcucaugugcuccaccccggccgccggcagcggguccgccaucgcgagcggcaucgccgugugcaaggugcugcaccuggagggcgaggucaacaagaucaagaacgcccuccuguccaccaacaaggccguggugagccuguccaacggggucagcgugcucaccuucaaggugcuggaccugaagaacuacaucgacaagcagcuccugcccauccugaacaagcaguccugcagcauccccaaccccgagacggucauggaguuccagcagaagaacaaccggcuccuggagaucacccgcgaguucuccgugaacgccggcgugaccaccccggucagcacguacaugcugaccaacuccgagcuccugagccugaucaacgacaugcccaucaccaacgaccagaagaagcucaugagcaacaacgugcagaucgugcggcagcaguccuacagcaucaugugcaucaucaaggaggagguccuggcguacguggugcagcugccccucuacggggucaucgacacccccugcuggaagcugcacacguccccgcugugcaccaccaacaccaaggagggcagcaacaucugccucacgcgcaccgaccgggggugguacugcgacaacgccggcuccgugagcuucuucccccaggccgagaccugcaaggugugcuccaaccgcgucuucugcgacaccaugaacagccugacgcugcccuccgaggugaaccucugcaacaucgacaucuucaaccccaaguacgacugcaagaucaugaccagcaagaccgacgucuccagcuccgugaucaccagccugggcgccaucguguccugcuacgggaagacgaagugcaccgccagcaacaagaacaagggcaucaucaagaccuucuccaacgggugcgacuacgucagcaacaagggcguggacaccguguccgucggcaacacgcuguacuacgugaacaagcaggaggggcagagccucuacgugaagggcgagccgaucaucaacuucuacgacccccuggucuuccccagcgacgaguucgacgcguccaucagccaggugaacgagaagaucaaccagucccuggccuucauccgcaagagcgacgagcuccugcacaacgugaacgucgggaaguccaccaccaacaucaugaucaccaccaucaucaucgugaucaucgugauccugcuccugcugaucgccgucggccucuuccuguacugcaaggcccggagcacgcccgugacccuguccaaggaccagcugagcgggaucaacaacaucgccuucuccaacugaggacuagugaagggaacacccaaauuuaauucagccuuaagcacaauuaauuaagagugaaacguaauuguacaagcaguuggucacccaccauagggcaugaucaacaccgcaaccuuuccuuuuucccccagugauucugaaaaaccccucuucccuucagcuugcuuagauguuccaaauuuaguaagcuuaaggcggccuacagaagaaaaagaaaaaaaaggccacaaaaguucccucucacuuucaguaaauaaaauaaaagcagcaacagaaauaaagaaauaaaugaaauucaaaaugaaauaaauauuguguugugcagcauuaaaaaaucaauaaaaauuaaaaaugagcaagaucuaaaaaaaaaaaaaaaaaaaaaaaaaaaaaaaaaaaaaaaaaaaaaaaaaaaaaaaaaaaaaaaaugcaucccccccccccccccccccccccccccccccaaaggcucuuuucagagccaccagaauu

SEQ ID NO: 17905 - RNA, 2199 nt, Artificial Sequence
  mRNA product Design g-3 comprising derived and/or modified sequence from HRSV(Memphis-37)__AIY60640.1__F_DSCav1_mut6 (opt2)
gggagaguccgcucagccagguugcagaagcggcuuagcguguguccuaaucuucucucugcguguagguaggccugugccgcaaacaagcuuaccauggagcuccccauccucaagaccaacgccaucaccaccauccucgccgccgucacccucugcuucgccuccucccagaacaucaccgaggaguucuaccaguccaccugcuccgccgucuccaagggcuaccucggcgcccuccgcaccggcugguacaccuccgucaucaccaucgagcucuccaacaucaaggagaacaagugcaacggcaccgacgccaaggucaagcucaucaagcaggagcucgacaaguacaagaacgccgucaccgaccuccagaugcucaugugcuccacccccgccgccggcuccggcuccgccaucgccuccggcaucgccgucugcaagguccuccaccucgagggcgaggucaacaagaucaagaacgcccuccucuccaccaacaaggccgucgucucccucuccaacggcgucuccguccucaccuucaagguccucgaccucaagaacuacaucgacaagcagcuccuccccauccucaacaagcaguccugcuccauccccaaccccgagaccgucauggaguuccagcagaagaacaaccgccuccucgagaucacccgcgaguucuccgucaacgccggcgucaccacccccgucuccaccuacaugcucaccaacuccgagcuccucucccucaucaacgacaugcccaucaccaacgaccagaagaagcucauguccaacaacguccagaucguccgccagcaguccuacuccaucaugugcaucaucaaggaggagguccucgccuacgucguccagcucccccucuacggcgucaucgacacccccugcuggaagcuccacaccuccccccucugcaccaccaacaccaaggagggcuccaacaucugccucacccgcaccgaccgcggcugguacugcgacaacgccggcuccgucuccuucuucccccaggccgagaccugcaaggucugcuccaaccgcgucuucugcgacaccaugaacucccucacccuccccuccgaggucaaccucugcaacaucgacaucuucaaccccaaguacgacugcaagaucaugaccuccaagaccgacgucuccuccuccgucaucaccucccucggcgccaucgucuccugcuacggcaagaccaagugcaccgccuccaacaagaacaagggcaucaucaagaccuucuccaacggcugcgacuacgucuccaacaagggcgucgacaccgucuccgucggcaacacccucuacuacgucaacaagcaggagggccagucccucuacgucaagggcgagcccaucaucaacuucuacgacccccucgucuuccccuccgacgaguucgacgccuccaucucccaggucaacgagaagaucaaccagucccucgccuucauccgcaaguccgacgagcuccuccacaacgucaacgucggcaaguccaccaccaacaucaugaucaccaccaucaucaucgucaucaucgucauccuccuccuccucaucgccgucggccucuuccucuacugcaaggcccgcuccacccccgucacccucuccaaggaccagcucuccggcaucaacaacaucgccuucuccaacugaggacuagugaagggaacacccaaauuuaauucagccuuaagcacaauuaauuaagagugaaacguaauuguacaagcaguuggucacccaccauagggcaugaucaacaccgcaaccuuuccuuuuucccccagugauucugaaaaaccccucuucccuucagcuugcuuagauguuccaaauuuaguaagcuuaaggcggccuacagaagaaaaagaaaaaaaaggccacaaaaguucccucucacuuucaguaaauaaaauaaaagcagcaacagaaauaaagaaauaaaugaaauucaaaaugaaauaaauauuguguugugcagcauuaaaaaaucaauaaaaauuaaaaaugagcaagaucuaaaaaaaaaaaaaaaaaaaaaaaaaaaaaaaaaaaaaaaaaaaaaaaaaaaaaaaaaaaaaaaaugcaucccccccccccccccccccccccccccccccaaaggcucuuuucagagccaccagaauu

SEQ ID NO: 17906 - RNA, 2199 nt, Artificial Sequence
  mRNA product Design g-3 comprising derived and/or modified sequence from HRSV(Memphis-37)__AIY60640.1__F_DSCav1_mut6 (opt3)
gggagaguccgcucagccagguugcagaagcggcuuagcguguguccuaaucuucucucugcguguagguaggccugugccgcaaacaagcuuaccauggagcugcccauccucaagaccaacgccauuacaacuauacuugcugcagugacgcugugcuucgccagcucccagaauaucaccgaagaguuuuaccaaucuacauguucagcggucaguaaaggcuauuugggggcuuuaagaacuggaugguacaccagcguuauuacaaucgaacuguccaacauuaaggagaauaaaugcaacgguaccgacgccaaggugaaacuaaucaagcaggaacucgauaaguauaaaaaugcaguaacugaccugcagaugcuuauguguucuacuccugccgcuggcucggggucagcaauagccagcggaaucgcugugugcaagguccugcacuuggagggcgaggugaacaaaauuaagaaugcccuccugaguaccaacaaagcgguugugucccugucuaauggugucagcgugcucacguucaagguauuagaucugaagaacuacaucgacaaacagcuuuugccaauucugaauaagcaauccuguucaaucccgaaccccgaaacuguuauggaguuucagcagaaaaauaacaggcuacucgaaauaacccgggaguucagugugaaugcaggggucacaacuccugugagcaccuauaugcugacaaacucugagcuucuguccuugauuaacgauaugccaaucaccaaugaccagaagaaacucaugucaaacaaugugcaaauuguccgccagcagagcuacaguaucaugugcaucauuaaggaagagguucuggccuaugugguacaguuaccccuguacggagugauagauacgccuuguuggaaacuccauacuucuccacuuugcacaaccaacacuaaggaaggcuccaauaucugucugacacgaaccgaccguggcugguacugcgauaacgcugggagcgucucguuuuucccccaagccgagacguguaaggugugcucuaauagaguuuucugcgacaccaugaacuccuugacacuaccuucagaagugaaucuguguaacauugauaucuucaauccaaaauaugacugcaagauaaugacaaguaaaaccgaugucagcuccucugugauuacaagccucggagcaaucguaucauguuacgguaagacuaaaugcaccgcuaguaacaagaauaagggcaucauuaaaacauuuuccaacgggugugacuauguuagcaauaagggaguggacaccgucucugugggcaacacucuguacuaugucaacaaacaggagggucagucacuuuacgugaagggggagccgaucauuaauuucuaugauccccugguuuuuccuagugacgaauuugaugccagcauaucccaagugaacgagaaaaucaaucagucuuuggcguuuauuaggaagucggacgaacuccugcacaacguaaaugucggaaagagcacgacaaacaucaugaucaccacuauuauaaucgugauuaucguuauuuuacugcuacucaucgccgugggccuguuccuuuacugcaaagcacgguccaccccagucacauugucaaaggaucagcugaguggcauaaauaacaucgcuuucucuaauugaggacuagugaagggaacacccaaauuuaauucagccuuaagcacaauuaauuaagagugaaacguaauuguacaagcaguuggucacccaccauagggcaugaucaacaccgcaaccuuuccuuuuucccccagugauucugaaaaaccccucuucccuucagcuugcuuagauguuccaaauuuaguaagcuuaaggcggccuacagaagaaaaagaaaaaaaaggccacaaaaguucccucucacuuucaguaaauaaaauaaaagcagcaacagaaauaaagaaauaaaugaaauucaaaaugaaauaaauauuguguugugcagcauuaaaaaaucaauaaaaauuaaaaaugagcaagaucuaaaaaaaaaaaaaaaaaaaaaaaaaaaaaaaaaaaaaaaaaaaaaaaaaaaaaaaaaaaaaaaaugcaucccccccccccccccccccccccccccccccaaaggcucuuuucagagccaccagaauu

SEQ ID NO: 17907 - RNA, 2199 nt, Artificial Sequence
  mRNA product Design g-3 comprising derived and/or modified sequence from HRSV(Memphis-37)__AIY60640.1__F_DSCav1_mut6 (opt4)
gggagaguccgcucagccagguugcagaagcggcuuagcguguguccuaaucuucucucugcguguagguaggccugugccgcaaacaagcuuaccauggagcugcccauccugaagaccaacgccaucaccaccauccuggccgccgugacccugugcuucgccagcagccagaacaucaccgaggaguucuaccagagcaccugcagcgccgugagcaagggcuaccugggcgcccugagaaccggcugguacaccagcgugaucaccaucgagcugagcaacaucaaggagaacaagugcaacggcaccgacgccaaggugaagcugaucaagcaggagcuggacaaguacaagaacgccgugaccgaccugcagaugcugaugugcagcacccccgccgccggcagcggcagcgccaucgccagcggcaucgccgugugcaaggugcugcaccuggagggcgaggugaacaagaucaagaacgcccugcugagcaccaacaaggccguggugagccugagcaacggcgugagcgugcugaccuucaaggugcuggaccugaagaacuacaucgacaagcagcugcugcccauccugaacaagcagagcugcagcauccccaaccccgagaccgugauggaguuccagcagaagaacaacagacugcuggagaucaccagagaguucagcgugaacgccggcgugaccacccccgugagcaccuacaugcugaccaacagcgagcugcugagccugaucaacgacaugcccaucaccaacgaccagaagaagcugaugagcaacaacgugcagaucgugagacagcagagcuacagcaucaugugcaucaucaaggaggaggugcuggccuacguggugcagcugccccuguacggcgugaucgacacccccugcuggaagcugcacaccagcccccugugcaccaccaacaccaaggagggcagcaacaucugccugaccagaaccgacagaggcugguacugcgacaacgccggcagcgugagcuucuucccccaggccgagaccugcaaggugugcagcaacagaguguucugcgacaccaugaacagccugacccugcccagcgaggugaaccugugcaacaucgacaucuucaaccccaaguacgacugcaagaucaugaccagcaagaccgacgugagcagcagcgugaucaccagccugggcgccaucgugagcugcuacggcaagaccaagugcaccgccagcaacaagaacaagggcaucaucaagaccuucagcaacggcugcgacuacgugagcaacaagggcguggacaccgugagcgugggcaacacccuguacuacgugaacaagcaggagggccagagccuguacgugaagggcgagcccaucaucaacuucuacgacccccugguguuccccagcgacgaguucgacgccagcaucagccaggugaacgagaagaucaaccagagccuggccuucaucagaaagagcgacgagcugcugcacaacgugaacgugggcaagagcaccaccaacaucaugaucaccaccaucaucaucgugaucaucgugauccugcugcugcugaucgccgugggccuguuccuguacugcaaggccagaagcacccccgugacccugagcaaggaccagcugagcggcaucaacaacaucgccuucagcaacugaggacuagugaagggaacacccaaauuuaauucagccuuaagcacaauuaauuaagagugaaacguaauuguacaagcaguuggucacccaccauagggcaugaucaacaccgcaaccuuuccuuuuucccccagugauucugaaaaaccccucuucccuucagcuugcuuagauguuccaaauuuaguaagcuuaaggcggccuacagaagaaaaagaaaaaaaaggccacaaaaguucccucucacuuucaguaaauaaaauaaaagcagcaacagaaauaaagaaauaaaugaaauucaaaaugaaauaaauauuguguugugcagcauuaaaaaaucaauaaaaauuaaaaaugagcaagaucuaaaaaaaaaaaaaaaaaaaaaaaaaaaaaaaaaaaaaaaaaaaaaaaaaaaaaaaaaaaaaaaaugcaucccccccccccccccccccccccccccccccaaaggcucuuuucagagccaccagaauu

SEQ ID NO: 17908 - RNA, 2199 nt, Artificial Sequence
  mRNA product Design g-3 comprising derived and/or modified sequence from HRSV(Memphis-37)__AIY60640.1__F_DSCav1_mut6 (opt5)
gggagaguccgcucagccagguugcagaagcggcuuagcguguguccuaaucuucucucugcguguagguaggccugugccgcaaacaagcuuaccauggagcugcccauccucaagaccaacgccauuacaacgauccuggcugccgugacccuuugcuucgcgagcucccagaauauuacagaagaguuuuaccaaucuaccuguagcgcugucuccaaaggcuaucugggggcccucagaacaggaugguacaccucuguuaucacaauugaacugagcaacaucaaggagaauaaaugcaacggcaccgacgccaaggugaaacuuaucaagcaggaacuggauaaguauaaaaaugcugugacggaccuccagaugcugauguguuccaccccugccgcugggucuggaagcgccauugcguccggcaucgccgucugcaaggugcugcaccucgagggggagguuaacaaaauuaagaaugcucugcuuagcacaaacaaagccguggucucucuguccaauggagugagcguucucaccuucaaggugcuggaucuuaagaacuacaucgacaaacagcugcucccgauucugaauaagcaaucuuguuccauccccaacccugaaacagucauggaguuucagcagaaaaauaaccggcugcucgaaauuacccgcgaguucagcgugaaugcuggcgugacgacacccgucucuaccuauaugcugacaaacuccgagcuucugagccucaucaacgauaugccuaucaccaaugaccagaagaaacugauguccaacaauguucaaauugugagacagcagucuuacagcaucaugugcauuaucaaggaagaggugcuugccuaugucgugcagcugccccucuacggcguuauugauaccccuuguuggaaacugcauacauccccgcugugcacgaccaacacaaaggaagggagcaauaucugucucacccggacagaccgcggaugguacugcgauaacgcgggcucuguguccuuuuucccccaagccgagaccuguaaggucugcagcaauagaguguuuugcgacacgaugaacucucugacacuuccuagcgaaguuaaucuguguaacaucgauauuuucaaucccaaauaugacugcaagaucaugaccuccaaaaccgaugugucuagcuccgucauuacaagccucggggcuaucgugucuuguuacggaaagaccaaaugcacagccuccaacaagaauaagggcauuaucaaaacguuuagcaacgggugugacuaugucucuaauaagggaguggacaccguuuccgugggcaacacacuguacuaugucaacaaacaggagggccagagccuuuacgugaagggggagccuaucauuaauuucuaugauccccugguuuuuccguccgacgaauuugaugcuucuaucagccaagugaacgagaaaauuaaucagucccucgccuucauccggaagucugacgaacugcugcacaacgucaaugugggaaagagcaccacaaacauuaugaucaccacgauuaucaucgugauuaucguuauucuccugcuucugaucgccgucggccucuuccuguacugcaaagcucgcuccaccccugugacacugagcaaggaucagcuuucugggauuaauaacaucgcguucuccaauugaggacuagugaagggaacacccaaauuuaauucagccuuaagcacaauuaauuaagagugaaacguaauuguacaagcaguuggucacccaccauagggcaugaucaacaccgcaaccuuuccuuuuucccccagugauucugaaaaaccccucuucccuucagcuugcuuagauguuccaaauuuaguaagcuuaaggcggccuacagaagaaaaagaaaaaaaaggccacaaaaguucccucucacuuucaguaaauaaaauaaaagcagcaacagaaauaaagaaauaaaugaaauucaaaaugaaauaaauauuguguugugcagcauuaaaaaaucaauaaaaauuaaaaaugagcaagaucuaaaaaaaaaaaaaaaaaaaaaaaaaaaaaaaaaaaaaaaaaaaaaaaaaaaaaaaaaaaaaaaaugcaucccccccccccccccccccccccccccccccaaaggcucuuuucagagccaccagaauu

SEQ ID NO: 17909 - RNA, 2199 nt, Artificial Sequence
  mRNA product Design g-3 comprising derived and/or modified sequence from HRSV(Memphis-37)__AIY60640.1__F_DSCav1_mut6 (opt6)
gggagaguccgcucagccagguugcagaagcggcuuagcguguguccuaaucuucucucugcguguagguaggccugugccgcaaacaagcuuaccauggaacuaccaauuuuaaaaacaaacgcaauuacaacuauacucgcagcaguaacauuauguuucgccucaucccaaaacauaacagaagaauuuuaccaaucaacaugcagcgcaguaucaaaaggauaucucggagcauuacgaacagguugguacacaucuguaaucacuauagaacuaucaaacauaaaagaaaacaaaugcaauggaaccgacgcaaaaguaaaauuaauaaaacaagaacucgauaaauacaaaaaugcaguaacagaccuccaaaugcucauguguucaacaccagccgcaggaucagguuccgccauagcaucuggcauagcaguaugcaaaguacuccacuuagaaggagaaguuaacaaaauaaaaaacgcacuauuaucaacaaacaaagcaguaguaucccucucaaacggagucucaguauuaacauucaaaguauuagaccuaaaaaacuacauagacaaacaacuacuuccaauacucaacaaacaaucaugcucaauaccaaacccagaaaccguaauggaauuucaacaaaaaaacaaccgacuacuagaaaucacacgagaauuuucaguaaacgccggugucacaacuccaguaucaacuuauauguuaaccaacucagaacuauuaucauuaauaaacgauaugcccauaacuaacgaccaaaaaaaauuaaugucaaacaacguacaaauaguacgccaacaaaguuacucaauaaugugcaucauaaaagaagaaguauuagcguacguuguacaacuaccucuauacggagucauagacacaccaugcuggaaacuucacacaucaccacuauguacaacaaacacaaaagaaggcaguaacauaugccuaacaagaacagaccguggaugguauugugacaacgcuggaucuguaucauucuucccucaagcagaaaccuguaaaguuugcucaaacagagucuucugugacacaaugaacucucuaacacuaccuuccgaagugaaccucuguaacauagacauauucaauccaaaauaugauugcaaaauaaugacuucaaaaacagauguaucauccucuguuauaacaucauuaggcgccauaguuucaugcuacggaaaaacuaaaugcacagcaucaaacaaaaacaaaggaauaauaaaaaccuucucaaauggaugcgacuacguaagcaacaaaggcguagacacaguaucaguagguaauacauuauacuacguaaacaaacaagaaggacaaucacuuuauguuaaaggagaaccuauaauaaacuucuacgacccacuuguauuuccauccgaugaauuugacgcaucuauaucacaagucaacgaaaaaauaaaccaaucauuagcauucauucgaaaauccgaugaacuacuccauaacguaaaugucggaaaaucaacaaccaacauaaugaucacaacaauaaucauagugauaauaguaauacuccuacuacuaaucgcaguaggucuauuccuauauuguaaagcaagaucuacuccaguuacacucucuaaagaccaauuaagcgguaucaacaacaucgccuucagcaauuaaggacuagugaagggaacacccaaauuuaauucagccuuaagcacaauuaauuaagagugaaacguaauuguacaagcaguuggucacccaccauagggcaugaucaacaccgcaaccuuuccuuuuucccccagugauucugaaaaaccccucuucccuucagcuugcuuagauguuccaaauuuaguaagcuuaaggcggccuacagaagaaaaagaaaaaaaaggccacaaaaguucccucucacuuucaguaaauaaaauaaaagcagcaacagaaauaaagaaauaaaugaaauucaaaaugaaauaaauauuguguugugcagcauuaaaaaaucaauaaaaauuaaaaaugagcaagaucuaaaaaaaaaaaaaaaaaaaaaaaaaaaaaaaaaaaaaaaaaaaaaaaaaaaaaaaaaaaaaaaaugcaucccccccccccccccccccccccccccccccaaaggcucuuuucagagccaccagaauu

SEQ ID NO: 17910 - RNA, 2199 nt, Artificial Sequence
  mRNA product Design g-3 comprising derived and/or modified sequence from HRSV(Memphis-37)__AIY60640.1__F_DSCav1_mut6 (opt11)
gggagaguccgcucagccagguugcagaagcggcuuagcguguguccuaaucuucucucugcguguagguaggccugugccgcaaacaagcuuaccauggagcugcccauccucaagaccaacgccaucaccacgauccuggccgcggugacccugugcuucgcgagcucccaaaacaucaccgaggaguucuaccagagcacgugcuccgccgucagcaagggcuaccucggggcccugcgcaccggcugguacaccuccgugaucaccaucgagcugagcaacaucaaggaaaacaagugcaacgggacggacgcaaaggugaagcucaucaagcaggagcuggauaaguacaagaacgcggucacggaccugcagaugcucaugugcuccaccccggccgccggcagcggguccgccaucgcguccggcaucgccgugugcaagguguugcaccuggagggcgaggucaacaagaucaagaacgcccuccuuuccaccaauaaggcuguugugagccuguccaacggggucagcgugcucaccuucaaggugcuggaccugaagaacuacaucgacaagcagcuccugcccauccugaacaagcaguccugcagcauccccaaccccgagacagucauggaguuccagcagaagaacaaccggcuccuggagaucacccgcgaguucuccguuaacgccggggugaccaccccgguaagcacauacaugcugaccaacagcgagcuccugagccugaucaacgacaugcccaucaccaacgaccagaagaagcucaugagcaacaacgugcagaucgugcggcagcaguccuacagcaucaugugcaucaucaaggaggagguccuggcguacguggugcaacugccccucuacggggucaucgacacccccugcuggaagcugcacacguccccgcugugcaccaccaacaccaaggagggcagcaacaucugccucacgcgcaccgaccgggggugguacugcgacaacgcaggcuccgugagcuucuucccccaggccgagaccugcaaggugugcuccaaccgcgucuucugcgacaccaugaacagccugacgcugcccuccgaggugaaccucugcaacaucgacaucuucaaccccaaguacgacuguaagaucaugaccagcaagaccgaugucuccagcuccgugaucaccagccugggcgccauaguguccuguuaugggaagacgaagugcaccgccagcaacaagaacaaaggcaucaucaagaccuucuccaacgggugcgacuacgucagcaacaagggcguggacacaguguccgucggcaacacgcuguacuacgugaacaagcaggaggggcagagccucuacgugaagggcgagccgaucaucaacuucuacgauccccuggucuuccccagcgacgaguucgacgcguccaucagccaagugaacgagaagaucaaccagucccuggccuucauccgcaagagcgacgagcuccugcacaacgugaacgucgggaaguccaccaccaacaucaugaucaccaccaucaucaucgugaucaucgucauccugcuccugcugaucgccgucggccucuuccuguacugcaaggcccggagcacgcccgugacccuguccaaggaccagcugucgggcaucaacaacaucgccuucuccaacugaggacuagugaagggaacacccaaauuuaauucagccuuaagcacaauuaauuaagagugaaacguaauuguacaagcaguuggucacccaccauagggcaugaucaacaccgcaaccuuuccuuuuucccccagugauucugaaaaaccccucuucccuucagcuugcuuagauguuccaaauuuaguaagcuuaaggcggccuacagaagaaaaagaaaaaaaaggccacaaaaguucccucucacuuucaguaaauaaaauaaaagcagcaacagaaauaaagaaauaaaugaaauucaaaaugaaauaaauauuguguugugcagcauuaaaaaaucaauaaaaauuaaaaaugagcaagaucuaaaaaaaaaaaaaaaaaaaaaaaaaaaaaaaaaaaaaaaaaaaaaaaaaaaaaaaaaaaaaaaaugcaucccccccccccccccccccccccccccccccaaaggcucuuuucagagccaccagaauu

SEQ ID NO: 17911 - RNA, 1994 nt, Artificial Sequence
  mRNA product Design g-4 comprising derived and/or modified sequence from HRSV(Memphis-37)__AIY60640.1__F_DSCav1_mut6 (opt1)
gggagacuccugucgggcggaaguaggaggaguagaguuuaaaaacaguacucuuuuuccgguucgggacguaguugaagcaacgacaagccggauaaccgcucuugagacaggaagcuuaccauggagcugcccauccucaagaccaacgccaucaccacgauccuggccgcggugacccugugcuucgccagcucccagaacaucaccgaggaguucuaccagagcacgugcuccgccgucagcaagggcuaccucggcgcccugcgcaccgggugguacaccagcgugaucaccaucgagcuguccaacaucaaggagaacaagugcaacggcaccgacgccaaggugaagcucaucaagcaggagcuggacaaguacaagaacgcggucacggaccugcagaugcugaugugcagcaccccggccgccggcuccgggagcgcgaucgccuccggcaucgccgucugcaaggugcugcaccucgagggcgaggugaacaagaucaagaacgcccugcuguccaccaacaaggccgucgugagccucuccaacggggugagcguccugaccuucaaggugcuggaccucaagaacuacaucgacaagcagcugcugcccauccugaacaagcagagcugcuccauccccaaccccgagaccgucauggaguuccagcagaagaacaaccgccuccuggagaucacgcgggaguucagcgugaacgcgggcgugaccacccccgucuccaccuacaugcugacgaacagcgagcuccugucccugaucaacgacaugccgaucaccaacgaccagaagaagcucaugagcaacaacgugcagaucgugcgccagcaguccuacagcaucaugugcaucaucaaggaggagguccuggccuacguggugcagcugccccucuacggggucaucgacacccccugcuggaagcugcacaccagcccccugugcacgaccaacaccaaggagggcuccaacaucugccucacccggacggaccgcgggugguacugcgacaacgccggcagcguguccuucuucccgcaggccgagaccugcaaggucugcagcaaccggguguucugcgacaccaugaacucccugacccugcccagcgaggugaaccucugcaacaucgacaucuucaaccccaaguacgacugcaagaucaugacguccaagaccgacgucagcuccagcgugaucaccucccugggcgccaucgugagcugcuacgggaagaccaagugcacggcgagcaacaagaacaagggcaucaucaagaccuucuccaacgggugcgacuacgucagcaacaagggcguggacaccguguccgucggcaacacccuguacuacgugaacaagcaggagggccagagccucuacgugaagggggagcccaucaucaacuucuacgacccgcuggucuuccccuccgacgaguucgacgccagcaucucccaggugaacgagaagaucaaccagagccuggccuucauccggaaguccgacgagcuccugcacaacgugaacgucggcaagagcaccacgaacaucaugaucaccaccaucaucaucgugaucaucgugauccugcugcuccugaucgccgucgggcuguuccucuacugcaaggcccgcuccacccccgugacgcugagcaaggaccagcuguccgggaucaacaacaucgcguucagcaacugaggacuaguaauaaggaaacuguaugaaugucugugggcaggaagugaagagauccuucuguaaagguuuuuggaauuaugucugcugaauaauaaacuuuuuugaaauaauaaaucugguagaaaaaugagaucuaaaaaaaaaaaaaaaaaaaaaaaaaaaaaaaaaaaaaaaaaaaaaaaaaaaaaaaaaaaaaaaaugcaucccccccccccccccccccccccccccccccaaaggcucuuuucagagccaccagaauu

SEQ ID NO: 17912 - RNA, 1994 nt, Artificial Sequence
  mRNA product Design g-4 comprising derived and/or modified sequence from HRSV(Memphis-37)__AIY60640.1__F_DSCav1_mut6 (opt1)
gggagacuccugucgggcggaaguaggaggaguagaguuuaaaaacaguacucuuuuuccgguucgggacguaguugaagcaacgacaagccggauaaccgcucuugagacaggaagcuuaccauggagcugcccauccucaagaccaacgccaucaccacgauccuggccgcggugacccugugcuucgccagcucccagaacaucaccgaggaguucuaccagagcacgugcuccgccgucagcaagggcuaccucggggcccugcgcaccggcugguacaccuccgugaucaccaucgagcugagcaacaucaaggagaacaagugcaacgggaccgacgccaaggugaagcucaucaagcaggagcuggacaaguacaagaacgcggucacggaccugcagaugcucaugugcuccaccccggccgccggcagcggguccgccaucgcgagcggcaucgccgugugcaaggugcugcaccuggagggcgaggucaacaagaucaagaacgcccuccuguccaccaacaaggccguggugagccuguccaacggggucagcgugcucaccuucaaggugcuggaccugaagaacuacaucgacaagcagcuccugcccauccugaacaagcaguccugcagcauccccaaccccgagacggucauggaguuccagcagaagaacaaccggcuccuggagaucacccgcgaguucuccgugaacgccggcgugaccaccccggucagcacguacaugcugaccaacuccgagcuccugagccugaucaacgacaugcccaucaccaacgaccagaagaagcucaugagcaacaacgugcagaucgugcggcagcaguccuacagcaucaugugcaucaucaaggaggagguccuggcguacguggugcagcugccccucuacggggucaucgacacccccugcuggaagcugcacacguccccgcugugcaccaccaacaccaaggagggcagcaacaucugccucacgcgcaccgaccgggggugguacugcgacaacgccggcuccgugagcuucuucccccaggccgagaccugcaaggugugcuccaaccgcgucuucugcgacaccaugaacagccugacgcugcccuccgaggugaaccucugcaacaucgacaucuucaaccccaaguacgacugcaagaucaugaccagcaagaccgacgucuccagcuccgugaucaccagccugggcgccaucguguccugcuacgggaagacgaagugcaccgccagcaacaagaacaagggcaucaucaagaccuucuccaacgggugcgacuacgucagcaacaagggcguggacaccguguccgucggcaacacgcuguacuacgugaacaagcaggaggggcagagccucuacgugaagggcgagccgaucaucaacuucuacgacccccuggucuuccccagcgacgaguucgacgcguccaucagccaggugaacgagaagaucaaccagucccuggccuucauccgcaagagcgacgagcuccugcacaacgugaacgucgggaaguccaccaccaacaucaugaucaccaccaucaucaucgugaucaucgugauccugcuccugcugaucgccgucggccucuuccuguacugcaaggcccggagcacgcccgugacccuguccaaggaccagcugagcgggaucaacaacaucgccuucuccaacugaggacuaguaauaaggaaacuguaugaaugucugugggcaggaagugaagagauccuucuguaaagguuuuuggaauuaugucugcugaauaauaaacuuuuuugaaauaauaaaucugguagaaaaaugagaucuaaaaaaaaaaaaaaaaaaaaaaaaaaaaaaaaaaaaaaaaaaaaaaaaaaaaaaaaaaaaaaaaugcaucccccccccccccccccccccccccccccccaaaggcucuuuucagagccaccagaauu

SEQ ID NO: 17913 - RNA, 1994 nt, Artificial Sequence
  mRNA product Design g-4 comprising derived and/or modified sequence from HRSV(Memphis-37)__AIY60640.1__F_DSCav1_mut6 (opt2)
gggagacuccugucgggcggaaguaggaggaguagaguuuaaaaacaguacucuuuuuccgguucgggacguaguugaagcaacgacaagccggauaaccgcucuugagacaggaagcuuaccauggagcuccccauccucaagaccaacgccaucaccaccauccucgccgccgucacccucugcuucgccuccucccagaacaucaccgaggaguucuaccaguccaccugcuccgccgucuccaagggcuaccucggcgcccuccgcaccggcugguacaccuccgucaucaccaucgagcucuccaacaucaaggagaacaagugcaacggcaccgacgccaaggucaagcucaucaagcaggagcucgacaaguacaagaacgccgucaccgaccuccagaugcucaugugcuccacccccgccgccggcuccggcuccgccaucgccuccggcaucgccgucugcaagguccuccaccucgagggcgaggucaacaagaucaagaacgcccuccucuccaccaacaaggccgucgucucccucuccaacggcgucuccguccucaccuucaagguccucgaccucaagaacuacaucgacaagcagcuccuccccauccucaacaagcaguccugcuccauccccaaccccgagaccgucauggaguuccagcagaagaacaaccgccuccucgagaucacccgcgaguucuccgucaacgccggcgucaccacccccgucuccaccuacaugcucaccaacuccgagcuccucucccucaucaacgacaugcccaucaccaacgaccagaagaagcucauguccaacaacguccagaucguccgccagcaguccuacuccaucaugugcaucaucaaggaggagguccucgccuacgucguccagcucccccucuacggcgucaucgacacccccugcuggaagcuccacaccuccccccucugcaccaccaacaccaaggagggcuccaacaucugccucacccgcaccgaccgcggcugguacugcgacaacgccggcuccgucuccuucuucccccaggccgagaccugcaaggucugcuccaaccgcgucuucugcgacaccaugaacucccucacccuccccuccgaggucaaccucugcaacaucgacaucuucaaccccaaguacgacugcaagaucaugaccuccaagaccgacgucuccuccuccgucaucaccucccucggcgccaucgucuccugcuacggcaagaccaagugcaccgccuccaacaagaacaagggcaucaucaagaccuucuccaacggcugcgacuacgucuccaacaagggcgucgacaccgucuccgucggcaacacccucuacuacgucaacaagcaggagggccagucccucuacgucaagggcgagcccaucaucaacuucuacgacccccucgucuuccccuccgacgaguucgacgccuccaucucccaggucaacgagaagaucaaccagucccucgccuucauccgcaaguccgacgagcuccuccacaacgucaacgucggcaaguccaccaccaacaucaugaucaccaccaucaucaucgucaucaucgucauccuccuccuccucaucgccgucggccucuuccucuacugcaaggcccgcuccacccccgucacccucuccaaggaccagcucuccggcaucaacaacaucgccuucuccaacugaggacuaguaauaaggaaacuguaugaaugucugugggcaggaagugaagagauccuucuguaaagguuuuuggaauuaugucugcugaauaauaaacuuuuuugaaauaauaaaucugguagaaaaaugagaucuaaaaaaaaaaaaaaaaaaaaaaaaaaaaaaaaaaaaaaaaaaaaaaaaaaaaaaaaaaaaaaaaugcaucccccccccccccccccccccccccccccccaaaggcucuuuucagagccaccagaauu

SEQ ID NO: 17914 - RNA, 1994 nt, Artificial Sequence
  mRNA product Design g-4 comprising derived and/or modified sequence from HRSV(Memphis-37)__AIY60640.1__F_DSCav1_mut6 (opt3)
gggagacuccugucgggcggaaguaggaggaguagaguuuaaaaacaguacucuuuuuccgguucgggacguaguugaagcaacgacaagccggauaaccgcucuugagacaggaagcuuaccauggagcugcccauccucaagaccaacgccauuacaacuauacuugcugcagugacgcugugcuucgccagcucccagaauaucaccgaagaguuuuaccaaucuacauguucagcggucaguaaaggcuauuugggggcuuuaagaacuggaugguacaccagcguuauuacaaucgaacuguccaacauuaaggagaauaaaugcaacgguaccgacgccaaggugaaacuaaucaagcaggaacucgauaaguauaaaaaugcaguaacugaccugcagaugcuuauguguucuacuccugccgcuggcucggggucagcaauagccagcggaaucgcugugugcaagguccugcacuuggagggcgaggugaacaaaauuaagaaugcccuccugaguaccaacaaagcgguugugucccugucuaauggugucagcgugcucacguucaagguauuagaucugaagaacuacaucgacaaacagcuuuugccaauucugaauaagcaauccuguucaaucccgaaccccgaaacuguuauggaguuucagcagaaaaauaacaggcuacucgaaauaacccgggaguucagugugaaugcaggggucacaacuccugugagcaccuauaugcugacaaacucugagcuucuguccuugauuaacgauaugccaaucaccaaugaccagaagaaacucaugucaaacaaugugcaaauuguccgccagcagagcuacaguaucaugugcaucauuaaggaagagguucuggccuaugugguacaguuaccccuguacggagugauagauacgccuuguuggaaacuccauacuucuccacuuugcacaaccaacacuaaggaaggcuccaauaucugucugacacgaaccgaccguggcugguacugcgauaacgcugggagcgucucguuuuucccccaagccgagacguguaaggugugcucuaauagaguuuucugcgacaccaugaacuccuugacacuaccuucagaagugaaucuguguaacauugauaucuucaauccaaaauaugacugcaagauaaugacaaguaaaaccgaugucagcuccucugugauuacaagccucggagcaaucguaucauguuacgguaagacuaaaugcaccgcuaguaacaagaauaagggcaucauuaaaacauuuuccaacgggugugacuauguuagcaauaagggaguggacaccgucucugugggcaacacucuguacuaugucaacaaacaggagggucagucacuuuacgugaagggggagccgaucauuaauuucuaugauccccugguuuuuccuagugacgaauuugaugccagcauaucccaagugaacgagaaaaucaaucagucuuuggcguuuauuaggaagucggacgaacuccugcacaacguaaaugucggaaagagcacgacaaacaucaugaucaccacuauuauaaucgugauuaucguuauuuuacugcuacucaucgccgugggccuguuccuuuacugcaaagcacgguccaccccagucacauugucaaaggaucagcugaguggcauaaauaacaucgcuuucucuaauugaggacuaguaauaaggaaacuguaugaaugucugugggcaggaagugaagagauccuucuguaaagguuuuuggaauuaugucugcugaauaauaaacuuuuuugaaauaauaaaucugguagaaaaaugagaucuaaaaaaaaaaaaaaaaaaaaaaaaaaaaaaaaaaaaaaaaaaaaaaaaaaaaaaaaaaaaaaaaugcaucccccccccccccccccccccccccccccccaaaggcucuuuucagagccaccagaauu

SEQ ID NO: 17915 - RNA, 1994 nt, Artificial Sequence
  mRNA product Design g-4 comprising derived and/or modified sequence from HRSV(Memphis-37)__AIY60640.1__F_DSCav1_mut6 (opt4)
gggagacuccugucgggcggaaguaggaggaguagaguuuaaaaacaguacucuuuuuccgguucgggacguaguugaagcaacgacaagccggauaaccgcucuugagacaggaagcuuaccauggagcugcccauccugaagaccaacgccaucaccaccauccuggccgccgugacccugugcuucgccagcagccagaacaucaccgaggaguucuaccagagcaccugcagcgccgugagcaagggcuaccugggcgcccugagaaccggcugguacaccagcgugaucaccaucgagcugagcaacaucaaggagaacaagugcaacggcaccgacgccaaggugaagcugaucaagcaggagcuggacaaguacaagaacgccgugaccgaccugcagaugcugaugugcagcacccccgccgccggcagcggcagcgccaucgccagcggcaucgccgugugcaaggugcugcaccuggagggcgaggugaacaagaucaagaacgcccugcugagcaccaacaaggccguggugagccugagcaacggcgugagcgugcugaccuucaaggugcuggaccugaagaacuacaucgacaagcagcugcugcccauccugaacaagcagagcugcagcauccccaaccccgagaccgugauggaguuccagcagaagaacaacagacugcuggagaucaccagagaguucagcgugaacgccggcgugaccacccccgugagcaccuacaugcugaccaacagcgagcugcugagccugaucaacgacaugcccaucaccaacgaccagaagaagcugaugagcaacaacgugcagaucgugagacagcagagcuacagcaucaugugcaucaucaaggaggaggugcuggccuacguggugcagcugccccuguacggcgugaucgacacccccugcuggaagcugcacaccagcccccugugcaccaccaacaccaaggagggcagcaacaucugccugaccagaaccgacagaggcugguacugcgacaacgccggcagcgugagcuucuucccccaggccgagaccugcaaggugugcagcaacagaguguucugcgacaccaugaacagccugacccugcccagcgaggugaaccugugcaacaucgacaucuucaaccccaaguacgacugcaagaucaugaccagcaagaccgacgugagcagcagcgugaucaccagccugggcgccaucgugagcugcuacggcaagaccaagugcaccgccagcaacaagaacaagggcaucaucaagaccuucagcaacggcugcgacuacgugagcaacaagggcguggacaccgugagcgugggcaacacccuguacuacgugaacaagcaggagggccagagccuguacgugaagggcgagcccaucaucaacuucuacgacccccugguguuccccagcgacgaguucgacgccagcaucagccaggugaacgagaagaucaaccagagccuggccuucaucagaaagagcgacgagcugcugcacaacgugaacgugggcaagagcaccaccaacaucaugaucaccaccaucaucaucgugaucaucgugauccugcugcugcugaucgccgugggccuguuccuguacugcaaggccagaagcacccccgugacccugagcaaggaccagcugagcggcaucaacaacaucgccuucagcaacugaggacuaguaauaaggaaacuguaugaaugucugugggcaggaagugaagagauccuucuguaaagguuuuuggaauuaugucugcugaauaauaaacuuuuuugaaauaauaaaucugguagaaaaaugagaucuaaaaaaaaaaaaaaaaaaaaaaaaaaaaaaaaaaaaaaaaaaaaaaaaaaaaaaaaaaaaaaaaugcaucccccccccccccccccccccccccccccccaaaggcucuuuucagagccaccagaauu

SEQ ID NO: 17916 - RNA, 1994 nt, Artificial Sequence
  mRNA product Design g-4 comprising derived and/or modified sequence from HRSV(Memphis-37)__AIY60640.1__F_DSCav1_mut6 (opt5)
gggagacuccugucgggcggaaguaggaggaguagaguuuaaaaacaguacucuuuuuccgguucgggacguaguugaagcaacgacaagccggauaaccgcucuugagacaggaagcuuaccauggagcugcccauccucaagaccaacgccauuacaacgauccuggcugccgugacccuuugcuucgcgagcucccagaauauuacagaagaguuuuaccaaucuaccuguagcgcugucuccaaaggcuaucugggggcccucagaacaggaugguacaccucuguuaucacaauugaacugagcaacaucaaggagaauaaaugcaacggcaccgacgccaaggugaaacuuaucaagcaggaacuggauaaguauaaaaaugcugugacggaccuccagaugcugauguguuccaccccugccgcugggucuggaagcgccauugcguccggcaucgccgucugcaaggugcugcaccucgagggggagguuaacaaaauuaagaaugcucugcuuagcacaaacaaagccguggucucucuguccaauggagugagcguucucaccuucaaggugcuggaucuuaagaacuacaucgacaaacagcugcucccgauucugaauaagcaaucuuguuccauccccaacccugaaacagucauggaguuucagcagaaaaauaaccggcugcucgaaauuacccgcgaguucagcgugaaugcuggcgugacgacacccgucucuaccuauaugcugacaaacuccgagcuucugagccucaucaacgauaugccuaucaccaaugaccagaagaaacugauguccaacaauguucaaauugugagacagcagucuuacagcaucaugugcauuaucaaggaagaggugcuugccuaugucgugcagcugccccucuacggcguuauugauaccccuuguuggaaacugcauacauccccgcugugcacgaccaacacaaaggaagggagcaauaucugucucacccggacagaccgcggaugguacugcgauaacgcgggcucuguguccuuuuucccccaagccgagaccuguaaggucugcagcaauagaguguuuugcgacacgaugaacucucugacacuuccuagcgaaguuaaucuguguaacaucgauauuuucaaucccaaauaugacugcaagaucaugaccuccaaaaccgaugugucuagcuccgucauuacaagccucggggcuaucgugucuuguuacggaaagaccaaaugcacagccuccaacaagaauaagggcauuaucaaaacguuuagcaacgggugugacuaugucucuaauaagggaguggacaccguuuccgugggcaacacacuguacuaugucaacaaacaggagggccagagccuuuacgugaagggggagccuaucauuaauuucuaugauccccugguuuuuccguccgacgaauuugaugcuucuaucagccaagugaacgagaaaauuaaucagucccucgccuucauccggaagucugacgaacugcugcacaacgucaaugugggaaagagcaccacaaacauuaugaucaccacgauuaucaucgugauuaucguuauucuccugcuucugaucgccgucggccucuuccuguacugcaaagcucgcuccaccccugugacacugagcaaggaucagcuuucugggauuaauaacaucgcguucuccaauugaggacuaguaauaaggaaacuguaugaaugucugugggcaggaagugaagagauccuucuguaaagguuuuuggaauuaugucugcugaauaauaaacuuuuuugaaauaauaaaucugguagaaaaaugagaucuaaaaaaaaaaaaaaaaaaaaaaaaaaaaaaaaaaaaaaaaaaaaaaaaaaaaaaaaaaaaaaaaugcaucccccccccccccccccccccccccccccccaaaggcucuuuucagagccaccagaauu

SEQ ID NO: 17917 - RNA, 1994 nt, Artificial Sequence
  mRNA product Design g-4 comprising derived and/or modified sequence from HRSV(Memphis-37)__AIY60640.1__F_DSCav1_mut6 (opt6)
gggagacuccugucgggcggaaguaggaggaguagaguuuaaaaacaguacucuuuuuccgguucgggacguaguugaagcaacgacaagccggauaaccgcucuugagacaggaagcuuaccauggaacuaccaauuuuaaaaacaaacgcaauuacaacuauacucgcagcaguaacauuauguuucgccucaucccaaaacauaacagaagaauuuuaccaaucaacaugcagcgcaguaucaaaaggauaucucggagcauuacgaacagguugguacacaucuguaaucacuauagaacuaucaaacauaaaagaaaacaaaugcaauggaaccgacgcaaaaguaaaauuaauaaaacaagaacucgauaaauacaaaaaugcaguaacagaccuccaaaugcucauguguucaacaccagccgcaggaucagguuccgccauagcaucuggcauagcaguaugcaaaguacuccacuuagaaggagaaguuaacaaaauaaaaaacgcacuauuaucaacaaacaaagcaguaguaucccucucaaacggagucucaguauuaacauucaaaguauuagaccuaaaaaacuacauagacaaacaacuacuuccaauacucaacaaacaaucaugcucaauaccaaacccagaaaccguaauggaauuucaacaaaaaaacaaccgacuacuagaaaucacacgagaauuuucaguaaacgccggugucacaacuccaguaucaacuuauauguuaaccaacucagaacuauuaucauuaauaaacgauaugcccauaacuaacgaccaaaaaaaauuaaugucaaacaacguacaaauaguacgccaacaaaguuacucaauaaugugcaucauaaaagaagaaguauuagcguacguuguacaacuaccucuauacggagucauagacacaccaugcuggaaacuucacacaucaccacuauguacaacaaacacaaaagaaggcaguaacauaugccuaacaagaacagaccguggaugguauugugacaacgcuggaucuguaucauucuucccucaagcagaaaccuguaaaguuugcucaaacagagucuucugugacacaaugaacucucuaacacuaccuuccgaagugaaccucuguaacauagacauauucaauccaaaauaugauugcaaaauaaugacuucaaaaacagauguaucauccucuguuauaacaucauuaggcgccauaguuucaugcuacggaaaaacuaaaugcacagcaucaaacaaaaacaaaggaauaauaaaaaccuucucaaauggaugcgacuacguaagcaacaaaggcguagacacaguaucaguagguaauacauuauacuacguaaacaaacaagaaggacaaucacuuuauguuaaaggagaaccuauaauaaacuucuacgacccacuuguauuuccauccgaugaauuugacgcaucuauaucacaagucaacgaaaaaauaaaccaaucauuagcauucauucgaaaauccgaugaacuacuccauaacguaaaugucggaaaaucaacaaccaacauaaugaucacaacaauaaucauagugauaauaguaauacuccuacuacuaaucgcaguaggucuauuccuauauuguaaagcaagaucuacuccaguuacacucucuaaagaccaauuaagcgguaucaacaacaucgccuucagcaauuaaggacuaguaauaaggaaacuguaugaaugucugugggcaggaagugaagagauccuucuguaaagguuuuuggaauuaugucugcugaauaauaaacuuuuuugaaauaauaaaucugguagaaaaaugagaucuaaaaaaaaaaaaaaaaaaaaaaaaaaaaaaaaaaaaaaaaaaaaaaaaaaaaaaaaaaaaaaaaugcaucccccccccccccccccccccccccccccccaaaggcucuuuucagagccaccagaauu

SEQ ID NO: 17918 - RNA, 1994 nt, Artificial Sequence
  mRNA product Design g-4 comprising derived and/or modified sequence from HRSV(Memphis-37)__AIY60640.1__F_DSCav1_mut6 (opt11)
gggagacuccugucgggcggaaguaggaggaguagaguuuaaaaacaguacucuuuuuccgguucgggacguaguugaagcaacgacaagccggauaaccgcucuugagacaggaagcuuaccauggagcugcccauccucaagaccaacgccaucaccacgauccuggccgcggugacccugugcuucgcgagcucccaaaacaucaccgaggaguucuaccagagcacgugcuccgccgucagcaagggcuaccucggggcccugcgcaccggcugguacaccuccgugaucaccaucgagcugagcaacaucaaggaaaacaagugcaacgggacggacgcaaaggugaagcucaucaagcaggagcuggauaaguacaagaacgcggucacggaccugcagaugcucaugugcuccaccccggccgccggcagcggguccgccaucgcguccggcaucgccgugugcaagguguugcaccuggagggcgaggucaacaagaucaagaacgcccuccuuuccaccaauaaggcuguugugagccuguccaacggggucagcgugcucaccuucaaggugcuggaccugaagaacuacaucgacaagcagcuccugcccauccugaacaagcaguccugcagcauccccaaccccgagacagucauggaguuccagcagaagaacaaccggcuccuggagaucacccgcgaguucuccguuaacgccggggugaccaccccgguaagcacauacaugcugaccaacagcgagcuccugagccugaucaacgacaugcccaucaccaacgaccagaagaagcucaugagcaacaacgugcagaucgugcggcagcaguccuacagcaucaugugcaucaucaaggaggagguccuggcguacguggugcaacugccccucuacggggucaucgacacccccugcuggaagcugcacacguccccgcugugcaccaccaacaccaaggagggcagcaacaucugccucacgcgcaccgaccgggggugguacugcgacaacgcaggcuccgugagcuucuucccccaggccgagaccugcaaggugugcuccaaccgcgucuucugcgacaccaugaacagccugacgcugcccuccgaggugaaccucugcaacaucgacaucuucaaccccaaguacgacuguaagaucaugaccagcaagaccgaugucuccagcuccgugaucaccagccugggcgccauaguguccuguuaugggaagacgaagugcaccgccagcaacaagaacaaaggcaucaucaagaccuucuccaacgggugcgacuacgucagcaacaagggcguggacacaguguccgucggcaacacgcuguacuacgugaacaagcaggaggggcagagccucuacgugaagggcgagccgaucaucaacuucuacgauccccuggucuuccccagcgacgaguucgacgcguccaucagccaagugaacgagaagaucaaccagucccuggccuucauccgcaagagcgacgagcuccugcacaacgugaacgucgggaaguccaccaccaacaucaugaucaccaccaucaucaucgugaucaucgucauccugcuccugcugaucgccgucggccucuuccuguacugcaaggcccggagcacgcccgugacccuguccaaggaccagcugucgggcaucaacaacaucgccuucuccaacugaggacuaguaauaaggaaacuguaugaaugucugugggcaggaagugaagagauccuucuguaaagguuuuuggaauuaugucugcugaauaauaaacuuuuuugaaauaauaaaucugguagaaaaaugagaucuaaaaaaaaaaaaaaaaaaaaaaaaaaaaaaaaaaaaaaaaaaaaaaaaaaaaaaaaaaaaaaaaugcaucccccccccccccccccccccccccccccccaaaggcucuuuucagagccaccagaauu

SEQ ID NO: 17919 - RNA, 1970 nt, Artificial Sequence
  mRNA product Design g-5 comprising derived and/or modified sequence from HRSV(Memphis-37)__AIY60640.1__F_DSCav1_mut6 (opt1)
gggagacccgugacccggaaguuguacggcuacgcgacuuucccucccacaaacccucgcgcccuuccuuuccuacuugggcccggcagaaagcuuaccauggagcugcccauccucaagaccaacgccaucaccacgauccuggccgcggugacccugugcuucgccagcucccagaacaucaccgaggaguucuaccagagcacgugcuccgccgucagcaagggcuaccucggcgcccugcgcaccgggugguacaccagcgugaucaccaucgagcuguccaacaucaaggagaacaagugcaacggcaccgacgccaaggugaagcucaucaagcaggagcuggacaaguacaagaacgcggucacggaccugcagaugcugaugugcagcaccccggccgccggcuccgggagcgcgaucgccuccggcaucgccgucugcaaggugcugcaccucgagggcgaggugaacaagaucaagaacgcccugcuguccaccaacaaggccgucgugagccucuccaacggggugagcguccugaccuucaaggugcuggaccucaagaacuacaucgacaagcagcugcugcccauccugaacaagcagagcugcuccauccccaaccccgagaccgucauggaguuccagcagaagaacaaccgccuccuggagaucacgcgggaguucagcgugaacgcgggcgugaccacccccgucuccaccuacaugcugacgaacagcgagcuccugucccugaucaacgacaugccgaucaccaacgaccagaagaagcucaugagcaacaacgugcagaucgugcgccagcaguccuacagcaucaugugcaucaucaaggaggagguccuggccuacguggugcagcugccccucuacggggucaucgacacccccugcuggaagcugcacaccagcccccugugcacgaccaacaccaaggagggcuccaacaucugccucacccggacggaccgcgggugguacugcgacaacgccggcagcguguccuucuucccgcaggccgagaccugcaaggucugcagcaaccggguguucugcgacaccaugaacucccugacccugcccagcgaggugaaccucugcaacaucgacaucuucaaccccaaguacgacugcaagaucaugacguccaagaccgacgucagcuccagcgugaucaccucccugggcgccaucgugagcugcuacgggaagaccaagugcacggcgagcaacaagaacaagggcaucaucaagaccuucuccaacgggugcgacuacgucagcaacaagggcguggacaccguguccgucggcaacacccuguacuacgugaacaagcaggagggccagagccucuacgugaagggggagcccaucaucaacuucuacgacccgcuggucuuccccuccgacgaguucgacgccagcaucucccaggugaacgagaagaucaaccagagccuggccuucauccggaaguccgacgagcuccugcacaacgugaacgucggcaagagcaccacgaacaucaugaucaccaccaucaucaucgugaucaucgugauccugcugcuccugaucgccgucgggcuguuccucuacugcaaggcccgcuccacccccgugacgcugagcaaggaccagcuguccgggaucaacaacaucgcguucagcaacugaggacuaguaauaaggaaacuguaugaaugucugugggcaggaagugaagagauccuucuguaaagguuuuuggaauuaugucugcugaauaauaaacuuuuuugaaauaauaaaucugguagaaaaaugagaucuaaaaaaaaaaaaaaaaaaaaaaaaaaaaaaaaaaaaaaaaaaaaaaaaaaaaaaaaaaaaaaaaugcaucccccccccccccccccccccccccccccccaaaggcucuuuucagagccaccagaauu

SEQ ID NO: 17920 - RNA, 1970 nt, Artificial Sequence
  mRNA product Design g-5 comprising derived and/or modified sequence from HRSV(Memphis-37)__AIY60640.1__F_DSCav1_mut6 (opt1)
gggagacccgugacccggaaguuguacggcuacgcgacuuucccucccacaaacccucgcgcccuuccuuuccuacuugggcccggcagaaagcuuaccauggagcugcccauccucaagaccaacgccaucaccacgauccuggccgcggugacccugugcuucgccagcucccagaacaucaccgaggaguucuaccagagcacgugcuccgccgucagcaagggcuaccucggggcccugcgcaccggcugguacaccuccgugaucaccaucgagcugagcaacaucaaggagaacaagugcaacgggaccgacgccaaggugaagcucaucaagcaggagcuggacaaguacaagaacgcggucacggaccugcagaugcucaugugcuccaccccggccgccggcagcggguccgccaucgcgagcggcaucgccgugugcaaggugcugcaccuggagggcgaggucaacaagaucaagaacgcccuccuguccaccaacaaggccguggugagccuguccaacggggucagcgugcucaccuucaaggugcuggaccugaagaacuacaucgacaagcagcuccugcccauccugaacaagcaguccugcagcauccccaaccccgagacggucauggaguuccagcagaagaacaaccggcuccuggagaucacccgcgaguucuccgugaacgccggcgugaccaccccggucagcacguacaugcugaccaacuccgagcuccugagccugaucaacgacaugcccaucaccaacgaccagaagaagcucaugagcaacaacgugcagaucgugcggcagcaguccuacagcaucaugugcaucaucaaggaggagguccuggcguacguggugcagcugccccucuacggggucaucgacacccccugcuggaagcugcacacguccccgcugugcaccaccaacaccaaggagggcagcaacaucugccucacgcgcaccgaccgggggugguacugcgacaacgccggcuccgugagcuucuucccccaggccgagaccugcaaggugugcuccaaccgcgucuucugcgacaccaugaacagccugacgcugcccuccgaggugaaccucugcaacaucgacaucuucaaccccaaguacgacugcaagaucaugaccagcaagaccgacgucuccagcuccgugaucaccagccugggcgccaucguguccugcuacgggaagacgaagugcaccgccagcaacaagaacaagggcaucaucaagaccuucuccaacgggugcgacuacgucagcaacaagggcguggacaccguguccgucggcaacacgcuguacuacgugaacaagcaggaggggcagagccucuacgugaagggcgagccgaucaucaacuucuacgacccccuggucuuccccagcgacgaguucgacgcguccaucagccaggugaacgagaagaucaaccagucccuggccuucauccgcaagagcgacgagcuccugcacaacgugaacgucgggaaguccaccaccaacaucaugaucaccaccaucaucaucgugaucaucgugauccugcuccugcugaucgccgucggccucuuccuguacugcaaggcccggagcacgcccgugacccuguccaaggaccagcugagcgggaucaacaacaucgccuucuccaacugaggacuaguaauaaggaaacuguaugaaugucugugggcaggaagugaagagauccuucuguaaagguuuuuggaauuaugucugcugaauaauaaacuuuuuugaaauaauaaaucugguagaaaaaugagaucuaaaaaaaaaaaaaaaaaaaaaaaaaaaaaaaaaaaaaaaaaaaaaaaaaaaaaaaaaaaaaaaaugcaucccccccccccccccccccccccccccccccaaaggcucuuuucagagccaccagaauu

SEQ ID NO: 17921 - RNA, 1970 nt, Artificial Sequence
  mRNA product Design g-5 comprising derived and/or modified sequence from HRSV(Memphis-37)__AIY60640.1__F_DSCav1_mut6 (opt2)
gggagacccgugacccggaaguuguacggcuacgcgacuuucccucccacaaacccucgcgcccuuccuuuccuacuugggcccggcagaaagcuuaccauggagcuccccauccucaagaccaacgccaucaccaccauccucgccgccgucacccucugcuucgccuccucccagaacaucaccgaggaguucuaccaguccaccugcuccgccgucuccaagggcuaccucggcgcccuccgcaccggcugguacaccuccgucaucaccaucgagcucuccaacaucaaggagaacaagugcaacggcaccgacgccaaggucaagcucaucaagcaggagcucgacaaguacaagaacgccgucaccgaccuccagaugcucaugugcuccacccccgccgccggcuccggcuccgccaucgccuccggcaucgccgucugcaagguccuccaccucgagggcgaggucaacaagaucaagaacgcccuccucuccaccaacaaggccgucgucucccucuccaacggcgucuccguccucaccuucaagguccucgaccucaagaacuacaucgacaagcagcuccuccccauccucaacaagcaguccugcuccauccccaaccccgagaccgucauggaguuccagcagaagaacaaccgccuccucgagaucacccgcgaguucuccgucaacgccggcgucaccacccccgucuccaccuacaugcucaccaacuccgagcuccucucccucaucaacgacaugcccaucaccaacgaccagaagaagcucauguccaacaacguccagaucguccgccagcaguccuacuccaucaugugcaucaucaaggaggagguccucgccuacgucguccagcucccccucuacggcgucaucgacacccccugcuggaagcuccacaccuccccccucugcaccaccaacaccaaggagggcuccaacaucugccucacccgcaccgaccgcggcugguacugcgacaacgccggcuccgucuccuucuucccccaggccgagaccugcaaggucugcuccaaccgcgucuucugcgacaccaugaacucccucacccuccccuccgaggucaaccucugcaacaucgacaucuucaaccccaaguacgacugcaagaucaugaccuccaagaccgacgucuccuccuccgucaucaccucccucggcgccaucgucuccugcuacggcaagaccaagugcaccgccuccaacaagaacaagggcaucaucaagaccuucuccaacggcugcgacuacgucuccaacaagggcgucgacaccgucuccgucggcaacacccucuacuacgucaacaagcaggagggccagucccucuacgucaagggcgagcccaucaucaacuucuacgacccccucgucuuccccuccgacgaguucgacgccuccaucucccaggucaacgagaagaucaaccagucccucgccuucauccgcaaguccgacgagcuccuccacaacgucaacgucggcaaguccaccaccaacaucaugaucaccaccaucaucaucgucaucaucgucauccuccuccuccucaucgccgucggccucuuccucuacugcaaggcccgcuccacccccgucacccucuccaaggaccagcucuccggcaucaacaacaucgccuucuccaacugaggacuaguaauaaggaaacuguaugaaugucugugggcaggaagugaagagauccuucuguaaagguuuuuggaauuaugucugcugaauaauaaacuuuuuugaaauaauaaaucugguagaaaaaugagaucuaaaaaaaaaaaaaaaaaaaaaaaaaaaaaaaaaaaaaaaaaaaaaaaaaaaaaaaaaaaaaaaaugcaucccccccccccccccccccccccccccccccaaaggcucuuuucagagccaccagaauu

SEQ ID NO: 17922 - RNA, 1970 nt, Artificial Sequence
  mRNA product Design g-5 comprising derived and/or modified sequence from HRSV(Memphis-37)__AIY60640.1__F_DSCav1_mut6 (opt3)
gggagacccgugacccggaaguuguacggcuacgcgacuuucccucccacaaacccucgcgcccuuccuuuccuacuugggcccggcagaaagcuuaccauggagcugcccauccucaagaccaacgccauuacaacuauacuugcugcagugacgcugugcuucgccagcucccagaauaucaccgaagaguuuuaccaaucuacauguucagcggucaguaaaggcuauuugggggcuuuaagaacuggaugguacaccagcguuauuacaaucgaacuguccaacauuaaggagaauaaaugcaacgguaccgacgccaaggugaaacuaaucaagcaggaacucgauaaguauaaaaaugcaguaacugaccugcagaugcuuauguguucuacuccugccgcuggcucggggucagcaauagccagcggaaucgcugugugcaagguccugcacuuggagggcgaggugaacaaaauuaagaaugcccuccugaguaccaacaaagcgguugugucccugucuaauggugucagcgugcucacguucaagguauuagaucugaagaacuacaucgacaaacagcuuuugccaauucugaauaagcaauccuguucaaucccgaaccccgaaacuguuauggaguuucagcagaaaaauaacaggcuacucgaaauaacccgggaguucagugugaaugcaggggucacaacuccugugagcaccuauaugcugacaaacucugagcuucuguccuugauuaacgauaugccaaucaccaaugaccagaagaaacucaugucaaacaaugugcaaauuguccgccagcagagcuacaguaucaugugcaucauuaaggaagagguucuggccuaugugguacaguuaccccuguacggagugauagauacgccuuguuggaaacuccauacuucuccacuuugcacaaccaacacuaaggaaggcuccaauaucugucugacacgaaccgaccguggcugguacugcgauaacgcugggagcgucucguuuuucccccaagccgagacguguaaggugugcucuaauagaguuuucugcgacaccaugaacuccuugacacuaccuucagaagugaaucuguguaacauugauaucuucaauccaaaauaugacugcaagauaaugacaaguaaaaccgaugucagcuccucugugauuacaagccucggagcaaucguaucauguuacgguaagacuaaaugcaccgcuaguaacaagaauaagggcaucauuaaaacauuuuccaacgggugugacuauguuagcaauaagggaguggacaccgucucugugggcaacacucuguacuaugucaacaaacaggagggucagucacuuuacgugaagggggagccgaucauuaauuucuaugauccccugguuuuuccuagugacgaauuugaugccagcauaucccaagugaacgagaaaaucaaucagucuuuggcguuuauuaggaagucggacgaacuccugcacaacguaaaugucggaaagagcacgacaaacaucaugaucaccacuauuauaaucgugauuaucguuauuuuacugcuacucaucgccgugggccuguuccuuuacugcaaagcacgguccaccccagucacauugucaaaggaucagcugaguggcauaaauaacaucgcuuucucuaauugaggacuaguaauaaggaaacuguaugaaugucugugggcaggaagugaagagauccuucuguaaagguuuuuggaauuaugucugcugaauaauaaacuuuuuugaaauaauaaaucugguagaaaaaugagaucuaaaaaaaaaaaaaaaaaaaaaaaaaaaaaaaaaaaaaaaaaaaaaaaaaaaaaaaaaaaaaaaaugcaucccccccccccccccccccccccccccccccaaaggcucuuuucagagccaccagaauu

SEQ ID NO: 17923 - RNA, 1970 nt, Artificial Sequence
  mRNA product Design g-5 comprising derived and/or modified sequence from HRSV(Memphis-37)__AIY60640.1__F_DSCav1_mut6 (opt4)
gggagacccgugacccggaaguuguacggcuacgcgacuuucccucccacaaacccucgcgcccuuccuuuccuacuugggcccggcagaaagcuuaccauggagcugcccauccugaagaccaacgccaucaccaccauccuggccgccgugacccugugcuucgccagcagccagaacaucaccgaggaguucuaccagagcaccugcagcgccgugagcaagggcuaccugggcgcccugagaaccggcugguacaccagcgugaucaccaucgagcugagcaacaucaaggagaacaagugcaacggcaccgacgccaaggugaagcugaucaagcaggagcuggacaaguacaagaacgccgugaccgaccugcagaugcugaugugcagcacccccgccgccggcagcggcagcgccaucgccagcggcaucgccgugugcaaggugcugcaccuggagggcgaggugaacaagaucaagaacgcccugcugagcaccaacaaggccguggugagccugagcaacggcgugagcgugcugaccuucaaggugcuggaccugaagaacuacaucgacaagcagcugcugcccauccugaacaagcagagcugcagcauccccaaccccgagaccgugauggaguuccagcagaagaacaacagacugcuggagaucaccagagaguucagcgugaacgccggcgugaccacccccgugagcaccuacaugcugaccaacagcgagcugcugagccugaucaacgacaugcccaucaccaacgaccagaagaagcugaugagcaacaacgugcagaucgugagacagcagagcuacagcaucaugugcaucaucaaggaggaggugcuggccuacguggugcagcugccccuguacggcgugaucgacacccccugcuggaagcugcacaccagcccccugugcaccaccaacaccaaggagggcagcaacaucugccugaccagaaccgacagaggcugguacugcgacaacgccggcagcgugagcuucuucccccaggccgagaccugcaaggugugcagcaacagaguguucugcgacaccaugaacagccugacccugcccagcgaggugaaccugugcaacaucgacaucuucaaccccaaguacgacugcaagaucaugaccagcaagaccgacgugagcagcagcgugaucaccagccugggcgccaucgugagcugcuacggcaagaccaagugcaccgccagcaacaagaacaagggcaucaucaagaccuucagcaacggcugcgacuacgugagcaacaagggcguggacaccgugagcgugggcaacacccuguacuacgugaacaagcaggagggccagagccuguacgugaagggcgagcccaucaucaacuucuacgacccccugguguuccccagcgacgaguucgacgccagcaucagccaggugaacgagaagaucaaccagagccuggccuucaucagaaagagcgacgagcugcugcacaacgugaacgugggcaagagcaccaccaacaucaugaucaccaccaucaucaucgugaucaucgugauccugcugcugcugaucgccgugggccuguuccuguacugcaaggccagaagcacccccgugacccugagcaaggaccagcugagcggcaucaacaacaucgccuucagcaacugaggacuaguaauaaggaaacuguaugaaugucugugggcaggaagugaagagauccuucuguaaagguuuuuggaauuaugucugcugaauaauaaacuuuuuugaaauaauaaaucugguagaaaaaugagaucuaaaaaaaaaaaaaaaaaaaaaaaaaaaaaaaaaaaaaaaaaaaaaaaaaaaaaaaaaaaaaaaaugcaucccccccccccccccccccccccccccccccaaaggcucuuuucagagccaccagaauu

SEQ ID NO: 17924 - RNA, 1970 nt, Artificial Sequence
  mRNA product Design g-5 comprising derived and/or modified sequence from HRSV(Memphis-37)__AIY60640.1__F_DSCav1_mut6 (opt5)
gggagacccgugacccggaaguuguacggcuacgcgacuuucccucccacaaacccucgcgcccuuccuuuccuacuugggcccggcagaaagcuuaccauggagcugcccauccucaagaccaacgccauuacaacgauccuggcugccgugacccuuugcuucgcgagcucccagaauauuacagaagaguuuuaccaaucuaccuguagcgcugucuccaaaggcuaucugggggcccucagaacaggaugguacaccucuguuaucacaauugaacugagcaacaucaaggagaauaaaugcaacggcaccgacgccaaggugaaacuuaucaagcaggaacuggauaaguauaaaaaugcugugacggaccuccagaugcugauguguuccaccccugccgcugggucuggaagcgccauugcguccggcaucgccgucugcaaggugcugcaccucgagggggagguuaacaaaauuaagaaugcucugcuuagcacaaacaaagccguggucucucuguccaauggagugagcguucucaccuucaaggugcuggaucuuaagaacuacaucgacaaacagcugcucccgauucugaauaagcaaucuuguuccauccccaacccugaaacagucauggaguuucagcagaaaaauaaccggcugcucgaaauuacccgcgaguucagcgugaaugcuggcgugacgacacccgucucuaccuauaugcugacaaacuccgagcuucugagccucaucaacgauaugccuaucaccaaugaccagaagaaacugauguccaacaauguucaaauugugagacagcagucuuacagcaucaugugcauuaucaaggaagaggugcuugccuaugucgugcagcugccccucuacggcguuauugauaccccuuguuggaaacugcauacauccccgcugugcacgaccaacacaaaggaagggagcaauaucugucucacccggacagaccgcggaugguacugcgauaacgcgggcucuguguccuuuuucccccaagccgagaccuguaaggucugcagcaauagaguguuuugcgacacgaugaacucucugacacuuccuagcgaaguuaaucuguguaacaucgauauuuucaaucccaaauaugacugcaagaucaugaccuccaaaaccgaugugucuagcuccgucauuacaagccucggggcuaucgugucuuguuacggaaagaccaaaugcacagccuccaacaagaauaagggcauuaucaaaacguuuagcaacgggugugacuaugucucuaauaagggaguggacaccguuuccgugggcaacacacuguacuaugucaacaaacaggagggccagagccuuuacgugaagggggagccuaucauuaauuucuaugauccccugguuuuuccguccgacgaauuugaugcuucuaucagccaagugaacgagaaaauuaaucagucccucgccuucauccggaagucugacgaacugcugcacaacgucaaugugggaaagagcaccacaaacauuaugaucaccacgauuaucaucgugauuaucguuauucuccugcuucugaucgccgucggccucuuccuguacugcaaagcucgcuccaccccugugacacugagcaaggaucagcuuucugggauuaauaacaucgcguucuccaauugaggacuaguaauaaggaaacuguaugaaugucugugggcaggaagugaagagauccuucuguaaagguuuuuggaauuaugucugcugaauaauaaacuuuuuugaaauaauaaaucugguagaaaaaugagaucuaaaaaaaaaaaaaaaaaaaaaaaaaaaaaaaaaaaaaaaaaaaaaaaaaaaaaaaaaaaaaaaaugcaucccccccccccccccccccccccccccccccaaaggcucuuuucagagccaccagaauu

SEQ ID NO: 17925 - RNA, 1970 nt, Artificial Sequence
  mRNA product Design g-5 comprising derived and/or modified sequence from HRSV(Memphis-37)__AIY60640.1__F_DSCav1_mut6 (opt6)
gggagacccgugacccggaaguuguacggcuacgcgacuuucccucccacaaacccucgcgcccuuccuuuccuacuugggcccggcagaaagcuuaccauggaacuaccaauuuuaaaaacaaacgcaauuacaacuauacucgcagcaguaacauuauguuucgccucaucccaaaacauaacagaagaauuuuaccaaucaacaugcagcgcaguaucaaaaggauaucucggagcauuacgaacagguugguacacaucuguaaucacuauagaacuaucaaacauaaaagaaaacaaaugcaauggaaccgacgcaaaaguaaaauuaauaaaacaagaacucgauaaauacaaaaaugcaguaacagaccuccaaaugcucauguguucaacaccagccgcaggaucagguuccgccauagcaucuggcauagcaguaugcaaaguacuccacuuagaaggagaaguuaacaaaauaaaaaacgcacuauuaucaacaaacaaagcaguaguaucccucucaaacggagucucaguauuaacauucaaaguauuagaccuaaaaaacuacauagacaaacaacuacuuccaauacucaacaaacaaucaugcucaauaccaaacccagaaaccguaauggaauuucaacaaaaaaacaaccgacuacuagaaaucacacgagaauuuucaguaaacgccggugucacaacuccaguaucaacuuauauguuaaccaacucagaacuauuaucauuaauaaacgauaugcccauaacuaacgaccaaaaaaaauuaaugucaaacaacguacaaauaguacgccaacaaaguuacucaauaaugugcaucauaaaagaagaaguauuagcguacguuguacaacuaccucuauacggagucauagacacaccaugcuggaaacuucacacaucaccacuauguacaacaaacacaaaagaaggcaguaacauaugccuaacaagaacagaccguggaugguauugugacaacgcuggaucuguaucauucuucccucaagcagaaaccuguaaaguuugcucaaacagagucuucugugacacaaugaacucucuaacacuaccuuccgaagugaaccucuguaacauagacauauucaauccaaaauaugauugcaaaauaaugacuucaaaaacagauguaucauccucuguuauaacaucauuaggcgccauaguuucaugcuacggaaaaacuaaaugcacagcaucaaacaaaaacaaaggaauaauaaaaaccuucucaaauggaugcgacuacguaagcaacaaaggcguagacacaguaucaguagguaauacauuauacuacguaaacaaacaagaaggacaaucacuuuauguuaaaggagaaccuauaauaaacuucuacgacccacuuguauuuccauccgaugaauuugacgcaucuauaucacaagucaacgaaaaaauaaaccaaucauuagcauucauucgaaaauccgaugaacuacuccauaacguaaaugucggaaaaucaacaaccaacauaaugaucacaacaauaaucauagugauaauaguaauacuccuacuacuaaucgcaguaggucuauuccuauauuguaaagcaagaucuacuccaguuacacucucuaaagaccaauuaagcgguaucaacaacaucgccuucagcaauuaaggacuaguaauaaggaaacuguaugaaugucugugggcaggaagugaagagauccuucuguaaagguuuuuggaauuaugucugcugaauaauaaacuuuuuugaaauaauaaaucugguagaaaaaugagaucuaaaaaaaaaaaaaaaaaaaaaaaaaaaaaaaaaaaaaaaaaaaaaaaaaaaaaaaaaaaaaaaaugcaucccccccccccccccccccccccccccccccaaaggcucuuuucagagccaccagaauu

SEQ ID NO: 17926 - RNA, 1970 nt, Artificial Sequence
  mRNA product Design g-5 comprising derived and/or modified sequence from HRSV(Memphis-37)__AIY60640.1__F_DSCav1_mut6 (opt11)
gggagacccgugacccggaaguuguacggcuacgcgacuuucccucccacaaacccucgcgcccuuccuuuccuacuugggcccggcagaaagcuuaccauggagcugcccauccucaagaccaacgccaucaccacgauccuggccgcggugacccugugcuucgcgagcucccaaaacaucaccgaggaguucuaccagagcacgugcuccgccgucagcaagggcuaccucggggcccugcgcaccggcugguacaccuccgugaucaccaucgagcugagcaacaucaaggaaaacaagugcaacgggacggacgcaaaggugaagcucaucaagcaggagcuggauaaguacaagaacgcggucacggaccugcagaugcucaugugcuccaccccggccgccggcagcggguccgccaucgcguccggcaucgccgugugcaagguguugcaccuggagggcgaggucaacaagaucaagaacgcccuccuuuccaccaauaaggcuguugugagccuguccaacggggucagcgugcucaccuucaaggugcuggaccugaagaacuacaucgacaagcagcuccugcccauccugaacaagcaguccugcagcauccccaaccccgagacagucauggaguuccagcagaagaacaaccggcuccuggagaucacccgcgaguucuccguuaacgccggggugaccaccccgguaagcacauacaugcugaccaacagcgagcuccugagccugaucaacgacaugcccaucaccaacgaccagaagaagcucaugagcaacaacgugcagaucgugcggcagcaguccuacagcaucaugugcaucaucaaggaggagguccuggcguacguggugcaacugccccucuacggggucaucgacacccccugcuggaagcugcacacguccccgcugugcaccaccaacaccaaggagggcagcaacaucugccucacgcgcaccgaccgggggugguacugcgacaacgcaggcuccgugagcuucuucccccaggccgagaccugcaaggugugcuccaaccgcgucuucugcgacaccaugaacagccugacgcugcccuccgaggugaaccucugcaacaucgacaucuucaaccccaaguacgacuguaagaucaugaccagcaagaccgaugucuccagcuccgugaucaccagccugggcgccauaguguccuguuaugggaagacgaagugcaccgccagcaacaagaacaaaggcaucaucaagaccuucuccaacgggugcgacuacgucagcaacaagggcguggacacaguguccgucggcaacacgcuguacuacgugaacaagcaggaggggcagagccucuacgugaagggcgagccgaucaucaacuucuacgauccccuggucuuccccagcgacgaguucgacgcguccaucagccaagugaacgagaagaucaaccagucccuggccuucauccgcaagagcgacgagcuccugcacaacgugaacgucgggaaguccaccaccaacaucaugaucaccaccaucaucaucgugaucaucgucauccugcuccugcugaucgccgucggccucuuccuguacugcaaggcccggagcacgcccgugacccuguccaaggaccagcugucgggcaucaacaacaucgccuucuccaacugaggacuaguaauaaggaaacuguaugaaugucugugggcaggaagugaagagauccuucuguaaagguuuuuggaauuaugucugcugaauaauaaacuuuuuugaaauaauaaaucugguagaaaaaugagaucuaaaaaaaaaaaaaaaaaaaaaaaaaaaaaaaaaaaaaaaaaaaaaaaaaaaaaaaaaaaaaaaaugcaucccccccccccccccccccccccccccccccaaaggcucuuuucagagccaccagaauu

SEQ ID NO: 17927 - RNA, 1986 nt, Artificial Sequence
  mRNA product Design h-1 comprising derived and/or modified sequence from HRSV(Memphis-37)__AIY60640.1__F_DSCav1_mut6 (opt1)
gggagacccgugacccggaaguuguacggcuacgcgacuuucccucccacaaacccucgcgcccuuccuuuccuacuugggcccggcagaaagcuuaccauggagcugcccauccucaagaccaacgccaucaccacgauccuggccgcggugacccugugcuucgccagcucccagaacaucaccgaggaguucuaccagagcacgugcuccgccgucagcaagggcuaccucggcgcccugcgcaccgggugguacaccagcgugaucaccaucgagcuguccaacaucaaggagaacaagugcaacggcaccgacgccaaggugaagcucaucaagcaggagcuggacaaguacaagaacgcggucacggaccugcagaugcugaugugcagcaccccggccgccggcuccgggagcgcgaucgccuccggcaucgccgucugcaaggugcugcaccucgagggcgaggugaacaagaucaagaacgcccugcuguccaccaacaaggccgucgugagccucuccaacggggugagcguccugaccuucaaggugcuggaccucaagaacuacaucgacaagcagcugcugcccauccugaacaagcagagcugcuccauccccaaccccgagaccgucauggaguuccagcagaagaacaaccgccuccuggagaucacgcgggaguucagcgugaacgcgggcgugaccacccccgucuccaccuacaugcugacgaacagcgagcuccugucccugaucaacgacaugccgaucaccaacgaccagaagaagcucaugagcaacaacgugcagaucgugcgccagcaguccuacagcaucaugugcaucaucaaggaggagguccuggccuacguggugcagcugccccucuacggggucaucgacacccccugcuggaagcugcacaccagcccccugugcacgaccaacaccaaggagggcuccaacaucugccucacccggacggaccgcgggugguacugcgacaacgccggcagcguguccuucuucccgcaggccgagaccugcaaggucugcagcaaccggguguucugcgacaccaugaacucccugacccugcccagcgaggugaaccucugcaacaucgacaucuucaaccccaaguacgacugcaagaucaugacguccaagaccgacgucagcuccagcgugaucaccucccugggcgccaucgugagcugcuacgggaagaccaagugcacggcgagcaacaagaacaagggcaucaucaagaccuucuccaacgggugcgacuacgucagcaacaagggcguggacaccguguccgucggcaacacccuguacuacgugaacaagcaggagggccagagccucuacgugaagggggagcccaucaucaacuucuacgacccgcuggucuuccccuccgacgaguucgacgccagcaucucccaggugaacgagaagaucaaccagagccuggccuucauccggaaguccgacgagcuccugcacaacgugaacgucggcaagagcaccacgaacaucaugaucaccaccaucaucaucgugaucaucgugauccugcugcuccugaucgccgucgggcuguuccucuacugcaaggcccgcuccacccccgugacgcugagcaaggaccagcuguccgggaucaacaacaucgcguucagcaacugaggacuaguacuggcugcaucucccuuuccucuguccuccauccuucucccaggauggugaagggggaccugguacccagugauccccaccccaggauccuaaaucaugacuuaccugcuaauaaaaacucauuggaaaagugagaagaucuaaaaaaaaaaaaaaaaaaaaaaaaaaaaaaaaaaaaaaaaaaaaaaaaaaaaaaaaaaaaaaaaugcaucccccccccccccccccccccccccccccccaaaggcucuuuucagagccaccagaauu

SEQ ID NO: 17928 - RNA, 1986 nt, Artificial Sequence
  mRNA product Design h-1 comprising derived and/or modified sequence from HRSV(Memphis-37)__AIY60640.1__F_DSCav1_mut6 (opt1)
gggagacccgugacccggaaguuguacggcuacgcgacuuucccucccacaaacccucgcgcccuuccuuuccuacuugggcccggcagaaagcuuaccauggagcugcccauccucaagaccaacgccaucaccacgauccuggccgcggugacccugugcuucgccagcucccagaacaucaccgaggaguucuaccagagcacgugcuccgccgucagcaagggcuaccucggggcccugcgcaccggcugguacaccuccgugaucaccaucgagcugagcaacaucaaggagaacaagugcaacgggaccgacgccaaggugaagcucaucaagcaggagcuggacaaguacaagaacgcggucacggaccugcagaugcucaugugcuccaccccggccgccggcagcggguccgccaucgcgagcggcaucgccgugugcaaggugcugcaccuggagggcgaggucaacaagaucaagaacgcccuccuguccaccaacaaggccguggugagccuguccaacggggucagcgugcucaccuucaaggugcuggaccugaagaacuacaucgacaagcagcuccugcccauccugaacaagcaguccugcagcauccccaaccccgagacggucauggaguuccagcagaagaacaaccggcuccuggagaucacccgcgaguucuccgugaacgccggcgugaccaccccggucagcacguacaugcugaccaacuccgagcuccugagccugaucaacgacaugcccaucaccaacgaccagaagaagcucaugagcaacaacgugcagaucgugcggcagcaguccuacagcaucaugugcaucaucaaggaggagguccuggcguacguggugcagcugccccucuacggggucaucgacacccccugcuggaagcugcacacguccccgcugugcaccaccaacaccaaggagggcagcaacaucugccucacgcgcaccgaccgggggugguacugcgacaacgccggcuccgugagcuucuucccccaggccgagaccugcaaggugugcuccaaccgcgucuucugcgacaccaugaacagccugacgcugcccuccgaggugaaccucugcaacaucgacaucuucaaccccaaguacgacugcaagaucaugaccagcaagaccgacgucuccagcuccgugaucaccagccugggcgccaucguguccugcuacgggaagacgaagugcaccgccagcaacaagaacaagggcaucaucaagaccuucuccaacgggugcgacuacgucagcaacaagggcguggacaccguguccgucggcaacacgcuguacuacgugaacaagcaggaggggcagagccucuacgugaagggcgagccgaucaucaacuucuacgacccccuggucuuccccagcgacgaguucgacgcguccaucagccaggugaacgagaagaucaaccagucccuggccuucauccgcaagagcgacgagcuccugcacaacgugaacgucgggaaguccaccaccaacaucaugaucaccaccaucaucaucgugaucaucgugauccugcuccugcugaucgccgucggccucuuccuguacugcaaggcccggagcacgcccgugacccuguccaaggaccagcugagcgggaucaacaacaucgccuucuccaacugaggacuaguacuggcugcaucucccuuuccucuguccuccauccuucucccaggauggugaagggggaccugguacccagugauccccaccccaggauccuaaaucaugacuuaccugcuaauaaaaacucauuggaaaagugagaagaucuaaaaaaaaaaaaaaaaaaaaaaaaaaaaaaaaaaaaaaaaaaaaaaaaaaaaaaaaaaaaaaaaugcaucccccccccccccccccccccccccccccccaaaggcucuuuucagagccaccagaauu

SEQ ID NO: 17929 - RNA, 1986 nt, Artificial Sequence
  mRNA product Design h-1 comprising derived and/or modified sequence from HRSV(Memphis-37)__AIY60640.1__F_DSCav1_mut6 (opt2)
gggagacccgugacccggaaguuguacggcuacgcgacuuucccucccacaaacccucgcgcccuuccuuuccuacuugggcccggcagaaagcuuaccauggagcuccccauccucaagaccaacgccaucaccaccauccucgccgccgucacccucugcuucgccuccucccagaacaucaccgaggaguucuaccaguccaccugcuccgccgucuccaagggcuaccucggcgcccuccgcaccggcugguacaccuccgucaucaccaucgagcucuccaacaucaaggagaacaagugcaacggcaccgacgccaaggucaagcucaucaagcaggagcucgacaaguacaagaacgccgucaccgaccuccagaugcucaugugcuccacccccgccgccggcuccggcuccgccaucgccuccggcaucgccgucugcaagguccuccaccucgagggcgaggucaacaagaucaagaacgcccuccucuccaccaacaaggccgucgucucccucuccaacggcgucuccguccucaccuucaagguccucgaccucaagaacuacaucgacaagcagcuccuccccauccucaacaagcaguccugcuccauccccaaccccgagaccgucauggaguuccagcagaagaacaaccgccuccucgagaucacccgcgaguucuccgucaacgccggcgucaccacccccgucuccaccuacaugcucaccaacuccgagcuccucucccucaucaacgacaugcccaucaccaacgaccagaagaagcucauguccaacaacguccagaucguccgccagcaguccuacuccaucaugugcaucaucaaggaggagguccucgccuacgucguccagcucccccucuacggcgucaucgacacccccugcuggaagcuccacaccuccccccucugcaccaccaacaccaaggagggcuccaacaucugccucacccgcaccgaccgcggcugguacugcgacaacgccggcuccgucuccuucuucccccaggccgagaccugcaaggucugcuccaaccgcgucuucugcgacaccaugaacucccucacccuccccuccgaggucaaccucugcaacaucgacaucuucaaccccaaguacgacugcaagaucaugaccuccaagaccgacgucuccuccuccgucaucaccucccucggcgccaucgucuccugcuacggcaagaccaagugcaccgccuccaacaagaacaagggcaucaucaagaccuucuccaacggcugcgacuacgucuccaacaagggcgucgacaccgucuccgucggcaacacccucuacuacgucaacaagcaggagggccagucccucuacgucaagggcgagcccaucaucaacuucuacgacccccucgucuuccccuccgacgaguucgacgccuccaucucccaggucaacgagaagaucaaccagucccucgccuucauccgcaaguccgacgagcuccuccacaacgucaacgucggcaaguccaccaccaacaucaugaucaccaccaucaucaucgucaucaucgucauccuccuccuccucaucgccgucggccucuuccucuacugcaaggcccgcuccacccccgucacccucuccaaggaccagcucuccggcaucaacaacaucgccuucuccaacugaggacuaguacuggcugcaucucccuuuccucuguccuccauccuucucccaggauggugaagggggaccugguacccagugauccccaccccaggauccuaaaucaugacuuaccugcuaauaaaaacucauuggaaaagugagaagaucuaaaaaaaaaaaaaaaaaaaaaaaaaaaaaaaaaaaaaaaaaaaaaaaaaaaaaaaaaaaaaaaaugcaucccccccccccccccccccccccccccccccaaaggcucuuuucagagccaccagaauu

SEQ ID NO: 17930 - RNA, 1986 nt, Artificial Sequence
  mRNA product Design h-1 comprising derived and/or modified sequence from HRSV(Memphis-37)__AIY60640.1__F_DSCav1_mut6 (opt3)
gggagacccgugacccggaaguuguacggcuacgcgacuuucccucccacaaacccucgcgcccuuccuuuccuacuugggcccggcagaaagcuuaccauggagcugcccauccucaagaccaacgccauuacaacuauacuugcugcagugacgcugugcuucgccagcucccagaauaucaccgaagaguuuuaccaaucuacauguucagcggucaguaaaggcuauuugggggcuuuaagaacuggaugguacaccagcguuauuacaaucgaacuguccaacauuaaggagaauaaaugcaacgguaccgacgccaaggugaaacuaaucaagcaggaacucgauaaguauaaaaaugcaguaacugaccugcagaugcuuauguguucuacuccugccgcuggcucggggucagcaauagccagcggaaucgcugugugcaagguccugcacuuggagggcgaggugaacaaaauuaagaaugcccuccugaguaccaacaaagcgguugugucccugucuaauggugucagcgugcucacguucaagguauuagaucugaagaacuacaucgacaaacagcuuuugccaauucugaauaagcaauccuguucaaucccgaaccccgaaacuguuauggaguuucagcagaaaaauaacaggcuacucgaaauaacccgggaguucagugugaaugcaggggucacaacuccugugagcaccuauaugcugacaaacucugagcuucuguccuugauuaacgauaugccaaucaccaaugaccagaagaaacucaugucaaacaaugugcaaauuguccgccagcagagcuacaguaucaugugcaucauuaaggaagagguucuggccuaugugguacaguuaccccuguacggagugauagauacgccuuguuggaaacuccauacuucuccacuuugcacaaccaacacuaaggaaggcuccaauaucugucugacacgaaccgaccguggcugguacugcgauaacgcugggagcgucucguuuuucccccaagccgagacguguaaggugugcucuaauagaguuuucugcgacaccaugaacuccuugacacuaccuucagaagugaaucuguguaacauugauaucuucaauccaaaauaugacugcaagauaaugacaaguaaaaccgaugucagcuccucugugauuacaagccucggagcaaucguaucauguuacgguaagacuaaaugcaccgcuaguaacaagaauaagggcaucauuaaaacauuuuccaacgggugugacuauguuagcaauaagggaguggacaccgucucugugggcaacacucuguacuaugucaacaaacaggagggucagucacuuuacgugaagggggagccgaucauuaauuucuaugauccccugguuuuuccuagugacgaauuugaugccagcauaucccaagugaacgagaaaaucaaucagucuuuggcguuuauuaggaagucggacgaacuccugcacaacguaaaugucggaaagagcacgacaaacaucaugaucaccacuauuauaaucgugauuaucguuauuuuacugcuacucaucgccgugggccuguuccuuuacugcaaagcacgguccaccccagucacauugucaaaggaucagcugaguggcauaaauaacaucgcuuucucuaauugaggacuaguacuggcugcaucucccuuuccucuguccuccauccuucucccaggauggugaagggggaccugguacccagugauccccaccccaggauccuaaaucaugacuuaccugcuaauaaaaacucauuggaaaagugagaagaucuaaaaaaaaaaaaaaaaaaaaaaaaaaaaaaaaaaaaaaaaaaaaaaaaaaaaaaaaaaaaaaaaugcaucccccccccccccccccccccccccccccccaaaggcucuuuucagagccaccagaauu

SEQ ID NO: 17931 - RNA, 1986 nt, Artificial Sequence
  mRNA product Design h-1 comprising derived and/or modified sequence from HRSV(Memphis-37)__AIY60640.1__F_DSCav1_mut6 (opt4)
gggagacccgugacccggaaguuguacggcuacgcgacuuucccucccacaaacccucgcgcccuuccuuuccuacuugggcccggcagaaagcuuaccauggagcugcccauccugaagaccaacgccaucaccaccauccuggccgccgugacccugugcuucgccagcagccagaacaucaccgaggaguucuaccagagcaccugcagcgccgugagcaagggcuaccugggcgcccugagaaccggcugguacaccagcgugaucaccaucgagcugagcaacaucaaggagaacaagugcaacggcaccgacgccaaggugaagcugaucaagcaggagcuggacaaguacaagaacgccgugaccgaccugcagaugcugaugugcagcacccccgccgccggcagcggcagcgccaucgccagcggcaucgccgugugcaaggugcugcaccuggagggcgaggugaacaagaucaagaacgcccugcugagcaccaacaaggccguggugagccugagcaacggcgugagcgugcugaccuucaaggugcuggaccugaagaacuacaucgacaagcagcugcugcccauccugaacaagcagagcugcagcauccccaaccccgagaccgugauggaguuccagcagaagaacaacagacugcuggagaucaccagagaguucagcgugaacgccggcgugaccacccccgugagcaccuacaugcugaccaacagcgagcugcugagccugaucaacgacaugcccaucaccaacgaccagaagaagcugaugagcaacaacgugcagaucgugagacagcagagcuacagcaucaugugcaucaucaaggaggaggugcuggccuacguggugcagcugccccuguacggcgugaucgacacccccugcuggaagcugcacaccagcccccugugcaccaccaacaccaaggagggcagcaacaucugccugaccagaaccgacagaggcugguacugcgacaacgccggcagcgugagcuucuucccccaggccgagaccugcaaggugugcagcaacagaguguucugcgacaccaugaacagccugacccugcccagcgaggugaaccugugcaacaucgacaucuucaaccccaaguacgacugcaagaucaugaccagcaagaccgacgugagcagcagcgugaucaccagccugggcgccaucgugagcugcuacggcaagaccaagugcaccgccagcaacaagaacaagggcaucaucaagaccuucagcaacggcugcgacuacgugagcaacaagggcguggacaccgugagcgugggcaacacccuguacuacgugaacaagcaggagggccagagccuguacgugaagggcgagcccaucaucaacuucuacgacccccugguguuccccagcgacgaguucgacgccagcaucagccaggugaacgagaagaucaaccagagccuggccuucaucagaaagagcgacgagcugcugcacaacgugaacgugggcaagagcaccaccaacaucaugaucaccaccaucaucaucgugaucaucgugauccugcugcugcugaucgccgugggccuguuccuguacugcaaggccagaagcacccccgugacccugagcaaggaccagcugagcggcaucaacaacaucgccuucagcaacugaggacuaguacuggcugcaucucccuuuccucuguccuccauccuucucccaggauggugaagggggaccugguacccagugauccccaccccaggauccuaaaucaugacuuaccugcuaauaaaaacucauuggaaaagugagaagaucuaaaaaaaaaaaaaaaaaaaaaaaaaaaaaaaaaaaaaaaaaaaaaaaaaaaaaaaaaaaaaaaaugcaucccccccccccccccccccccccccccccccaaaggcucuuuucagagccaccagaauu

SEQ ID NO: 17932 - RNA, 1986 nt, Artificial Sequence
  mRNA product Design h-1 comprising derived and/or modified sequence from HRSV(Memphis-37)__AIY60640.1__F_DSCav1_mut6 (opt5)
gggagacccgugacccggaaguuguacggcuacgcgacuuucccucccacaaacccucgcgcccuuccuuuccuacuugggcccggcagaaagcuuaccauggagcugcccauccucaagaccaacgccauuacaacgauccuggcugccgugacccuuugcuucgcgagcucccagaauauuacagaagaguuuuaccaaucuaccuguagcgcugucuccaaaggcuaucugggggcccucagaacaggaugguacaccucuguuaucacaauugaacugagcaacaucaaggagaauaaaugcaacggcaccgacgccaaggugaaacuuaucaagcaggaacuggauaaguauaaaaaugcugugacggaccuccagaugcugauguguuccaccccugccgcugggucuggaagcgccauugcguccggcaucgccgucugcaaggugcugcaccucgagggggagguuaacaaaauuaagaaugcucugcuuagcacaaacaaagccguggucucucuguccaauggagugagcguucucaccuucaaggugcuggaucuuaagaacuacaucgacaaacagcugcucccgauucugaauaagcaaucuuguuccauccccaacccugaaacagucauggaguuucagcagaaaaauaaccggcugcucgaaauuacccgcgaguucagcgugaaugcuggcgugacgacacccgucucuaccuauaugcugacaaacuccgagcuucugagccucaucaacgauaugccuaucaccaaugaccagaagaaacugauguccaacaauguucaaauugugagacagcagucuuacagcaucaugugcauuaucaaggaagaggugcuugccuaugucgugcagcugccccucuacggcguuauugauaccccuuguuggaaacugcauacauccccgcugugcacgaccaacacaaaggaagggagcaauaucugucucacccggacagaccgcggaugguacugcgauaacgcgggcucuguguccuuuuucccccaagccgagaccuguaaggucugcagcaauagaguguuuugcgacacgaugaacucucugacacuuccuagcgaaguuaaucuguguaacaucgauauuuucaaucccaaauaugacugcaagaucaugaccuccaaaaccgaugugucuagcuccgucauuacaagccucggggcuaucgugucuuguuacggaaagaccaaaugcacagccuccaacaagaauaagggcauuaucaaaacguuuagcaacgggugugacuaugucucuaauaagggaguggacaccguuuccgugggcaacacacuguacuaugucaacaaacaggagggccagagccuuuacgugaagggggagccuaucauuaauuucuaugauccccugguuuuuccguccgacgaauuugaugcuucuaucagccaagugaacgagaaaauuaaucagucccucgccuucauccggaagucugacgaacugcugcacaacgucaaugugggaaagagcaccacaaacauuaugaucaccacgauuaucaucgugauuaucguuauucuccugcuucugaucgccgucggccucuuccuguacugcaaagcucgcuccaccccugugacacugagcaaggaucagcuuucugggauuaauaacaucgcguucuccaauugaggacuaguacuggcugcaucucccuuuccucuguccuccauccuucucccaggauggugaagggggaccugguacccagugauccccaccccaggauccuaaaucaugacuuaccugcuaauaaaaacucauuggaaaagugagaagaucuaaaaaaaaaaaaaaaaaaaaaaaaaaaaaaaaaaaaaaaaaaaaaaaaaaaaaaaaaaaaaaaaugcaucccccccccccccccccccccccccccccccaaaggcucuuuucagagccaccagaauu

SEQ ID NO: 17933 - RNA, 1986 nt, Artificial Sequence
  mRNA product Design h-1 comprising derived and/or modified sequence from HRSV(Memphis-37)__AIY60640.1__F_DSCav1_mut6 (opt6)
gggagacccgugacccggaaguuguacggcuacgcgacuuucccucccacaaacccucgcgcccuuccuuuccuacuugggcccggcagaaagcuuaccauggaacuaccaauuuuaaaaacaaacgcaauuacaacuauacucgcagcaguaacauuauguuucgccucaucccaaaacauaacagaagaauuuuaccaaucaacaugcagcgcaguaucaaaaggauaucucggagcauuacgaacagguugguacacaucuguaaucacuauagaacuaucaaacauaaaagaaaacaaaugcaauggaaccgacgcaaaaguaaaauuaauaaaacaagaacucgauaaauacaaaaaugcaguaacagaccuccaaaugcucauguguucaacaccagccgcaggaucagguuccgccauagcaucuggcauagcaguaugcaaaguacuccacuuagaaggagaaguuaacaaaauaaaaaacgcacuauuaucaacaaacaaagcaguaguaucccucucaaacggagucucaguauuaacauucaaaguauuagaccuaaaaaacuacauagacaaacaacuacuuccaauacucaacaaacaaucaugcucaauaccaaacccagaaaccguaauggaauuucaacaaaaaaacaaccgacuacuagaaaucacacgagaauuuucaguaaacgccggugucacaacuccaguaucaacuuauauguuaaccaacucagaacuauuaucauuaauaaacgauaugcccauaacuaacgaccaaaaaaaauuaaugucaaacaacguacaaauaguacgccaacaaaguuacucaauaaugugcaucauaaaagaagaaguauuagcguacguuguacaacuaccucuauacggagucauagacacaccaugcuggaaacuucacacaucaccacuauguacaacaaacacaaaagaaggcaguaacauaugccuaacaagaacagaccguggaugguauugugacaacgcuggaucuguaucauucuucccucaagcagaaaccuguaaaguuugcucaaacagagucuucugugacacaaugaacucucuaacacuaccuuccgaagugaaccucuguaacauagacauauucaauccaaaauaugauugcaaaauaaugacuucaaaaacagauguaucauccucuguuauaacaucauuaggcgccauaguuucaugcuacggaaaaacuaaaugcacagcaucaaacaaaaacaaaggaauaauaaaaaccuucucaaauggaugcgacuacguaagcaacaaaggcguagacacaguaucaguagguaauacauuauacuacguaaacaaacaagaaggacaaucacuuuauguuaaaggagaaccuauaauaaacuucuacgacccacuuguauuuccauccgaugaauuugacgcaucuauaucacaagucaacgaaaaaauaaaccaaucauuagcauucauucgaaaauccgaugaacuacuccauaacguaaaugucggaaaaucaacaaccaacauaaugaucacaacaauaaucauagugauaauaguaauacuccuacuacuaaucgcaguaggucuauuccuauauuguaaagcaagaucuacuccaguuacacucucuaaagaccaauuaagcgguaucaacaacaucgccuucagcaauuaaggacuaguacuggcugcaucucccuuuccucuguccuccauccuucucccaggauggugaagggggaccugguacccagugauccccaccccaggauccuaaaucaugacuuaccugcuaauaaaaacucauuggaaaagugagaagaucuaaaaaaaaaaaaaaaaaaaaaaaaaaaaaaaaaaaaaaaaaaaaaaaaaaaaaaaaaaaaaaaaugcaucccccccccccccccccccccccccccccccaaaggcucuuuucagagccaccagaauu

SEQ ID NO: 17934 - RNA, 1986 nt, Artificial Sequence
  mRNA product Design h-1 comprising derived and/or modified sequence from HRSV(Memphis-37)__AIY60640.1__F_DSCav1_mut6 (opt11)
gggagacccgugacccggaaguuguacggcuacgcgacuuucccucccacaaacccucgcgcccuuccuuuccuacuugggcccggcagaaagcuuaccauggagcugcccauccucaagaccaacgccaucaccacgauccuggccgcggugacccugugcuucgcgagcucccaaaacaucaccgaggaguucuaccagagcacgugcuccgccgucagcaagggcuaccucggggcccugcgcaccggcugguacaccuccgugaucaccaucgagcugagcaacaucaaggaaaacaagugcaacgggacggacgcaaaggugaagcucaucaagcaggagcuggauaaguacaagaacgcggucacggaccugcagaugcucaugugcuccaccccggccgccggcagcggguccgccaucgcguccggcaucgccgugugcaagguguugcaccuggagggcgaggucaacaagaucaagaacgcccuccuuuccaccaauaaggcuguugugagccuguccaacggggucagcgugcucaccuucaaggugcuggaccugaagaacuacaucgacaagcagcuccugcccauccugaacaagcaguccugcagcauccccaaccccgagacagucauggaguuccagcagaagaacaaccggcuccuggagaucacccgcgaguucuccguuaacgccggggugaccaccccgguaagcacauacaugcugaccaacagcgagcuccugagccugaucaacgacaugcccaucaccaacgaccagaagaagcucaugagcaacaacgugcagaucgugcggcagcaguccuacagcaucaugugcaucaucaaggaggagguccuggcguacguggugcaacugccccucuacggggucaucgacacccccugcuggaagcugcacacguccccgcugugcaccaccaacaccaaggagggcagcaacaucugccucacgcgcaccgaccgggggugguacugcgacaacgcaggcuccgugagcuucuucccccaggccgagaccugcaaggugugcuccaaccgcgucuucugcgacaccaugaacagccugacgcugcccuccgaggugaaccucugcaacaucgacaucuucaaccccaaguacgacuguaagaucaugaccagcaagaccgaugucuccagcuccgugaucaccagccugggcgccauaguguccuguuaugggaagacgaagugcaccgccagcaacaagaacaaaggcaucaucaagaccuucuccaacgggugcgacuacgucagcaacaagggcguggacacaguguccgucggcaacacgcuguacuacgugaacaagcaggaggggcagagccucuacgugaagggcgagccgaucaucaacuucuacgauccccuggucuuccccagcgacgaguucgacgcguccaucagccaagugaacgagaagaucaaccagucccuggccuucauccgcaagagcgacgagcuccugcacaacgugaacgucgggaaguccaccaccaacaucaugaucaccaccaucaucaucgugaucaucgucauccugcuccugcugaucgccgucggccucuuccuguacugcaaggcccggagcacgcccgugacccuguccaaggaccagcugucgggcaucaacaacaucgccuucuccaacugaggacuaguacuggcugcaucucccuuuccucuguccuccauccuucucccaggauggugaagggggaccugguacccagugauccccaccccaggauccuaaaucaugacuuaccugcuaauaaaaacucauuggaaaagugagaagaucuaaaaaaaaaaaaaaaaaaaaaaaaaaaaaaaaaaaaaaaaaaaaaaaaaaaaaaaaaaaaaaaaugcaucccccccccccccccccccccccccccccccaaaggcucuuuucagagccaccagaauu

SEQ ID NO: 17935 - RNA, 2202 nt, Artificial Sequence
  mRNA product Design h-2 comprising derived and/or modified sequence from HRSV(Memphis-37)__AIY60640.1__F_DSCav1_mut6 (opt1)
gggagacccgugacccggaaguuguacggcuacgcgacuuucccucccacaaacccucgcgcccuuccuuuccuacuugggcccggcagaaagcuuaccauggagcugcccauccucaagaccaacgccaucaccacgauccuggccgcggugacccugugcuucgccagcucccagaacaucaccgaggaguucuaccagagcacgugcuccgccgucagcaagggcuaccucggcgcccugcgcaccgggugguacaccagcgugaucaccaucgagcuguccaacaucaaggagaacaagugcaacggcaccgacgccaaggugaagcucaucaagcaggagcuggacaaguacaagaacgcggucacggaccugcagaugcugaugugcagcaccccggccgccggcuccgggagcgcgaucgccuccggcaucgccgucugcaaggugcugcaccucgagggcgaggugaacaagaucaagaacgcccugcuguccaccaacaaggccgucgugagccucuccaacggggugagcguccugaccuucaaggugcuggaccucaagaacuacaucgacaagcagcugcugcccauccugaacaagcagagcugcuccauccccaaccccgagaccgucauggaguuccagcagaagaacaaccgccuccuggagaucacgcgggaguucagcgugaacgcgggcgugaccacccccgucuccaccuacaugcugacgaacagcgagcuccugucccugaucaacgacaugccgaucaccaacgaccagaagaagcucaugagcaacaacgugcagaucgugcgccagcaguccuacagcaucaugugcaucaucaaggaggagguccuggccuacguggugcagcugccccucuacggggucaucgacacccccugcuggaagcugcacaccagcccccugugcacgaccaacaccaaggagggcuccaacaucugccucacccggacggaccgcgggugguacugcgacaacgccggcagcguguccuucuucccgcaggccgagaccugcaaggucugcagcaaccggguguucugcgacaccaugaacucccugacccugcccagcgaggugaaccucugcaacaucgacaucuucaaccccaaguacgacugcaagaucaugacguccaagaccgacgucagcuccagcgugaucaccucccugggcgccaucgugagcugcuacgggaagaccaagugcacggcgagcaacaagaacaagggcaucaucaagaccuucuccaacgggugcgacuacgucagcaacaagggcguggacaccguguccgucggcaacacccuguacuacgugaacaagcaggagggccagagccucuacgugaagggggagcccaucaucaacuucuacgacccgcuggucuuccccuccgacgaguucgacgccagcaucucccaggugaacgagaagaucaaccagagccuggccuucauccggaaguccgacgagcuccugcacaacgugaacgucggcaagagcaccacgaacaucaugaucaccaccaucaucaucgugaucaucgugauccugcugcuccugaucgccgucgggcuguuccucuacugcaaggcccgcuccacccccgugacgcugagcaaggaccagcuguccgggaucaacaacaucgcguucagcaacugaggacuagugaagggaacacccaaauuuaauucagccuuaagcacaauuaauuaagagugaaacguaauuguacaagcaguuggucacccaccauagggcaugaucaacaccgcaaccuuuccuuuuucccccagugauucugaaaaaccccucuucccuucagcuugcuuagauguuccaaauuuaguaagcuuaaggcggccuacagaagaaaaagaaaaaaaaggccacaaaaguucccucucacuuucaguaaauaaaauaaaagcagcaacagaaauaaagaaauaaaugaaauucaaaaugaaauaaauauuguguugugcagcauuaaaaaaucaauaaaaauuaaaaaugagcaagaucuaaaaaaaaaaaaaaaaaaaaaaaaaaaaaaaaaaaaaaaaaaaaaaaaaaaaaaaaaaaaaaaaugcaucccccccccccccccccccccccccccccccaaaggcucuuuucagagccaccagaauu

SEQ ID NO: 17936 - RNA, 2202 nt, Artificial Sequence
  mRNA product Design h-2 comprising derived and/or modified sequence from HRSV(Memphis-37)__AIY60640.1__F_DSCav1_mut6 (opt1)
gggagacccgugacccggaaguuguacggcuacgcgacuuucccucccacaaacccucgcgcccuuccuuuccuacuugggcccggcagaaagcuuaccauggagcugcccauccucaagaccaacgccaucaccacgauccuggccgcggugacccugugcuucgccagcucccagaacaucaccgaggaguucuaccagagcacgugcuccgccgucagcaagggcuaccucggggcccugcgcaccggcugguacaccuccgugaucaccaucgagcugagcaacaucaaggagaacaagugcaacgggaccgacgccaaggugaagcucaucaagcaggagcuggacaaguacaagaacgcggucacggaccugcagaugcucaugugcuccaccccggccgccggcagcggguccgccaucgcgagcggcaucgccgugugcaaggugcugcaccuggagggcgaggucaacaagaucaagaacgcccuccuguccaccaacaaggccguggugagccuguccaacggggucagcgugcucaccuucaaggugcuggaccugaagaacuacaucgacaagcagcuccugcccauccugaacaagcaguccugcagcauccccaaccccgagacggucauggaguuccagcagaagaacaaccggcuccuggagaucacccgcgaguucuccgugaacgccggcgugaccaccccggucagcacguacaugcugaccaacuccgagcuccugagccugaucaacgacaugcccaucaccaacgaccagaagaagcucaugagcaacaacgugcagaucgugcggcagcaguccuacagcaucaugugcaucaucaaggaggagguccuggcguacguggugcagcugccccucuacggggucaucgacacccccugcuggaagcugcacacguccccgcugugcaccaccaacaccaaggagggcagcaacaucugccucacgcgcaccgaccgggggugguacugcgacaacgccggcuccgugagcuucuucccccaggccgagaccugcaaggugugcuccaaccgcgucuucugcgacaccaugaacagccugacgcugcccuccgaggugaaccucugcaacaucgacaucuucaaccccaaguacgacugcaagaucaugaccagcaagaccgacgucuccagcuccgugaucaccagccugggcgccaucguguccugcuacgggaagacgaagugcaccgccagcaacaagaacaagggcaucaucaagaccuucuccaacgggugcgacuacgucagcaacaagggcguggacaccguguccgucggcaacacgcuguacuacgugaacaagcaggaggggcagagccucuacgugaagggcgagccgaucaucaacuucuacgacccccuggucuuccccagcgacgaguucgacgcguccaucagccaggugaacgagaagaucaaccagucccuggccuucauccgcaagagcgacgagcuccugcacaacgugaacgucgggaaguccaccaccaacaucaugaucaccaccaucaucaucgugaucaucgugauccugcuccugcugaucgccgucggccucuuccuguacugcaaggcccggagcacgcccgugacccuguccaaggaccagcugagcgggaucaacaacaucgccuucuccaacugaggacuagugaagggaacacccaaauuuaauucagccuuaagcacaauuaauuaagagugaaacguaauuguacaagcaguuggucacccaccauagggcaugaucaacaccgcaaccuuuccuuuuucccccagugauucugaaaaaccccucuucccuucagcuugcuuagauguuccaaauuuaguaagcuuaaggcggccuacagaagaaaaagaaaaaaaaggccacaaaaguucccucucacuuucaguaaauaaaauaaaagcagcaacagaaauaaagaaauaaaugaaauucaaaaugaaauaaauauuguguugugcagcauuaaaaaaucaauaaaaauuaaaaaugagcaagaucuaaaaaaaaaaaaaaaaaaaaaaaaaaaaaaaaaaaaaaaaaaaaaaaaaaaaaaaaaaaaaaaaugcaucccccccccccccccccccccccccccccccaaaggcucuuuucagagccaccagaauu

SEQ ID NO: 17937 - RNA, 2202 nt, Artificial Sequence
  mRNA product Design h-2 comprising derived and/or modified sequence from HRSV(Memphis-37)__AIY60640.1__F_DSCav1_mut6 (opt2)
gggagacccgugacccggaaguuguacggcuacgcgacuuucccucccacaaacccucgcgcccuuccuuuccuacuugggcccggcagaaagcuuaccauggagcuccccauccucaagaccaacgccaucaccaccauccucgccgccgucacccucugcuucgccuccucccagaacaucaccgaggaguucuaccaguccaccugcuccgccgucuccaagggcuaccucggcgcccuccgcaccggcugguacaccuccgucaucaccaucgagcucuccaacaucaaggagaacaagugcaacggcaccgacgccaaggucaagcucaucaagcaggagcucgacaaguacaagaacgccgucaccgaccuccagaugcucaugugcuccacccccgccgccggcuccggcuccgccaucgccuccggcaucgccgucugcaagguccuccaccucgagggcgaggucaacaagaucaagaacgcccuccucuccaccaacaaggccgucgucucccucuccaacggcgucuccguccucaccuucaagguccucgaccucaagaacuacaucgacaagcagcuccuccccauccucaacaagcaguccugcuccauccccaaccccgagaccgucauggaguuccagcagaagaacaaccgccuccucgagaucacccgcgaguucuccgucaacgccggcgucaccacccccgucuccaccuacaugcucaccaacuccgagcuccucucccucaucaacgacaugcccaucaccaacgaccagaagaagcucauguccaacaacguccagaucguccgccagcaguccuacuccaucaugugcaucaucaaggaggagguccucgccuacgucguccagcucccccucuacggcgucaucgacacccccugcuggaagcuccacaccuccccccucugcaccaccaacaccaaggagggcuccaacaucugccucacccgcaccgaccgcggcugguacugcgacaacgccggcuccgucuccuucuucccccaggccgagaccugcaaggucugcuccaaccgcgucuucugcgacaccaugaacucccucacccuccccuccgaggucaaccucugcaacaucgacaucuucaaccccaaguacgacugcaagaucaugaccuccaagaccgacgucuccuccuccgucaucaccucccucggcgccaucgucuccugcuacggcaagaccaagugcaccgccuccaacaagaacaagggcaucaucaagaccuucuccaacggcugcgacuacgucuccaacaagggcgucgacaccgucuccgucggcaacacccucuacuacgucaacaagcaggagggccagucccucuacgucaagggcgagcccaucaucaacuucuacgacccccucgucuuccccuccgacgaguucgacgccuccaucucccaggucaacgagaagaucaaccagucccucgccuucauccgcaaguccgacgagcuccuccacaacgucaacgucggcaaguccaccaccaacaucaugaucaccaccaucaucaucgucaucaucgucauccuccuccuccucaucgccgucggccucuuccucuacugcaaggcccgcuccacccccgucacccucuccaaggaccagcucuccggcaucaacaacaucgccuucuccaacugaggacuagugaagggaacacccaaauuuaauucagccuuaagcacaauuaauuaagagugaaacguaauuguacaagcaguuggucacccaccauagggcaugaucaacaccgcaaccuuuccuuuuucccccagugauucugaaaaaccccucuucccuucagcuugcuuagauguuccaaauuuaguaagcuuaaggcggccuacagaagaaaaagaaaaaaaaggccacaaaaguucccucucacuuucaguaaauaaaauaaaagcagcaacagaaauaaagaaauaaaugaaauucaaaaugaaauaaauauuguguugugcagcauuaaaaaaucaauaaaaauuaaaaaugagcaagaucuaaaaaaaaaaaaaaaaaaaaaaaaaaaaaaaaaaaaaaaaaaaaaaaaaaaaaaaaaaaaaaaaugcaucccccccccccccccccccccccccccccccaaaggcucuuuucagagccaccagaauu

SEQ ID NO: 17938 - RNA, 2202 nt, Artificial Sequence
  mRNA product Design h-2 comprising derived and/or modified sequence from HRSV(Memphis-37)__AIY60640.1__F_DSCav1_mut6 (opt3)
gggagacccgugacccggaaguuguacggcuacgcgacuuucccucccacaaacccucgcgcccuuccuuuccuacuugggcccggcagaaagcuuaccauggagcugcccauccucaagaccaacgccauuacaacuauacuugcugcagugacgcugugcuucgccagcucccagaauaucaccgaagaguuuuaccaaucuacauguucagcggucaguaaaggcuauuugggggcuuuaagaacuggaugguacaccagcguuauuacaaucgaacuguccaacauuaaggagaauaaaugcaacgguaccgacgccaaggugaaacuaaucaagcaggaacucgauaaguauaaaaaugcaguaacugaccugcagaugcuuauguguucuacuccugccgcuggcucggggucagcaauagccagcggaaucgcugugugcaagguccugcacuuggagggcgaggugaacaaaauuaagaaugcccuccugaguaccaacaaagcgguugugucccugucuaauggugucagcgugcucacguucaagguauuagaucugaagaacuacaucgacaaacagcuuuugccaauucugaauaagcaauccuguucaaucccgaaccccgaaacuguuauggaguuucagcagaaaaauaacaggcuacucgaaauaacccgggaguucagugugaaugcaggggucacaacuccugugagcaccuauaugcugacaaacucugagcuucuguccuugauuaacgauaugccaaucaccaaugaccagaagaaacucaugucaaacaaugugcaaauuguccgccagcagagcuacaguaucaugugcaucauuaaggaagagguucuggccuaugugguacaguuaccccuguacggagugauagauacgccuuguuggaaacuccauacuucuccacuuugcacaaccaacacuaaggaaggcuccaauaucugucugacacgaaccgaccguggcugguacugcgauaacgcugggagcgucucguuuuucccccaagccgagacguguaaggugugcucuaauagaguuuucugcgacaccaugaacuccuugacacuaccuucagaagugaaucuguguaacauugauaucuucaauccaaaauaugacugcaagauaaugacaaguaaaaccgaugucagcuccucugugauuacaagccucggagcaaucguaucauguuacgguaagacuaaaugcaccgcuaguaacaagaauaagggcaucauuaaaacauuuuccaacgggugugacuauguuagcaauaagggaguggacaccgucucugugggcaacacucuguacuaugucaacaaacaggagggucagucacuuuacgugaagggggagccgaucauuaauuucuaugauccccugguuuuuccuagugacgaauuugaugccagcauaucccaagugaacgagaaaaucaaucagucuuuggcguuuauuaggaagucggacgaacuccugcacaacguaaaugucggaaagagcacgacaaacaucaugaucaccacuauuauaaucgugauuaucguuauuuuacugcuacucaucgccgugggccuguuccuuuacugcaaagcacgguccaccccagucacauugucaaaggaucagcugaguggcauaaauaacaucgcuuucucuaauugaggacuagugaagggaacacccaaauuuaauucagccuuaagcacaauuaauuaagagugaaacguaauuguacaagcaguuggucacccaccauagggcaugaucaacaccgcaaccuuuccuuuuucccccagugauucugaaaaaccccucuucccuucagcuugcuuagauguuccaaauuuaguaagcuuaaggcggccuacagaagaaaaagaaaaaaaaggccacaaaaguucccucucacuuucaguaaauaaaauaaaagcagcaacagaaauaaagaaauaaaugaaauucaaaaugaaauaaauauuguguugugcagcauuaaaaaaucaauaaaaauuaaaaaugagcaagaucuaaaaaaaaaaaaaaaaaaaaaaaaaaaaaaaaaaaaaaaaaaaaaaaaaaaaaaaaaaaaaaaaugcaucccccccccccccccccccccccccccccccaaaggcucuuuucagagccaccagaauu

SEQ ID NO: 17939 - RNA, 2202 nt, Artificial Sequence
  mRNA product Design h-2 comprising derived and/or modified sequence from HRSV(Memphis-37)__AIY60640.1__F_DSCav1_mut6 (opt4)
gggagacccgugacccggaaguuguacggcuacgcgacuuucccucccacaaacccucgcgcccuuccuuuccuacuugggcccggcagaaagcuuaccauggagcugcccauccugaagaccaacgccaucaccaccauccuggccgccgugacccugugcuucgccagcagccagaacaucaccgaggaguucuaccagagcaccugcagcgccgugagcaagggcuaccugggcgcccugagaaccggcugguacaccagcgugaucaccaucgagcugagcaacaucaaggagaacaagugcaacggcaccgacgccaaggugaagcugaucaagcaggagcuggacaaguacaagaacgccgugaccgaccugcagaugcugaugugcagcacccccgccgccggcagcggcagcgccaucgccagcggcaucgccgugugcaaggugcugcaccuggagggcgaggugaacaagaucaagaacgcccugcugagcaccaacaaggccguggugagccugagcaacggcgugagcgugcugaccuucaaggugcuggaccugaagaacuacaucgacaagcagcugcugcccauccugaacaagcagagcugcagcauccccaaccccgagaccgugauggaguuccagcagaagaacaacagacugcuggagaucaccagagaguucagcgugaacgccggcgugaccacccccgugagcaccuacaugcugaccaacagcgagcugcugagccugaucaacgacaugcccaucaccaacgaccagaagaagcugaugagcaacaacgugcagaucgugagacagcagagcuacagcaucaugugcaucaucaaggaggaggugcuggccuacguggugcagcugccccuguacggcgugaucgacacccccugcuggaagcugcacaccagcccccugugcaccaccaacaccaaggagggcagcaacaucugccugaccagaaccgacagaggcugguacugcgacaacgccggcagcgugagcuucuucccccaggccgagaccugcaaggugugcagcaacagaguguucugcgacaccaugaacagccugacccugcccagcgaggugaaccugugcaacaucgacaucuucaaccccaaguacgacugcaagaucaugaccagcaagaccgacgugagcagcagcgugaucaccagccugggcgccaucgugagcugcuacggcaagaccaagugcaccgccagcaacaagaacaagggcaucaucaagaccuucagcaacggcugcgacuacgugagcaacaagggcguggacaccgugagcgugggcaacacccuguacuacgugaacaagcaggagggccagagccuguacgugaagggcgagcccaucaucaacuucuacgacccccugguguuccccagcgacgaguucgacgccagcaucagccaggugaacgagaagaucaaccagagccuggccuucaucagaaagagcgacgagcugcugcacaacgugaacgugggcaagagcaccaccaacaucaugaucaccaccaucaucaucgugaucaucgugauccugcugcugcugaucgccgugggccuguuccuguacugcaaggccagaagcacccccgugacccugagcaaggaccagcugagcggcaucaacaacaucgccuucagcaacugaggacuagugaagggaacacccaaauuuaauucagccuuaagcacaauuaauuaagagugaaacguaauuguacaagcaguuggucacccaccauagggcaugaucaacaccgcaaccuuuccuuuuucccccagugauucugaaaaaccccucuucccuucagcuugcuuagauguuccaaauuuaguaagcuuaaggcggccuacagaagaaaaagaaaaaaaaggccacaaaaguucccucucacuuucaguaaauaaaauaaaagcagcaacagaaauaaagaaauaaaugaaauucaaaaugaaauaaauauuguguugugcagcauuaaaaaaucaauaaaaauuaaaaaugagcaagaucuaaaaaaaaaaaaaaaaaaaaaaaaaaaaaaaaaaaaaaaaaaaaaaaaaaaaaaaaaaaaaaaaugcaucccccccccccccccccccccccccccccccaaaggcucuuuucagagccaccagaauu

SEQ ID NO: 17940 - RNA, 2202 nt, Artificial Sequence
  mRNA product Design h-2 comprising derived and/or modified sequence from HRSV(Memphis-37)__AIY60640.1__F_DSCav1_mut6 (opt5)
gggagacccgugacccggaaguuguacggcuacgcgacuuucccucccacaaacccucgcgcccuuccuuuccuacuugggcccggcagaaagcuuaccauggagcugcccauccucaagaccaacgccauuacaacgauccuggcugccgugacccuuugcuucgcgagcucccagaauauuacagaagaguuuuaccaaucuaccuguagcgcugucuccaaaggcuaucugggggcccucagaacaggaugguacaccucuguuaucacaauugaacugagcaacaucaaggagaauaaaugcaacggcaccgacgccaaggugaaacuuaucaagcaggaacuggauaaguauaaaaaugcugugacggaccuccagaugcugauguguuccaccccugccgcugggucuggaagcgccauugcguccggcaucgccgucugcaaggugcugcaccucgagggggagguuaacaaaauuaagaaugcucugcuuagcacaaacaaagccguggucucucuguccaauggagugagcguucucaccuucaaggugcuggaucuuaagaacuacaucgacaaacagcugcucccgauucugaauaagcaaucuuguuccauccccaacccugaaacagucauggaguuucagcagaaaaauaaccggcugcucgaaauuacccgcgaguucagcgugaaugcuggcgugacgacacccgucucuaccuauaugcugacaaacuccgagcuucugagccucaucaacgauaugccuaucaccaaugaccagaagaaacugauguccaacaauguucaaauugugagacagcagucuuacagcaucaugugcauuaucaaggaagaggugcuugccuaugucgugcagcugccccucuacggcguuauugauaccccuuguuggaaacugcauacauccccgcugugcacgaccaacacaaaggaagggagcaauaucugucucacccggacagaccgcggaugguacugcgauaacgcgggcucuguguccuuuuucccccaagccgagaccuguaaggucugcagcaauagaguguuuugcgacacgaugaacucucugacacuuccuagcgaaguuaaucuguguaacaucgauauuuucaaucccaaauaugacugcaagaucaugaccuccaaaaccgaugugucuagcuccgucauuacaagccucggggcuaucgugucuuguuacggaaagaccaaaugcacagccuccaacaagaauaagggcauuaucaaaacguuuagcaacgggugugacuaugucucuaauaagggaguggacaccguuuccgugggcaacacacuguacuaugucaacaaacaggagggccagagccuuuacgugaagggggagccuaucauuaauuucuaugauccccugguuuuuccguccgacgaauuugaugcuucuaucagccaagugaacgagaaaauuaaucagucccucgccuucauccggaagucugacgaacugcugcacaacgucaaugugggaaagagcaccacaaacauuaugaucaccacgauuaucaucgugauuaucguuauucuccugcuucugaucgccgucggccucuuccuguacugcaaagcucgcuccaccccugugacacugagcaaggaucagcuuucugggauuaauaacaucgcguucuccaauugaggacuagugaagggaacacccaaauuuaauucagccuuaagcacaauuaauuaagagugaaacguaauuguacaagcaguuggucacccaccauagggcaugaucaacaccgcaaccuuuccuuuuucccccagugauucugaaaaaccccucuucccuucagcuugcuuagauguuccaaauuuaguaagcuuaaggcggccuacagaagaaaaagaaaaaaaaggccacaaaaguucccucucacuuucaguaaauaaaauaaaagcagcaacagaaauaaagaaauaaaugaaauucaaaaugaaauaaauauuguguugugcagcauuaaaaaaucaauaaaaauuaaaaaugagcaagaucuaaaaaaaaaaaaaaaaaaaaaaaaaaaaaaaaaaaaaaaaaaaaaaaaaaaaaaaaaaaaaaaaugcaucccccccccccccccccccccccccccccccaaaggcucuuuucagagccaccagaauu

SEQ ID NO: 17941 - RNA, 2202 nt, Artificial Sequence
  mRNA product Design h-2 comprising derived and/or modified sequence from HRSV(Memphis-37)__AIY60640.1__F_DSCav1_mut6 (opt6)
gggagacccgugacccggaaguuguacggcuacgcgacuuucccucccacaaacccucgcgcccuuccuuuccuacuugggcccggcagaaagcuuaccauggaacuaccaauuuuaaaaacaaacgcaauuacaacuauacucgcagcaguaacauuauguuucgccucaucccaaaacauaacagaagaauuuuaccaaucaacaugcagcgcaguaucaaaaggauaucucggagcauuacgaacagguugguacacaucuguaaucacuauagaacuaucaaacauaaaagaaaacaaaugcaauggaaccgacgcaaaaguaaaauuaauaaaacaagaacucgauaaauacaaaaaugcaguaacagaccuccaaaugcucauguguucaacaccagccgcaggaucagguuccgccauagcaucuggcauagcaguaugcaaaguacuccacuuagaaggagaaguuaacaaaauaaaaaacgcacuauuaucaacaaacaaagcaguaguaucccucucaaacggagucucaguauuaacauucaaaguauuagaccuaaaaaacuacauagacaaacaacuacuuccaauacucaacaaacaaucaugcucaauaccaaacccagaaaccguaauggaauuucaacaaaaaaacaaccgacuacuagaaaucacacgagaauuuucaguaaacgccggugucacaacuccaguaucaacuuauauguuaaccaacucagaacuauuaucauuaauaaacgauaugcccauaacuaacgaccaaaaaaaauuaaugucaaacaacguacaaauaguacgccaacaaaguuacucaauaaugugcaucauaaaagaagaaguauuagcguacguuguacaacuaccucuauacggagucauagacacaccaugcuggaaacuucacacaucaccacuauguacaacaaacacaaaagaaggcaguaacauaugccuaacaagaacagaccguggaugguauugugacaacgcuggaucuguaucauucuucccucaagcagaaaccuguaaaguuugcucaaacagagucuucugugacacaaugaacucucuaacacuaccuuccgaagugaaccucuguaacauagacauauucaauccaaaauaugauugcaaaauaaugacuucaaaaacagauguaucauccucuguuauaacaucauuaggcgccauaguuucaugcuacggaaaaacuaaaugcacagcaucaaacaaaaacaaaggaauaauaaaaaccuucucaaauggaugcgacuacguaagcaacaaaggcguagacacaguaucaguagguaauacauuauacuacguaaacaaacaagaaggacaaucacuuuauguuaaaggagaaccuauaauaaacuucuacgacccacuuguauuuccauccgaugaauuugacgcaucuauaucacaagucaacgaaaaaauaaaccaaucauuagcauucauucgaaaauccgaugaacuacuccauaacguaaaugucggaaaaucaacaaccaacauaaugaucacaacaauaaucauagugauaauaguaauacuccuacuacuaaucgcaguaggucuauuccuauauuguaaagcaagaucuacuccaguuacacucucuaaagaccaauuaagcgguaucaacaacaucgccuucagcaauuaaggacuagugaagggaacacccaaauuuaauucagccuuaagcacaauuaauuaagagugaaacguaauuguacaagcaguuggucacccaccauagggcaugaucaacaccgcaaccuuuccuuuuucccccagugauucugaaaaaccccucuucccuucagcuugcuuagauguuccaaauuuaguaagcuuaaggcggccuacagaagaaaaagaaaaaaaaggccacaaaaguucccucucacuuucaguaaauaaaauaaaagcagcaacagaaauaaagaaauaaaugaaauucaaaaugaaauaaauauuguguugugcagcauuaaaaaaucaauaaaaauuaaaaaugagcaagaucuaaaaaaaaaaaaaaaaaaaaaaaaaaaaaaaaaaaaaaaaaaaaaaaaaaaaaaaaaaaaaaaaugcaucccccccccccccccccccccccccccccccaaaggcucuuuucagagccaccagaauu

SEQ ID NO: 17942 - RNA, 2202 nt, Artificial Sequence
  mRNA product Design h-2 comprising derived and/or modified sequence from HRSV(Memphis-37)__AIY60640.1__F_DSCav1_mut6 (opt11)
gggagacccgugacccggaaguuguacggcuacgcgacuuucccucccacaaacccucgcgcccuuccuuuccuacuugggcccggcagaaagcuuaccauggagcugcccauccucaagaccaacgccaucaccacgauccuggccgcggugacccugugcuucgcgagcucccaaaacaucaccgaggaguucuaccagagcacgugcuccgccgucagcaagggcuaccucggggcccugcgcaccggcugguacaccuccgugaucaccaucgagcugagcaacaucaaggaaaacaagugcaacgggacggacgcaaaggugaagcucaucaagcaggagcuggauaaguacaagaacgcggucacggaccugcagaugcucaugugcuccaccccggccgccggcagcggguccgccaucgcguccggcaucgccgugugcaagguguugcaccuggagggcgaggucaacaagaucaagaacgcccuccuuuccaccaauaaggcuguugugagccuguccaacggggucagcgugcucaccuucaaggugcuggaccugaagaacuacaucgacaagcagcuccugcccauccugaacaagcaguccugcagcauccccaaccccgagacagucauggaguuccagcagaagaacaaccggcuccuggagaucacccgcgaguucuccguuaacgccggggugaccaccccgguaagcacauacaugcugaccaacagcgagcuccugagccugaucaacgacaugcccaucaccaacgaccagaagaagcucaugagcaacaacgugcagaucgugcggcagcaguccuacagcaucaugugcaucaucaaggaggagguccuggcguacguggugcaacugccccucuacggggucaucgacacccccugcuggaagcugcacacguccccgcugugcaccaccaacaccaaggagggcagcaacaucugccucacgcgcaccgaccgggggugguacugcgacaacgcaggcuccgugagcuucuucccccaggccgagaccugcaaggugugcuccaaccgcgucuucugcgacaccaugaacagccugacgcugcccuccgaggugaaccucugcaacaucgacaucuucaaccccaaguacgacuguaagaucaugaccagcaagaccgaugucuccagcuccgugaucaccagccugggcgccauaguguccuguuaugggaagacgaagugcaccgccagcaacaagaacaaaggcaucaucaagaccuucuccaacgggugcgacuacgucagcaacaagggcguggacacaguguccgucggcaacacgcuguacuacgugaacaagcaggaggggcagagccucuacgugaagggcgagccgaucaucaacuucuacgauccccuggucuuccccagcgacgaguucgacgcguccaucagccaagugaacgagaagaucaaccagucccuggccuucauccgcaagagcgacgagcuccugcacaacgugaacgucgggaaguccaccaccaacaucaugaucaccaccaucaucaucgugaucaucgucauccugcuccugcugaucgccgucggccucuuccuguacugcaaggcccggagcacgcccgugacccuguccaaggaccagcugucgggcaucaacaacaucgccuucuccaacugaggacuagugaagggaacacccaaauuuaauucagccuuaagcacaauuaauuaagagugaaacguaauuguacaagcaguuggucacccaccauagggcaugaucaacaccgcaaccuuuccuuuuucccccagugauucugaaaaaccccucuucccuucagcuugcuuagauguuccaaauuuaguaagcuuaaggcggccuacagaagaaaaagaaaaaaaaggccacaaaaguucccucucacuuucaguaaauaaaauaaaagcagcaacagaaauaaagaaauaaaugaaauucaaaaugaaauaaauauuguguugugcagcauuaaaaaaucaauaaaaauuaaaaaugagcaagaucuaaaaaaaaaaaaaaaaaaaaaaaaaaaaaaaaaaaaaaaaaaaaaaaaaaaaaaaaaaaaaaaaugcaucccccccccccccccccccccccccccccccaaaggcucuuuucagagccaccagaauu

SEQ ID NO: 17943 - RNA, 1982 nt, Artificial Sequence
  mRNA product Design h-3 comprising derived and/or modified sequence from HRSV(Memphis-37)__AIY60640.1__F_DSCav1_mut6 (opt1)
gggagacccgugacccggaaguuguacggcuacgcgacuuucccucccacaaacccucgcgcccuuccuuuccuacuugggcccggcagaaagcuuaccauggagcugcccauccucaagaccaacgccaucaccacgauccuggccgcggugacccugugcuucgccagcucccagaacaucaccgaggaguucuaccagagcacgugcuccgccgucagcaagggcuaccucggcgcccugcgcaccgggugguacaccagcgugaucaccaucgagcuguccaacaucaaggagaacaagugcaacggcaccgacgccaaggugaagcucaucaagcaggagcuggacaaguacaagaacgcggucacggaccugcagaugcugaugugcagcaccccggccgccggcuccgggagcgcgaucgccuccggcaucgccgucugcaaggugcugcaccucgagggcgaggugaacaagaucaagaacgcccugcuguccaccaacaaggccgucgugagccucuccaacggggugagcguccugaccuucaaggugcuggaccucaagaacuacaucgacaagcagcugcugcccauccugaacaagcagagcugcuccauccccaaccccgagaccgucauggaguuccagcagaagaacaaccgccuccuggagaucacgcgggaguucagcgugaacgcgggcgugaccacccccgucuccaccuacaugcugacgaacagcgagcuccugucccugaucaacgacaugccgaucaccaacgaccagaagaagcucaugagcaacaacgugcagaucgugcgccagcaguccuacagcaucaugugcaucaucaaggaggagguccuggccuacguggugcagcugccccucuacggggucaucgacacccccugcuggaagcugcacaccagcccccugugcacgaccaacaccaaggagggcuccaacaucugccucacccggacggaccgcgggugguacugcgacaacgccggcagcguguccuucuucccgcaggccgagaccugcaaggucugcagcaaccggguguucugcgacaccaugaacucccugacccugcccagcgaggugaaccucugcaacaucgacaucuucaaccccaaguacgacugcaagaucaugacguccaagaccgacgucagcuccagcgugaucaccucccugggcgccaucgugagcugcuacgggaagaccaagugcacggcgagcaacaagaacaagggcaucaucaagaccuucuccaacgggugcgacuacgucagcaacaagggcguggacaccguguccgucggcaacacccuguacuacgugaacaagcaggagggccagagccucuacgugaagggggagcccaucaucaacuucuacgacccgcuggucuuccccuccgacgaguucgacgccagcaucucccaggugaacgagaagaucaaccagagccuggccuucauccggaaguccgacgagcuccugcacaacgugaacgucggcaagagcaccacgaacaucaugaucaccaccaucaucaucgugaucaucgugauccugcugcuccugaucgccgucgggcuguuccucuacugcaaggcccgcuccacccccgugacgcugagcaaggaccagcuguccgggaucaacaacaucgcguucagcaacugaggacuaguggaagcauuuuccuggcugauuaaaagaaauuacucagcuauggucaucuguuccuguuagaaggcuaugcagcauauuauauacuaugcgcauguuaugaaaugcauaauaaaaaauuuuaaaaaaucuaaaagaucuaaaaaaaaaaaaaaaaaaaaaaaaaaaaaaaaaaaaaaaaaaaaaaaaaaaaaaaaaaaaaaaaugcaucccccccccccccccccccccccccccccccaaaggcucuuuucagagccaccagaauu

SEQ ID NO: 17944 - RNA, 1982 nt, Artificial Sequence
  mRNA product Design h-3 comprising derived and/or modified sequence from HRSV(Memphis-37)__AIY60640.1__F_DSCav1_mut6 (opt1)
gggagacccgugacccggaaguuguacggcuacgcgacuuucccucccacaaacccucgcgcccuuccuuuccuacuugggcccggcagaaagcuuaccauggagcugcccauccucaagaccaacgccaucaccacgauccuggccgcggugacccugugcuucgccagcucccagaacaucaccgaggaguucuaccagagcacgugcuccgccgucagcaagggcuaccucggggcccugcgcaccggcugguacaccuccgugaucaccaucgagcugagcaacaucaaggagaacaagugcaacgggaccgacgccaaggugaagcucaucaagcaggagcuggacaaguacaagaacgcggucacggaccugcagaugcucaugugcuccaccccggccgccggcagcggguccgccaucgcgagcggcaucgccgugugcaaggugcugcaccuggagggcgaggucaacaagaucaagaacgcccuccuguccaccaacaaggccguggugagccuguccaacggggucagcgugcucaccuucaaggugcuggaccugaagaacuacaucgacaagcagcuccugcccauccugaacaagcaguccugcagcauccccaaccccgagacggucauggaguuccagcagaagaacaaccggcuccuggagaucacccgcgaguucuccgugaacgccggcgugaccaccccggucagcacguacaugcugaccaacuccgagcuccugagccugaucaacgacaugcccaucaccaacgaccagaagaagcucaugagcaacaacgugcagaucgugcggcagcaguccuacagcaucaugugcaucaucaaggaggagguccuggcguacguggugcagcugccccucuacggggucaucgacacccccugcuggaagcugcacacguccccgcugugcaccaccaacaccaaggagggcagcaacaucugccucacgcgcaccgaccgggggugguacugcgacaacgccggcuccgugagcuucuucccccaggccgagaccugcaaggugugcuccaaccgcgucuucugcgacaccaugaacagccugacgcugcccuccgaggugaaccucugcaacaucgacaucuucaaccccaaguacgacugcaagaucaugaccagcaagaccgacgucuccagcuccgugaucaccagccugggcgccaucguguccugcuacgggaagacgaagugcaccgccagcaacaagaacaagggcaucaucaagaccuucuccaacgggugcgacuacgucagcaacaagggcguggacaccguguccgucggcaacacgcuguacuacgugaacaagcaggaggggcagagccucuacgugaagggcgagccgaucaucaacuucuacgacccccuggucuuccccagcgacgaguucgacgcguccaucagccaggugaacgagaagaucaaccagucccuggccuucauccgcaagagcgacgagcuccugcacaacgugaacgucgggaaguccaccaccaacaucaugaucaccaccaucaucaucgugaucaucgugauccugcuccugcugaucgccgucggccucuuccuguacugcaaggcccggagcacgcccgugacccuguccaaggaccagcugagcgggaucaacaacaucgccuucuccaacugaggacuaguggaagcauuuuccuggcugauuaaaagaaauuacucagcuauggucaucuguuccuguuagaaggcuaugcagcauauuauauacuaugcgcauguuaugaaaugcauaauaaaaaauuuuaaaaaaucuaaaagaucuaaaaaaaaaaaaaaaaaaaaaaaaaaaaaaaaaaaaaaaaaaaaaaaaaaaaaaaaaaaaaaaaugcaucccccccccccccccccccccccccccccccaaaggcucuuuucagagccaccagaauu

SEQ ID NO: 17945 - RNA, 1982 nt, Artificial Sequence
  mRNA product Design h-3 comprising derived and/or modified sequence from HRSV(Memphis-37)__AIY60640.1__F_DSCav1_mut6 (opt2)
gggagacccgugacccggaaguuguacggcuacgcgacuuucccucccacaaacccucgcgcccuuccuuuccuacuugggcccggcagaaagcuuaccauggagcuccccauccucaagaccaacgccaucaccaccauccucgccgccgucacccucugcuucgccuccucccagaacaucaccgaggaguucuaccaguccaccugcuccgccgucuccaagggcuaccucggcgcccuccgcaccggcugguacaccuccgucaucaccaucgagcucuccaacaucaaggagaacaagugcaacggcaccgacgccaaggucaagcucaucaagcaggagcucgacaaguacaagaacgccgucaccgaccuccagaugcucaugugcuccacccccgccgccggcuccggcuccgccaucgccuccggcaucgccgucugcaagguccuccaccucgagggcgaggucaacaagaucaagaacgcccuccucuccaccaacaaggccgucgucucccucuccaacggcgucuccguccucaccuucaagguccucgaccucaagaacuacaucgacaagcagcuccuccccauccucaacaagcaguccugcuccauccccaaccccgagaccgucauggaguuccagcagaagaacaaccgccuccucgagaucacccgcgaguucuccgucaacgccggcgucaccacccccgucuccaccuacaugcucaccaacuccgagcuccucucccucaucaacgacaugcccaucaccaacgaccagaagaagcucauguccaacaacguccagaucguccgccagcaguccuacuccaucaugugcaucaucaaggaggagguccucgccuacgucguccagcucccccucuacggcgucaucgacacccccugcuggaagcuccacaccuccccccucugcaccaccaacaccaaggagggcuccaacaucugccucacccgcaccgaccgcggcugguacugcgacaacgccggcuccgucuccuucuucccccaggccgagaccugcaaggucugcuccaaccgcgucuucugcgacaccaugaacucccucacccuccccuccgaggucaaccucugcaacaucgacaucuucaaccccaaguacgacugcaagaucaugaccuccaagaccgacgucuccuccuccgucaucaccucccucggcgccaucgucuccugcuacggcaagaccaagugcaccgccuccaacaagaacaagggcaucaucaagaccuucuccaacggcugcgacuacgucuccaacaagggcgucgacaccgucuccgucggcaacacccucuacuacgucaacaagcaggagggccagucccucuacgucaagggcgagcccaucaucaacuucuacgacccccucgucuuccccuccgacgaguucgacgccuccaucucccaggucaacgagaagaucaaccagucccucgccuucauccgcaaguccgacgagcuccuccacaacgucaacgucggcaaguccaccaccaacaucaugaucaccaccaucaucaucgucaucaucgucauccuccuccuccucaucgccgucggccucuuccucuacugcaaggcccgcuccacccccgucacccucuccaaggaccagcucuccggcaucaacaacaucgccuucuccaacugaggacuaguggaagcauuuuccuggcugauuaaaagaaauuacucagcuauggucaucuguuccuguuagaaggcuaugcagcauauuauauacuaugcgcauguuaugaaaugcauaauaaaaaauuuuaaaaaaucuaaaagaucuaaaaaaaaaaaaaaaaaaaaaaaaaaaaaaaaaaaaaaaaaaaaaaaaaaaaaaaaaaaaaaaaugcaucccccccccccccccccccccccccccccccaaaggcucuuuucagagccaccagaauu

SEQ ID NO: 17946 - RNA, 1982 nt, Artificial Sequence
  mRNA product Design h-3 comprising derived and/or modified sequence from HRSV(Memphis-37)__AIY60640.1__F_DSCav1_mut6 (opt3)
gggagacccgugacccggaaguuguacggcuacgcgacuuucccucccacaaacccucgcgcccuuccuuuccuacuugggcccggcagaaagcuuaccauggagcugcccauccucaagaccaacgccauuacaacuauacuugcugcagugacgcugugcuucgccagcucccagaauaucaccgaagaguuuuaccaaucuacauguucagcggucaguaaaggcuauuugggggcuuuaagaacuggaugguacaccagcguuauuacaaucgaacuguccaacauuaaggagaauaaaugcaacgguaccgacgccaaggugaaacuaaucaagcaggaacucgauaaguauaaaaaugcaguaacugaccugcagaugcuuauguguucuacuccugccgcuggcucggggucagcaauagccagcggaaucgcugugugcaagguccugcacuuggagggcgaggugaacaaaauuaagaaugcccuccugaguaccaacaaagcgguugugucccugucuaauggugucagcgugcucacguucaagguauuagaucugaagaacuacaucgacaaacagcuuuugccaauucugaauaagcaauccuguucaaucccgaaccccgaaacuguuauggaguuucagcagaaaaauaacaggcuacucgaaauaacccgggaguucagugugaaugcaggggucacaacuccugugagcaccuauaugcugacaaacucugagcuucuguccuugauuaacgauaugccaaucaccaaugaccagaagaaacucaugucaaacaaugugcaaauuguccgccagcagagcuacaguaucaugugcaucauuaaggaagagguucuggccuaugugguacaguuaccccuguacggagugauagauacgccuuguuggaaacuccauacuucuccacuuugcacaaccaacacuaaggaaggcuccaauaucugucugacacgaaccgaccguggcugguacugcgauaacgcugggagcgucucguuuuucccccaagccgagacguguaaggugugcucuaauagaguuuucugcgacaccaugaacuccuugacacuaccuucagaagugaaucuguguaacauugauaucuucaauccaaaauaugacugcaagauaaugacaaguaaaaccgaugucagcuccucugugauuacaagccucggagcaaucguaucauguuacgguaagacuaaaugcaccgcuaguaacaagaauaagggcaucauuaaaacauuuuccaacgggugugacuauguuagcaauaagggaguggacaccgucucugugggcaacacucuguacuaugucaacaaacaggagggucagucacuuuacgugaagggggagccgaucauuaauuucuaugauccccugguuuuuccuagugacgaauuugaugccagcauaucccaagugaacgagaaaaucaaucagucuuuggcguuuauuaggaagucggacgaacuccugcacaacguaaaugucggaaagagcacgacaaacaucaugaucaccacuauuauaaucgugauuaucguuauuuuacugcuacucaucgccgugggccuguuccuuuacugcaaagcacgguccaccccagucacauugucaaaggaucagcugaguggcauaaauaacaucgcuuucucuaauugaggacuaguggaagcauuuuccuggcugauuaaaagaaauuacucagcuauggucaucuguuccuguuagaaggcuaugcagcauauuauauacuaugcgcauguuaugaaaugcauaauaaaaaauuuuaaaaaaucuaaaagaucuaaaaaaaaaaaaaaaaaaaaaaaaaaaaaaaaaaaaaaaaaaaaaaaaaaaaaaaaaaaaaaaaugcaucccccccccccccccccccccccccccccccaaaggcucuuuucagagccaccagaauu

SEQ ID NO: 17947 - RNA, 1982 nt, Artificial Sequence
  mRNA product Design h-3 comprising derived and/or modified sequence from HRSV(Memphis-37)__AIY60640.1__F_DSCav1_mut6 (opt4)
gggagacccgugacccggaaguuguacggcuacgcgacuuucccucccacaaacccucgcgcccuuccuuuccuacuugggcccggcagaaagcuuaccauggagcugcccauccugaagaccaacgccaucaccaccauccuggccgccgugacccugugcuucgccagcagccagaacaucaccgaggaguucuaccagagcaccugcagcgccgugagcaagggcuaccugggcgcccugagaaccggcugguacaccagcgugaucaccaucgagcugagcaacaucaaggagaacaagugcaacggcaccgacgccaaggugaagcugaucaagcaggagcuggacaaguacaagaacgccgugaccgaccugcagaugcugaugugcagcacccccgccgccggcagcggcagcgccaucgccagcggcaucgccgugugcaaggugcugcaccuggagggcgaggugaacaagaucaagaacgcccugcugagcaccaacaaggccguggugagccugagcaacggcgugagcgugcugaccuucaaggugcuggaccugaagaacuacaucgacaagcagcugcugcccauccugaacaagcagagcugcagcauccccaaccccgagaccgugauggaguuccagcagaagaacaacagacugcuggagaucaccagagaguucagcgugaacgccggcgugaccacccccgugagcaccuacaugcugaccaacagcgagcugcugagccugaucaacgacaugcccaucaccaacgaccagaagaagcugaugagcaacaacgugcagaucgugagacagcagagcuacagcaucaugugcaucaucaaggaggaggugcuggccuacguggugcagcugccccuguacggcgugaucgacacccccugcuggaagcugcacaccagcccccugugcaccaccaacaccaaggagggcagcaacaucugccugaccagaaccgacagaggcugguacugcgacaacgccggcagcgugagcuucuucccccaggccgagaccugcaaggugugcagcaacagaguguucugcgacaccaugaacagccugacccugcccagcgaggugaaccugugcaacaucgacaucuucaaccccaaguacgacugcaagaucaugaccagcaagaccgacgugagcagcagcgugaucaccagccugggcgccaucgugagcugcuacggcaagaccaagugcaccgccagcaacaagaacaagggcaucaucaagaccuucagcaacggcugcgacuacgugagcaacaagggcguggacaccgugagcgugggcaacacccuguacuacgugaacaagcaggagggccagagccuguacgugaagggcgagcccaucaucaacuucuacgacccccugguguuccccagcgacgaguucgacgccagcaucagccaggugaacgagaagaucaaccagagccuggccuucaucagaaagagcgacgagcugcugcacaacgugaacgugggcaagagcaccaccaacaucaugaucaccaccaucaucaucgugaucaucgugauccugcugcugcugaucgccgugggccuguuccuguacugcaaggccagaagcacccccgugacccugagcaaggaccagcugagcggcaucaacaacaucgccuucagcaacugaggacuaguggaagcauuuuccuggcugauuaaaagaaauuacucagcuauggucaucuguuccuguuagaaggcuaugcagcauauuauauacuaugcgcauguuaugaaaugcauaauaaaaaauuuuaaaaaaucuaaaagaucuaaaaaaaaaaaaaaaaaaaaaaaaaaaaaaaaaaaaaaaaaaaaaaaaaaaaaaaaaaaaaaaaugcaucccccccccccccccccccccccccccccccaaaggcucuuuucagagccaccagaauu

SEQ ID NO: 17948 - RNA, 1982 nt, Artificial Sequence
  mRNA product Design h-3 comprising derived and/or modified sequence from HRSV(Memphis-37)__AIY60640.1__F_DSCav1_mut6 (opt5)
gggagacccgugacccggaaguuguacggcuacgcgacuuucccucccacaaacccucgcgcccuuccuuuccuacuugggcccggcagaaagcuuaccauggagcugcccauccucaagaccaacgccauuacaacgauccuggcugccgugacccuuugcuucgcgagcucccagaauauuacagaagaguuuuaccaaucuaccuguagcgcugucuccaaaggcuaucugggggcccucagaacaggaugguacaccucuguuaucacaauugaacugagcaacaucaaggagaauaaaugcaacggcaccgacgccaaggugaaacuuaucaagcaggaacuggauaaguauaaaaaugcugugacggaccuccagaugcugauguguuccaccccugccgcugggucuggaagcgccauugcguccggcaucgccgucugcaaggugcugcaccucgagggggagguuaacaaaauuaagaaugcucugcuuagcacaaacaaagccguggucucucuguccaauggagugagcguucucaccuucaaggugcuggaucuuaagaacuacaucgacaaacagcugcucccgauucugaauaagcaaucuuguuccauccccaacccugaaacagucauggaguuucagcagaaaaauaaccggcugcucgaaauuacccgcgaguucagcgugaaugcuggcgugacgacacccgucucuaccuauaugcugacaaacuccgagcuucugagccucaucaacgauaugccuaucaccaaugaccagaagaaacugauguccaacaauguucaaauugugagacagcagucuuacagcaucaugugcauuaucaaggaagaggugcuugccuaugucgugcagcugccccucuacggcguuauugauaccccuuguuggaaacugcauacauccccgcugugcacgaccaacacaaaggaagggagcaauaucugucucacccggacagaccgcggaugguacugcgauaacgcgggcucuguguccuuuuucccccaagccgagaccuguaaggucugcagcaauagaguguuuugcgacacgaugaacucucugacacuuccuagcgaaguuaaucuguguaacaucgauauuuucaaucccaaauaugacugcaagaucaugaccuccaaaaccgaugugucuagcuccgucauuacaagccucggggcuaucgugucuuguuacggaaagaccaaaugcacagccuccaacaagaauaagggcauuaucaaaacguuuagcaacgggugugacuaugucucuaauaagggaguggacaccguuuccgugggcaacacacuguacuaugucaacaaacaggagggccagagccuuuacgugaagggggagccuaucauuaauuucuaugauccccugguuuuuccguccgacgaauuugaugcuucuaucagccaagugaacgagaaaauuaaucagucccucgccuucauccggaagucugacgaacugcugcacaacgucaaugugggaaagagcaccacaaacauuaugaucaccacgauuaucaucgugauuaucguuauucuccugcuucugaucgccgucggccucuuccuguacugcaaagcucgcuccaccccugugacacugagcaaggaucagcuuucugggauuaauaacaucgcguucuccaauugaggacuaguggaagcauuuuccuggcugauuaaaagaaauuacucagcuauggucaucuguuccuguuagaaggcuaugcagcauauuauauacuaugcgcauguuaugaaaugcauaauaaaaaauuuuaaaaaaucuaaaagaucuaaaaaaaaaaaaaaaaaaaaaaaaaaaaaaaaaaaaaaaaaaaaaaaaaaaaaaaaaaaaaaaaugcaucccccccccccccccccccccccccccccccaaaggcucuuuucagagccaccagaauu

SEQ ID NO: 17949 - RNA, 1982 nt, Artificial Sequence
  mRNA product Design h-3 comprising derived and/or modified sequence from HRSV(Memphis-37)__AIY60640.1__F_DSCav1_mut6 (opt6)
gggagacccgugacccggaaguuguacggcuacgcgacuuucccucccacaaacccucgcgcccuuccuuuccuacuugggcccggcagaaagcuuaccauggaacuaccaauuuuaaaaacaaacgcaauuacaacuauacucgcagcaguaacauuauguuucgccucaucccaaaacauaacagaagaauuuuaccaaucaacaugcagcgcaguaucaaaaggauaucucggagcauuacgaacagguugguacacaucuguaaucacuauagaacuaucaaacauaaaagaaaacaaaugcaauggaaccgacgcaaaaguaaaauuaauaaaacaagaacucgauaaauacaaaaaugcaguaacagaccuccaaaugcucauguguucaacaccagccgcaggaucagguuccgccauagcaucuggcauagcaguaugcaaaguacuccacuuagaaggagaaguuaacaaaauaaaaaacgcacuauuaucaacaaacaaagcaguaguaucccucucaaacggagucucaguauuaacauucaaaguauuagaccuaaaaaacuacauagacaaacaacuacuuccaauacucaacaaacaaucaugcucaauaccaaacccagaaaccguaauggaauuucaacaaaaaaacaaccgacuacuagaaaucacacgagaauuuucaguaaacgccggugucacaacuccaguaucaacuuauauguuaaccaacucagaacuauuaucauuaauaaacgauaugcccauaacuaacgaccaaaaaaaauuaaugucaaacaacguacaaauaguacgccaacaaaguuacucaauaaugugcaucauaaaagaagaaguauuagcguacguuguacaacuaccucuauacggagucauagacacaccaugcuggaaacuucacacaucaccacuauguacaacaaacacaaaagaaggcaguaacauaugccuaacaagaacagaccguggaugguauugugacaacgcuggaucuguaucauucuucccucaagcagaaaccuguaaaguuugcucaaacagagucuucugugacacaaugaacucucuaacacuaccuuccgaagugaaccucuguaacauagacauauucaauccaaaauaugauugcaaaauaaugacuucaaaaacagauguaucauccucuguuauaacaucauuaggcgccauaguuucaugcuacggaaaaacuaaaugcacagcaucaaacaaaaacaaaggaauaauaaaaaccuucucaaauggaugcgacuacguaagcaacaaaggcguagacacaguaucaguagguaauacauuauacuacguaaacaaacaagaaggacaaucacuuuauguuaaaggagaaccuauaauaaacuucuacgacccacuuguauuuccauccgaugaauuugacgcaucuauaucacaagucaacgaaaaaauaaaccaaucauuagcauucauucgaaaauccgaugaacuacuccauaacguaaaugucggaaaaucaacaaccaacauaaugaucacaacaauaaucauagugauaauaguaauacuccuacuacuaaucgcaguaggucuauuccuauauuguaaagcaagaucuacuccaguuacacucucuaaagaccaauuaagcgguaucaacaacaucgccuucagcaauuaaggacuaguggaagcauuuuccuggcugauuaaaagaaauuacucagcuauggucaucuguuccuguuagaaggcuaugcagcauauuauauacuaugcgcauguuaugaaaugcauaauaaaaaauuuuaaaaaaucuaaaagaucuaaaaaaaaaaaaaaaaaaaaaaaaaaaaaaaaaaaaaaaaaaaaaaaaaaaaaaaaaaaaaaaaugcaucccccccccccccccccccccccccccccccaaaggcucuuuucagagccaccagaauu

SEQ ID NO: 17950 - RNA, 1982 nt, Artificial Sequence
  mRNA product Design h-3 comprising derived and/or modified sequence from HRSV(Memphis-37)__AIY60640.1__F_DSCav1_mut6 (opt11)
gggagacccgugacccggaaguuguacggcuacgcgacuuucccucccacaaacccucgcgcccuuccuuuccuacuugggcccggcagaaagcuuaccauggagcugcccauccucaagaccaacgccaucaccacgauccuggccgcggugacccugugcuucgcgagcucccaaaacaucaccgaggaguucuaccagagcacgugcuccgccgucagcaagggcuaccucggggcccugcgcaccggcugguacaccuccgugaucaccaucgagcugagcaacaucaaggaaaacaagugcaacgggacggacgcaaaggugaagcucaucaagcaggagcuggauaaguacaagaacgcggucacggaccugcagaugcucaugugcuccaccccggccgccggcagcggguccgccaucgcguccggcaucgccgugugcaagguguugcaccuggagggcgaggucaacaagaucaagaacgcccuccuuuccaccaauaaggcuguugugagccuguccaacggggucagcgugcucaccuucaaggugcuggaccugaagaacuacaucgacaagcagcuccugcccauccugaacaagcaguccugcagcauccccaaccccgagacagucauggaguuccagcagaagaacaaccggcuccuggagaucacccgcgaguucuccguuaacgccggggugaccaccccgguaagcacauacaugcugaccaacagcgagcuccugagccugaucaacgacaugcccaucaccaacgaccagaagaagcucaugagcaacaacgugcagaucgugcggcagcaguccuacagcaucaugugcaucaucaaggaggagguccuggcguacguggugcaacugccccucuacggggucaucgacacccccugcuggaagcugcacacguccccgcugugcaccaccaacaccaaggagggcagcaacaucugccucacgcgcaccgaccgggggugguacugcgacaacgcaggcuccgugagcuucuucccccaggccgagaccugcaaggugugcuccaaccgcgucuucugcgacaccaugaacagccugacgcugcccuccgaggugaaccucugcaacaucgacaucuucaaccccaaguacgacuguaagaucaugaccagcaagaccgaugucuccagcuccgugaucaccagccugggcgccauaguguccuguuaugggaagacgaagugcaccgccagcaacaagaacaaaggcaucaucaagaccuucuccaacgggugcgacuacgucagcaacaagggcguggacacaguguccgucggcaacacgcuguacuacgugaacaagcaggaggggcagagccucuacgugaagggcgagccgaucaucaacuucuacgauccccuggucuuccccagcgacgaguucgacgcguccaucagccaagugaacgagaagaucaaccagucccuggccuucauccgcaagagcgacgagcuccugcacaacgugaacgucgggaaguccaccaccaacaucaugaucaccaccaucaucaucgugaucaucgucauccugcuccugcugaucgccgucggccucuuccuguacugcaaggcccggagcacgcccgugacccuguccaaggaccagcugucgggcaucaacaacaucgccuucuccaacugaggacuaguggaagcauuuuccuggcugauuaaaagaaauuacucagcuauggucaucuguuccuguuagaaggcuaugcagcauauuauauacuaugcgcauguuaugaaaugcauaauaaaaaauuuuaaaaaaucuaaaagaucuaaaaaaaaaaaaaaaaaaaaaaaaaaaaaaaaaaaaaaaaaaaaaaaaaaaaaaaaaaaaaaaaugcaucccccccccccccccccccccccccccccccaaaggcucuuuucagagccaccagaauu

SEQ ID NO: 17951 - RNA, 2045 nt, Artificial Sequence
  mRNA product Design h-4 comprising derived and/or modified sequence from HRSV(Memphis-37)__AIY60640.1__F_DSCav1_mut6 (opt1)
gggagagggcgcuuggcuugcaaggacccugagcugcggcauugaagcacacccaacccaacucgacugaagucagccucacugaaccggaucugagaaucuucucucucugggcuugccagggcucuccgaaccuagcuagcauccucuucaauuccaacuagaaagcuuaccauggagcugcccauccucaagaccaacgccaucaccacgauccuggccgcggugacccugugcuucgccagcucccagaacaucaccgaggaguucuaccagagcacgugcuccgccgucagcaagggcuaccucggcgcccugcgcaccgggugguacaccagcgugaucaccaucgagcuguccaacaucaaggagaacaagugcaacggcaccgacgccaaggugaagcucaucaagcaggagcuggacaaguacaagaacgcggucacggaccugcagaugcugaugugcagcaccccggccgccggcuccgggagcgcgaucgccuccggcaucgccgucugcaaggugcugcaccucgagggcgaggugaacaagaucaagaacgcccugcuguccaccaacaaggccgucgugagccucuccaacggggugagcguccugaccuucaaggugcuggaccucaagaacuacaucgacaagcagcugcugcccauccugaacaagcagagcugcuccauccccaaccccgagaccgucauggaguuccagcagaagaacaaccgccuccuggagaucacgcgggaguucagcgugaacgcgggcgugaccacccccgucuccaccuacaugcugacgaacagcgagcuccugucccugaucaacgacaugccgaucaccaacgaccagaagaagcucaugagcaacaacgugcagaucgugcgccagcaguccuacagcaucaugugcaucaucaaggaggagguccuggccuacguggugcagcugccccucuacggggucaucgacacccccugcuggaagcugcacaccagcccccugugcacgaccaacaccaaggagggcuccaacaucugccucacccggacggaccgcgggugguacugcgacaacgccggcagcguguccuucuucccgcaggccgagaccugcaaggucugcagcaaccggguguucugcgacaccaugaacucccugacccugcccagcgaggugaaccucugcaacaucgacaucuucaaccccaaguacgacugcaagaucaugacguccaagaccgacgucagcuccagcgugaucaccucccugggcgccaucgugagcugcuacgggaagaccaagugcacggcgagcaacaagaacaagggcaucaucaagaccuucuccaacgggugcgacuacgucagcaacaagggcguggacaccguguccgucggcaacacccuguacuacgugaacaagcaggagggccagagccucuacgugaagggggagcccaucaucaacuucuacgacccgcuggucuuccccuccgacgaguucgacgccagcaucucccaggugaacgagaagaucaaccagagccuggccuucauccggaaguccgacgagcuccugcacaacgugaacgucggcaagagcaccacgaacaucaugaucaccaccaucaucaucgugaucaucgugauccugcugcuccugaucgccgucgggcuguuccucuacugcaaggcccgcuccacccccgugacgcugagcaaggaccagcuguccgggaucaacaacaucgcguucagcaacugaggacuaguaauaaggaaacuguaugaaugucugugggcaggaagugaagagauccuucuguaaagguuuuuggaauuaugucugcugaauaauaaacuuuuuugaaauaauaaaucugguagaaaaaugagaucuaaaaaaaaaaaaaaaaaaaaaaaaaaaaaaaaaaaaaaaaaaaaaaaaaaaaaaaaaaaaaaaaugcaucccccccccccccccccccccccccccccccaaaggcucuuuucagagccaccagaauu

SEQ ID NO: 17952 - RNA, 2045 nt, Artificial Sequence
  mRNA product Design h-4 comprising derived and/or modified sequence from HRSV(Memphis-37)__AIY60640.1__F_DSCav1_mut6 (opt1)
gggagagggcgcuuggcuugcaaggacccugagcugcggcauugaagcacacccaacccaacucgacugaagucagccucacugaaccggaucugagaaucuucucucucugggcuugccagggcucuccgaaccuagcuagcauccucuucaauuccaacuagaaagcuuaccauggagcugcccauccucaagaccaacgccaucaccacgauccuggccgcggugacccugugcuucgccagcucccagaacaucaccgaggaguucuaccagagcacgugcuccgccgucagcaagggcuaccucggggcccugcgcaccggcugguacaccuccgugaucaccaucgagcugagcaacaucaaggagaacaagugcaacgggaccgacgccaaggugaagcucaucaagcaggagcuggacaaguacaagaacgcggucacggaccugcagaugcucaugugcuccaccccggccgccggcagcggguccgccaucgcgagcggcaucgccgugugcaaggugcugcaccuggagggcgaggucaacaagaucaagaacgcccuccuguccaccaacaaggccguggugagccuguccaacggggucagcgugcucaccuucaaggugcuggaccugaagaacuacaucgacaagcagcuccugcccauccugaacaagcaguccugcagcauccccaaccccgagacggucauggaguuccagcagaagaacaaccggcuccuggagaucacccgcgaguucuccgugaacgccggcgugaccaccccggucagcacguacaugcugaccaacuccgagcuccugagccugaucaacgacaugcccaucaccaacgaccagaagaagcucaugagcaacaacgugcagaucgugcggcagcaguccuacagcaucaugugcaucaucaaggaggagguccuggcguacguggugcagcugccccucuacggggucaucgacacccccugcuggaagcugcacacguccccgcugugcaccaccaacaccaaggagggcagcaacaucugccucacgcgcaccgaccgggggugguacugcgacaacgccggcuccgugagcuucuucccccaggccgagaccugcaaggugugcuccaaccgcgucuucugcgacaccaugaacagccugacgcugcccuccgaggugaaccucugcaacaucgacaucuucaaccccaaguacgacugcaagaucaugaccagcaagaccgacgucuccagcuccgugaucaccagccugggcgccaucguguccugcuacgggaagacgaagugcaccgccagcaacaagaacaagggcaucaucaagaccuucuccaacgggugcgacuacgucagcaacaagggcguggacaccguguccgucggcaacacgcuguacuacgugaacaagcaggaggggcagagccucuacgugaagggcgagccgaucaucaacuucuacgacccccuggucuuccccagcgacgaguucgacgcguccaucagccaggugaacgagaagaucaaccagucccuggccuucauccgcaagagcgacgagcuccugcacaacgugaacgucgggaaguccaccaccaacaucaugaucaccaccaucaucaucgugaucaucgugauccugcuccugcugaucgccgucggccucuuccuguacugcaaggcccggagcacgcccgugacccuguccaaggaccagcugagcgggaucaacaacaucgccuucuccaacugaggacuaguaauaaggaaacuguaugaaugucugugggcaggaagugaagagauccuucuguaaagguuuuuggaauuaugucugcugaauaauaaacuuuuuugaaauaauaaaucugguagaaaaaugagaucuaaaaaaaaaaaaaaaaaaaaaaaaaaaaaaaaaaaaaaaaaaaaaaaaaaaaaaaaaaaaaaaaugcaucccccccccccccccccccccccccccccccaaaggcucuuuucagagccaccagaauu

SEQ ID NO: 17953 - RNA, 2045 nt, Artificial Sequence
  mRNA product Design h-4 comprising derived and/or modified sequence from HRSV(Memphis-37)__AIY60640.1__F_DSCav1_mut6 (opt2)
gggagagggcgcuuggcuugcaaggacccugagcugcggcauugaagcacacccaacccaacucgacugaagucagccucacugaaccggaucugagaaucuucucucucugggcuugccagggcucuccgaaccuagcuagcauccucuucaauuccaacuagaaagcuuaccauggagcuccccauccucaagaccaacgccaucaccaccauccucgccgccgucacccucugcuucgccuccucccagaacaucaccgaggaguucuaccaguccaccugcuccgccgucuccaagggcuaccucggcgcccuccgcaccggcugguacaccuccgucaucaccaucgagcucuccaacaucaaggagaacaagugcaacggcaccgacgccaaggucaagcucaucaagcaggagcucgacaaguacaagaacgccgucaccgaccuccagaugcucaugugcuccacccccgccgccggcuccggcuccgccaucgccuccggcaucgccgucugcaagguccuccaccucgagggcgaggucaacaagaucaagaacgcccuccucuccaccaacaaggccgucgucucccucuccaacggcgucuccguccucaccuucaagguccucgaccucaagaacuacaucgacaagcagcuccuccccauccucaacaagcaguccugcuccauccccaaccccgagaccgucauggaguuccagcagaagaacaaccgccuccucgagaucacccgcgaguucuccgucaacgccggcgucaccacccccgucuccaccuacaugcucaccaacuccgagcuccucucccucaucaacgacaugcccaucaccaacgaccagaagaagcucauguccaacaacguccagaucguccgccagcaguccuacuccaucaugugcaucaucaaggaggagguccucgccuacgucguccagcucccccucuacggcgucaucgacacccccugcuggaagcuccacaccuccccccucugcaccaccaacaccaaggagggcuccaacaucugccucacccgcaccgaccgcggcugguacugcgacaacgccggcuccgucuccuucuucccccaggccgagaccugcaaggucugcuccaaccgcgucuucugcgacaccaugaacucccucacccuccccuccgaggucaaccucugcaacaucgacaucuucaaccccaaguacgacugcaagaucaugaccuccaagaccgacgucuccuccuccgucaucaccucccucggcgccaucgucuccugcuacggcaagaccaagugcaccgccuccaacaagaacaagggcaucaucaagaccuucuccaacggcugcgacuacgucuccaacaagggcgucgacaccgucuccgucggcaacacccucuacuacgucaacaagcaggagggccagucccucuacgucaagggcgagcccaucaucaacuucuacgacccccucgucuuccccuccgacgaguucgacgccuccaucucccaggucaacgagaagaucaaccagucccucgccuucauccgcaaguccgacgagcuccuccacaacgucaacgucggcaaguccaccaccaacaucaugaucaccaccaucaucaucgucaucaucgucauccuccuccuccucaucgccgucggccucuuccucuacugcaaggcccgcuccacccccgucacccucuccaaggaccagcucuccggcaucaacaacaucgccuucuccaacugaggacuaguaauaaggaaacuguaugaaugucugugggcaggaagugaagagauccuucuguaaagguuuuuggaauuaugucugcugaauaauaaacuuuuuugaaauaauaaaucugguagaaaaaugagaucuaaaaaaaaaaaaaaaaaaaaaaaaaaaaaaaaaaaaaaaaaaaaaaaaaaaaaaaaaaaaaaaaugcaucccccccccccccccccccccccccccccccaaaggcucuuuucagagccaccagaauu

SEQ ID NO: 17954 - RNA, 2045 nt, Artificial Sequence
  mRNA product Design h-4 comprising derived and/or modified sequence from HRSV(Memphis-37)__AIY60640.1__F_DSCav1_mut6 (opt3)
gggagagggcgcuuggcuugcaaggacccugagcugcggcauugaagcacacccaacccaacucgacugaagucagccucacugaaccggaucugagaaucuucucucucugggcuugccagggcucuccgaaccuagcuagcauccucuucaauuccaacuagaaagcuuaccauggagcugcccauccucaagaccaacgccauuacaacuauacuugcugcagugacgcugugcuucgccagcucccagaauaucaccgaagaguuuuaccaaucuacauguucagcggucaguaaaggcuauuugggggcuuuaagaacuggaugguacaccagcguuauuacaaucgaacuguccaacauuaaggagaauaaaugcaacgguaccgacgccaaggugaaacuaaucaagcaggaacucgauaaguauaaaaaugcaguaacugaccugcagaugcuuauguguucuacuccugccgcuggcucggggucagcaauagccagcggaaucgcugugugcaagguccugcacuuggagggcgaggugaacaaaauuaagaaugcccuccugaguaccaacaaagcgguugugucccugucuaauggugucagcgugcucacguucaagguauuagaucugaagaacuacaucgacaaacagcuuuugccaauucugaauaagcaauccuguucaaucccgaaccccgaaacuguuauggaguuucagcagaaaaauaacaggcuacucgaaauaacccgggaguucagugugaaugcaggggucacaacuccugugagcaccuauaugcugacaaacucugagcuucuguccuugauuaacgauaugccaaucaccaaugaccagaagaaacucaugucaaacaaugugcaaauuguccgccagcagagcuacaguaucaugugcaucauuaaggaagagguucuggccuaugugguacaguuaccccuguacggagugauagauacgccuuguuggaaacuccauacuucuccacuuugcacaaccaacacuaaggaaggcuccaauaucugucugacacgaaccgaccguggcugguacugcgauaacgcugggagcgucucguuuuucccccaagccgagacguguaaggugugcucuaauagaguuuucugcgacaccaugaacuccuugacacuaccuucagaagugaaucuguguaacauugauaucuucaauccaaaauaugacugcaagauaaugacaaguaaaaccgaugucagcuccucugugauuacaagccucggagcaaucguaucauguuacgguaagacuaaaugcaccgcuaguaacaagaauaagggcaucauuaaaacauuuuccaacgggugugacuauguuagcaauaagggaguggacaccgucucugugggcaacacucuguacuaugucaacaaacaggagggucagucacuuuacgugaagggggagccgaucauuaauuucuaugauccccugguuuuuccuagugacgaauuugaugccagcauaucccaagugaacgagaaaaucaaucagucuuuggcguuuauuaggaagucggacgaacuccugcacaacguaaaugucggaaagagcacgacaaacaucaugaucaccacuauuauaaucgugauuaucguuauuuuacugcuacucaucgccgugggccuguuccuuuacugcaaagcacgguccaccccagucacauugucaaaggaucagcugaguggcauaaauaacaucgcuuucucuaauugaggacuaguaauaaggaaacuguaugaaugucugugggcaggaagugaagagauccuucuguaaagguuuuuggaauuaugucugcugaauaauaaacuuuuuugaaauaauaaaucugguagaaaaaugagaucuaaaaaaaaaaaaaaaaaaaaaaaaaaaaaaaaaaaaaaaaaaaaaaaaaaaaaaaaaaaaaaaaugcaucccccccccccccccccccccccccccccccaaaggcucuuuucagagccaccagaauu

SEQ ID NO: 17955 - RNA, 2045 nt, Artificial Sequence
  mRNA product Design h-4 comprising derived and/or modified sequence from HRSV(Memphis-37)__AIY60640.1__F_DSCav1_mut6 (opt4)
gggagagggcgcuuggcuugcaaggacccugagcugcggcauugaagcacacccaacccaacucgacugaagucagccucacugaaccggaucugagaaucuucucucucugggcuugccagggcucuccgaaccuagcuagcauccucuucaauuccaacuagaaagcuuaccauggagcugcccauccugaagaccaacgccaucaccaccauccuggccgccgugacccugugcuucgccagcagccagaacaucaccgaggaguucuaccagagcaccugcagcgccgugagcaagggcuaccugggcgcccugagaaccggcugguacaccagcgugaucaccaucgagcugagcaacaucaaggagaacaagugcaacggcaccgacgccaaggugaagcugaucaagcaggagcuggacaaguacaagaacgccgugaccgaccugcagaugcugaugugcagcacccccgccgccggcagcggcagcgccaucgccagcggcaucgccgugugcaaggugcugcaccuggagggcgaggugaacaagaucaagaacgcccugcugagcaccaacaaggccguggugagccugagcaacggcgugagcgugcugaccuucaaggugcuggaccugaagaacuacaucgacaagcagcugcugcccauccugaacaagcagagcugcagcauccccaaccccgagaccgugauggaguuccagcagaagaacaacagacugcuggagaucaccagagaguucagcgugaacgccggcgugaccacccccgugagcaccuacaugcugaccaacagcgagcugcugagccugaucaacgacaugcccaucaccaacgaccagaagaagcugaugagcaacaacgugcagaucgugagacagcagagcuacagcaucaugugcaucaucaaggaggaggugcuggccuacguggugcagcugccccuguacggcgugaucgacacccccugcuggaagcugcacaccagcccccugugcaccaccaacaccaaggagggcagcaacaucugccugaccagaaccgacagaggcugguacugcgacaacgccggcagcgugagcuucuucccccaggccgagaccugcaaggugugcagcaacagaguguucugcgacaccaugaacagccugacccugcccagcgaggugaaccugugcaacaucgacaucuucaaccccaaguacgacugcaagaucaugaccagcaagaccgacgugagcagcagcgugaucaccagccugggcgccaucgugagcugcuacggcaagaccaagugcaccgccagcaacaagaacaagggcaucaucaagaccuucagcaacggcugcgacuacgugagcaacaagggcguggacaccgugagcgugggcaacacccuguacuacgugaacaagcaggagggccagagccuguacgugaagggcgagcccaucaucaacuucuacgacccccugguguuccccagcgacgaguucgacgccagcaucagccaggugaacgagaagaucaaccagagccuggccuucaucagaaagagcgacgagcugcugcacaacgugaacgugggcaagagcaccaccaacaucaugaucaccaccaucaucaucgugaucaucgugauccugcugcugcugaucgccgugggccuguuccuguacugcaaggccagaagcacccccgugacccugagcaaggaccagcugagcggcaucaacaacaucgccuucagcaacugaggacuaguaauaaggaaacuguaugaaugucugugggcaggaagugaagagauccuucuguaaagguuuuuggaauuaugucugcugaauaauaaacuuuuuugaaauaauaaaucugguagaaaaaugagaucuaaaaaaaaaaaaaaaaaaaaaaaaaaaaaaaaaaaaaaaaaaaaaaaaaaaaaaaaaaaaaaaaugcaucccccccccccccccccccccccccccccccaaaggcucuuuucagagccaccagaauu

SEQ ID NO: 17956 - RNA, 2045 nt, Artificial Sequence
  mRNA product Design h-4 comprising derived and/or modified sequence from HRSV(Memphis-37)__AIY60640.1__F_DSCav1_mut6 (opt5)
gggagagggcgcuuggcuugcaaggacccugagcugcggcauugaagcacacccaacccaacucgacugaagucagccucacugaaccggaucugagaaucuucucucucugggcuugccagggcucuccgaaccuagcuagcauccucuucaauuccaacuagaaagcuuaccauggagcugcccauccucaagaccaacgccauuacaacgauccuggcugccgugacccuuugcuucgcgagcucccagaauauuacagaagaguuuuaccaaucuaccuguagcgcugucuccaaaggcuaucugggggcccucagaacaggaugguacaccucuguuaucacaauugaacugagcaacaucaaggagaauaaaugcaacggcaccgacgccaaggugaaacuuaucaagcaggaacuggauaaguauaaaaaugcugugacggaccuccagaugcugauguguuccaccccugccgcugggucuggaagcgccauugcguccggcaucgccgucugcaaggugcugcaccucgagggggagguuaacaaaauuaagaaugcucugcuuagcacaaacaaagccguggucucucuguccaauggagugagcguucucaccuucaaggugcuggaucuuaagaacuacaucgacaaacagcugcucccgauucugaauaagcaaucuuguuccauccccaacccugaaacagucauggaguuucagcagaaaaauaaccggcugcucgaaauuacccgcgaguucagcgugaaugcuggcgugacgacacccgucucuaccuauaugcugacaaacuccgagcuucugagccucaucaacgauaugccuaucaccaaugaccagaagaaacugauguccaacaauguucaaauugugagacagcagucuuacagcaucaugugcauuaucaaggaagaggugcuugccuaugucgugcagcugccccucuacggcguuauugauaccccuuguuggaaacugcauacauccccgcugugcacgaccaacacaaaggaagggagcaauaucugucucacccggacagaccgcggaugguacugcgauaacgcgggcucuguguccuuuuucccccaagccgagaccuguaaggucugcagcaauagaguguuuugcgacacgaugaacucucugacacuuccuagcgaaguuaaucuguguaacaucgauauuuucaaucccaaauaugacugcaagaucaugaccuccaaaaccgaugugucuagcuccgucauuacaagccucggggcuaucgugucuuguuacggaaagaccaaaugcacagccuccaacaagaauaagggcauuaucaaaacguuuagcaacgggugugacuaugucucuaauaagggaguggacaccguuuccgugggcaacacacuguacuaugucaacaaacaggagggccagagccuuuacgugaagggggagccuaucauuaauuucuaugauccccugguuuuuccguccgacgaauuugaugcuucuaucagccaagugaacgagaaaauuaaucagucccucgccuucauccggaagucugacgaacugcugcacaacgucaaugugggaaagagcaccacaaacauuaugaucaccacgauuaucaucgugauuaucguuauucuccugcuucugaucgccgucggccucuuccuguacugcaaagcucgcuccaccccugugacacugagcaaggaucagcuuucugggauuaauaacaucgcguucuccaauugaggacuaguaauaaggaaacuguaugaaugucugugggcaggaagugaagagauccuucuguaaagguuuuuggaauuaugucugcugaauaauaaacuuuuuugaaauaauaaaucugguagaaaaaugagaucuaaaaaaaaaaaaaaaaaaaaaaaaaaaaaaaaaaaaaaaaaaaaaaaaaaaaaaaaaaaaaaaaugcaucccccccccccccccccccccccccccccccaaaggcucuuuucagagccaccagaauu

SEQ ID NO: 17957 - RNA, 2045 nt, Artificial Sequence
  mRNA product Design h-4 comprising derived and/or modified sequence from HRSV(Memphis-37)__AIY60640.1__F_DSCav1_mut6 (opt6)
gggagagggcgcuuggcuugcaaggacccugagcugcggcauugaagcacacccaacccaacucgacugaagucagccucacugaaccggaucugagaaucuucucucucugggcuugccagggcucuccgaaccuagcuagcauccucuucaauuccaacuagaaagcuuaccauggaacuaccaauuuuaaaaacaaacgcaauuacaacuauacucgcagcaguaacauuauguuucgccucaucccaaaacauaacagaagaauuuuaccaaucaacaugcagcgcaguaucaaaaggauaucucggagcauuacgaacagguugguacacaucuguaaucacuauagaacuaucaaacauaaaagaaaacaaaugcaauggaaccgacgcaaaaguaaaauuaauaaaacaagaacucgauaaauacaaaaaugcaguaacagaccuccaaaugcucauguguucaacaccagccgcaggaucagguuccgccauagcaucuggcauagcaguaugcaaaguacuccacuuagaaggagaaguuaacaaaauaaaaaacgcacuauuaucaacaaacaaagcaguaguaucccucucaaacggagucucaguauuaacauucaaaguauuagaccuaaaaaacuacauagacaaacaacuacuuccaauacucaacaaacaaucaugcucaauaccaaacccagaaaccguaauggaauuucaacaaaaaaacaaccgacuacuagaaaucacacgagaauuuucaguaaacgccggugucacaacuccaguaucaacuuauauguuaaccaacucagaacuauuaucauuaauaaacgauaugcccauaacuaacgaccaaaaaaaauuaaugucaaacaacguacaaauaguacgccaacaaaguuacucaauaaugugcaucauaaaagaagaaguauuagcguacguuguacaacuaccucuauacggagucauagacacaccaugcuggaaacuucacacaucaccacuauguacaacaaacacaaaagaaggcaguaacauaugccuaacaagaacagaccguggaugguauugugacaacgcuggaucuguaucauucuucccucaagcagaaaccuguaaaguuugcucaaacagagucuucugugacacaaugaacucucuaacacuaccuuccgaagugaaccucuguaacauagacauauucaauccaaaauaugauugcaaaauaaugacuucaaaaacagauguaucauccucuguuauaacaucauuaggcgccauaguuucaugcuacggaaaaacuaaaugcacagcaucaaacaaaaacaaaggaauaauaaaaaccuucucaaauggaugcgacuacguaagcaacaaaggcguagacacaguaucaguagguaauacauuauacuacguaaacaaacaagaaggacaaucacuuuauguuaaaggagaaccuauaauaaacuucuacgacccacuuguauuuccauccgaugaauuugacgcaucuauaucacaagucaacgaaaaaauaaaccaaucauuagcauucauucgaaaauccgaugaacuacuccauaacguaaaugucggaaaaucaacaaccaacauaaugaucacaacaauaaucauagugauaauaguaauacuccuacuacuaaucgcaguaggucuauuccuauauuguaaagcaagaucuacuccaguuacacucucuaaagaccaauuaagcgguaucaacaacaucgccuucagcaauuaaggacuaguaauaaggaaacuguaugaaugucugugggcaggaagugaagagauccuucuguaaagguuuuuggaauuaugucugcugaauaauaaacuuuuuugaaauaauaaaucugguagaaaaaugagaucuaaaaaaaaaaaaaaaaaaaaaaaaaaaaaaaaaaaaaaaaaaaaaaaaaaaaaaaaaaaaaaaaugcaucccccccccccccccccccccccccccccccaaaggcucuuuucagagccaccagaauu

SEQ ID NO: 17958 - RNA, 2045 nt, Artificial Sequence
  mRNA product Design h-4 comprising derived and/or modified sequence from HRSV(Memphis-37)__AIY60640.1__F_DSCav1_mut6 (opt11)
gggagagggcgcuuggcuugcaaggacccugagcugcggcauugaagcacacccaacccaacucgacugaagucagccucacugaaccggaucugagaaucuucucucucugggcuugccagggcucuccgaaccuagcuagcauccucuucaauuccaacuagaaagcuuaccauggagcugcccauccucaagaccaacgccaucaccacgauccuggccgcggugacccugugcuucgcgagcucccaaaacaucaccgaggaguucuaccagagcacgugcuccgccgucagcaagggcuaccucggggcccugcgcaccggcugguacaccuccgugaucaccaucgagcugagcaacaucaaggaaaacaagugcaacgggacggacgcaaaggugaagcucaucaagcaggagcuggauaaguacaagaacgcggucacggaccugcagaugcucaugugcuccaccccggccgccggcagcggguccgccaucgcguccggcaucgccgugugcaagguguugcaccuggagggcgaggucaacaagaucaagaacgcccuccuuuccaccaauaaggcuguugugagccuguccaacggggucagcgugcucaccuucaaggugcuggaccugaagaacuacaucgacaagcagcuccugcccauccugaacaagcaguccugcagcauccccaaccccgagacagucauggaguuccagcagaagaacaaccggcuccuggagaucacccgcgaguucuccguuaacgccggggugaccaccccgguaagcacauacaugcugaccaacagcgagcuccugagccugaucaacgacaugcccaucaccaacgaccagaagaagcucaugagcaacaacgugcagaucgugcggcagcaguccuacagcaucaugugcaucaucaaggaggagguccuggcguacguggugcaacugccccucuacggggucaucgacacccccugcuggaagcugcacacguccccgcugugcaccaccaacaccaaggagggcagcaacaucugccucacgcgcaccgaccgggggugguacugcgacaacgcaggcuccgugagcuucuucccccaggccgagaccugcaaggugugcuccaaccgcgucuucugcgacaccaugaacagccugacgcugcccuccgaggugaaccucugcaacaucgacaucuucaaccccaaguacgacuguaagaucaugaccagcaagaccgaugucuccagcuccgugaucaccagccugggcgccauaguguccuguuaugggaagacgaagugcaccgccagcaacaagaacaaaggcaucaucaagaccuucuccaacgggugcgacuacgucagcaacaagggcguggacacaguguccgucggcaacacgcuguacuacgugaacaagcaggaggggcagagccucuacgugaagggcgagccgaucaucaacuucuacgauccccuggucuuccccagcgacgaguucgacgcguccaucagccaagugaacgagaagaucaaccagucccuggccuucauccgcaagagcgacgagcuccugcacaacgugaacgucgggaaguccaccaccaacaucaugaucaccaccaucaucaucgugaucaucgucauccugcuccugcugaucgccgucggccucuuccuguacugcaaggcccggagcacgcccgugacccuguccaaggaccagcugucgggcaucaacaacaucgccuucuccaacugaggacuaguaauaaggaaacuguaugaaugucugugggcaggaagugaagagauccuucuguaaagguuuuuggaauuaugucugcugaauaauaaacuuuuuugaaauaauaaaucugguagaaaaaugagaucuaaaaaaaaaaaaaaaaaaaaaaaaaaaaaaaaaaaaaaaaaaaaaaaaaaaaaaaaaaaaaaaaugcaucccccccccccccccccccccccccccccccaaaggcucuuuucagagccaccagaauu

SEQ ID NO: 17959 - RNA, 2061 nt, Artificial Sequence
  mRNA product Design h-5 comprising derived and/or modified sequence from HRSV(Memphis-37)__AIY60640.1__F_DSCav1_mut6 (opt1)
gggagagggcgcuuggcuugcaaggacccugagcugcggcauugaagcacacccaacccaacucgacugaagucagccucacugaaccggaucugagaaucuucucucucugggcuugccagggcucuccgaaccuagcuagcauccucuucaauuccaacuagaaagcuuaccauggagcugcccauccucaagaccaacgccaucaccacgauccuggccgcggugacccugugcuucgccagcucccagaacaucaccgaggaguucuaccagagcacgugcuccgccgucagcaagggcuaccucggcgcccugcgcaccgggugguacaccagcgugaucaccaucgagcuguccaacaucaaggagaacaagugcaacggcaccgacgccaaggugaagcucaucaagcaggagcuggacaaguacaagaacgcggucacggaccugcagaugcugaugugcagcaccccggccgccggcuccgggagcgcgaucgccuccggcaucgccgucugcaaggugcugcaccucgagggcgaggugaacaagaucaagaacgcccugcuguccaccaacaaggccgucgugagccucuccaacggggugagcguccugaccuucaaggugcuggaccucaagaacuacaucgacaagcagcugcugcccauccugaacaagcagagcugcuccauccccaaccccgagaccgucauggaguuccagcagaagaacaaccgccuccuggagaucacgcgggaguucagcgugaacgcgggcgugaccacccccgucuccaccuacaugcugacgaacagcgagcuccugucccugaucaacgacaugccgaucaccaacgaccagaagaagcucaugagcaacaacgugcagaucgugcgccagcaguccuacagcaucaugugcaucaucaaggaggagguccuggccuacguggugcagcugccccucuacggggucaucgacacccccugcuggaagcugcacaccagcccccugugcacgaccaacaccaaggagggcuccaacaucugccucacccggacggaccgcgggugguacugcgacaacgccggcagcguguccuucuucccgcaggccgagaccugcaaggucugcagcaaccggguguucugcgacaccaugaacucccugacccugcccagcgaggugaaccucugcaacaucgacaucuucaaccccaaguacgacugcaagaucaugacguccaagaccgacgucagcuccagcgugaucaccucccugggcgccaucgugagcugcuacgggaagaccaagugcacggcgagcaacaagaacaagggcaucaucaagaccuucuccaacgggugcgacuacgucagcaacaagggcguggacaccguguccgucggcaacacccuguacuacgugaacaagcaggagggccagagccucuacgugaagggggagcccaucaucaacuucuacgacccgcuggucuuccccuccgacgaguucgacgccagcaucucccaggugaacgagaagaucaaccagagccuggccuucauccggaaguccgacgagcuccugcacaacgugaacgucggcaagagcaccacgaacaucaugaucaccaccaucaucaucgugaucaucgugauccugcugcuccugaucgccgucgggcuguuccucuacugcaaggcccgcuccacccccgugacgcugagcaaggaccagcuguccgggaucaacaacaucgcguucagcaacugaggacuaguacuggcugcaucucccuuuccucuguccuccauccuucucccaggauggugaagggggaccugguacccagugauccccaccccaggauccuaaaucaugacuuaccugcuaauaaaaacucauuggaaaagugagaagaucuaaaaaaaaaaaaaaaaaaaaaaaaaaaaaaaaaaaaaaaaaaaaaaaaaaaaaaaaaaaaaaaaugcaucccccccccccccccccccccccccccccccaaaggcucuuuucagagccaccagaauu

SEQ ID NO: 17960 - RNA, 2061 nt, Artificial Sequence
  mRNA product Design h-5 comprising derived and/or modified sequence from HRSV(Memphis-37)__AIY60640.1__F_DSCav1_mut6 (opt1)
gggagagggcgcuuggcuugcaaggacccugagcugcggcauugaagcacacccaacccaacucgacugaagucagccucacugaaccggaucugagaaucuucucucucugggcuugccagggcucuccgaaccuagcuagcauccucuucaauuccaacuagaaagcuuaccauggagcugcccauccucaagaccaacgccaucaccacgauccuggccgcggugacccugugcuucgccagcucccagaacaucaccgaggaguucuaccagagcacgugcuccgccgucagcaagggcuaccucggggcccugcgcaccggcugguacaccuccgugaucaccaucgagcugagcaacaucaaggagaacaagugcaacgggaccgacgccaaggugaagcucaucaagcaggagcuggacaaguacaagaacgcggucacggaccugcagaugcucaugugcuccaccccggccgccggcagcggguccgccaucgcgagcggcaucgccgugugcaaggugcugcaccuggagggcgaggucaacaagaucaagaacgcccuccuguccaccaacaaggccguggugagccuguccaacggggucagcgugcucaccuucaaggugcuggaccugaagaacuacaucgacaagcagcuccugcccauccugaacaagcaguccugcagcauccccaaccccgagacggucauggaguuccagcagaagaacaaccggcuccuggagaucacccgcgaguucuccgugaacgccggcgugaccaccccggucagcacguacaugcugaccaacuccgagcuccugagccugaucaacgacaugcccaucaccaacgaccagaagaagcucaugagcaacaacgugcagaucgugcggcagcaguccuacagcaucaugugcaucaucaaggaggagguccuggcguacguggugcagcugccccucuacggggucaucgacacccccugcuggaagcugcacacguccccgcugugcaccaccaacaccaaggagggcagcaacaucugccucacgcgcaccgaccgggggugguacugcgacaacgccggcuccgugagcuucuucccccaggccgagaccugcaaggugugcuccaaccgcgucuucugcgacaccaugaacagccugacgcugcccuccgaggugaaccucugcaacaucgacaucuucaaccccaaguacgacugcaagaucaugaccagcaagaccgacgucuccagcuccgugaucaccagccugggcgccaucguguccugcuacgggaagacgaagugcaccgccagcaacaagaacaagggcaucaucaagaccuucuccaacgggugcgacuacgucagcaacaagggcguggacaccguguccgucggcaacacgcuguacuacgugaacaagcaggaggggcagagccucuacgugaagggcgagccgaucaucaacuucuacgacccccuggucuuccccagcgacgaguucgacgcguccaucagccaggugaacgagaagaucaaccagucccuggccuucauccgcaagagcgacgagcuccugcacaacgugaacgucgggaaguccaccaccaacaucaugaucaccaccaucaucaucgugaucaucgugauccugcuccugcugaucgccgucggccucuuccuguacugcaaggcccggagcacgcccgugacccuguccaaggaccagcugagcgggaucaacaacaucgccuucuccaacugaggacuaguacuggcugcaucucccuuuccucuguccuccauccuucucccaggauggugaagggggaccugguacccagugauccccaccccaggauccuaaaucaugacuuaccugcuaauaaaaacucauuggaaaagugagaagaucuaaaaaaaaaaaaaaaaaaaaaaaaaaaaaaaaaaaaaaaaaaaaaaaaaaaaaaaaaaaaaaaaugcaucccccccccccccccccccccccccccccccaaaggcucuuuucagagccaccagaauu

SEQ ID NO: 17961 - RNA, 2061 nt, Artificial Sequence
  mRNA product Design h-5 comprising derived and/or modified sequence from HRSV(Memphis-37)__AIY60640.1__F_DSCav1_mut6 (opt2)
gggagagggcgcuuggcuugcaaggacccugagcugcggcauugaagcacacccaacccaacucgacugaagucagccucacugaaccggaucugagaaucuucucucucugggcuugccagggcucuccgaaccuagcuagcauccucuucaauuccaacuagaaagcuuaccauggagcuccccauccucaagaccaacgccaucaccaccauccucgccgccgucacccucugcuucgccuccucccagaacaucaccgaggaguucuaccaguccaccugcuccgccgucuccaagggcuaccucggcgcccuccgcaccggcugguacaccuccgucaucaccaucgagcucuccaacaucaaggagaacaagugcaacggcaccgacgccaaggucaagcucaucaagcaggagcucgacaaguacaagaacgccgucaccgaccuccagaugcucaugugcuccacccccgccgccggcuccggcuccgccaucgccuccggcaucgccgucugcaagguccuccaccucgagggcgaggucaacaagaucaagaacgcccuccucuccaccaacaaggccgucgucucccucuccaacggcgucuccguccucaccuucaagguccucgaccucaagaacuacaucgacaagcagcuccuccccauccucaacaagcaguccugcuccauccccaaccccgagaccgucauggaguuccagcagaagaacaaccgccuccucgagaucacccgcgaguucuccgucaacgccggcgucaccacccccgucuccaccuacaugcucaccaacuccgagcuccucucccucaucaacgacaugcccaucaccaacgaccagaagaagcucauguccaacaacguccagaucguccgccagcaguccuacuccaucaugugcaucaucaaggaggagguccucgccuacgucguccagcucccccucuacggcgucaucgacacccccugcuggaagcuccacaccuccccccucugcaccaccaacaccaaggagggcuccaacaucugccucacccgcaccgaccgcggcugguacugcgacaacgccggcuccgucuccuucuucccccaggccgagaccugcaaggucugcuccaaccgcgucuucugcgacaccaugaacucccucacccuccccuccgaggucaaccucugcaacaucgacaucuucaaccccaaguacgacugcaagaucaugaccuccaagaccgacgucuccuccuccgucaucaccucccucggcgccaucgucuccugcuacggcaagaccaagugcaccgccuccaacaagaacaagggcaucaucaagaccuucuccaacggcugcgacuacgucuccaacaagggcgucgacaccgucuccgucggcaacacccucuacuacgucaacaagcaggagggccagucccucuacgucaagggcgagcccaucaucaacuucuacgacccccucgucuuccccuccgacgaguucgacgccuccaucucccaggucaacgagaagaucaaccagucccucgccuucauccgcaaguccgacgagcuccuccacaacgucaacgucggcaaguccaccaccaacaucaugaucaccaccaucaucaucgucaucaucgucauccuccuccuccucaucgccgucggccucuuccucuacugcaaggcccgcuccacccccgucacccucuccaaggaccagcucuccggcaucaacaacaucgccuucuccaacugaggacuaguacuggcugcaucucccuuuccucuguccuccauccuucucccaggauggugaagggggaccugguacccagugauccccaccccaggauccuaaaucaugacuuaccugcuaauaaaaacucauuggaaaagugagaagaucuaaaaaaaaaaaaaaaaaaaaaaaaaaaaaaaaaaaaaaaaaaaaaaaaaaaaaaaaaaaaaaaaugcaucccccccccccccccccccccccccccccccaaaggcucuuuucagagccaccagaauu

SEQ ID NO: 17962 - RNA, 2061 nt, Artificial Sequence
  mRNA product Design h-5 comprising derived and/or modified sequence from HRSV(Memphis-37)__AIY60640.1__F_DSCav1_mut6 (opt3)
gggagagggcgcuuggcuugcaaggacccugagcugcggcauugaagcacacccaacccaacucgacugaagucagccucacugaaccggaucugagaaucuucucucucugggcuugccagggcucuccgaaccuagcuagcauccucuucaauuccaacuagaaagcuuaccauggagcugcccauccucaagaccaacgccauuacaacuauacuugcugcagugacgcugugcuucgccagcucccagaauaucaccgaagaguuuuaccaaucuacauguucagcggucaguaaaggcuauuugggggcuuuaagaacuggaugguacaccagcguuauuacaaucgaacuguccaacauuaaggagaauaaaugcaacgguaccgacgccaaggugaaacuaaucaagcaggaacucgauaaguauaaaaaugcaguaacugaccugcagaugcuuauguguucuacuccugccgcuggcucggggucagcaauagccagcggaaucgcugugugcaagguccugcacuuggagggcgaggugaacaaaauuaagaaugcccuccugaguaccaacaaagcgguugugucccugucuaauggugucagcgugcucacguucaagguauuagaucugaagaacuacaucgacaaacagcuuuugccaauucugaauaagcaauccuguucaaucccgaaccccgaaacuguuauggaguuucagcagaaaaauaacaggcuacucgaaauaacccgggaguucagugugaaugcaggggucacaacuccugugagcaccuauaugcugacaaacucugagcuucuguccuugauuaacgauaugccaaucaccaaugaccagaagaaacucaugucaaacaaugugcaaauuguccgccagcagagcuacaguaucaugugcaucauuaaggaagagguucuggccuaugugguacaguuaccccuguacggagugauagauacgccuuguuggaaacuccauacuucuccacuuugcacaaccaacacuaaggaaggcuccaauaucugucugacacgaaccgaccguggcugguacugcgauaacgcugggagcgucucguuuuucccccaagccgagacguguaaggugugcucuaauagaguuuucugcgacaccaugaacuccuugacacuaccuucagaagugaaucuguguaacauugauaucuucaauccaaaauaugacugcaagauaaugacaaguaaaaccgaugucagcuccucugugauuacaagccucggagcaaucguaucauguuacgguaagacuaaaugcaccgcuaguaacaagaauaagggcaucauuaaaacauuuuccaacgggugugacuauguuagcaauaagggaguggacaccgucucugugggcaacacucuguacuaugucaacaaacaggagggucagucacuuuacgugaagggggagccgaucauuaauuucuaugauccccugguuuuuccuagugacgaauuugaugccagcauaucccaagugaacgagaaaaucaaucagucuuuggcguuuauuaggaagucggacgaacuccugcacaacguaaaugucggaaagagcacgacaaacaucaugaucaccacuauuauaaucgugauuaucguuauuuuacugcuacucaucgccgugggccuguuccuuuacugcaaagcacgguccaccccagucacauugucaaaggaucagcugaguggcauaaauaacaucgcuuucucuaauugaggacuaguacuggcugcaucucccuuuccucuguccuccauccuucucccaggauggugaagggggaccugguacccagugauccccaccccaggauccuaaaucaugacuuaccugcuaauaaaaacucauuggaaaagugagaagaucuaaaaaaaaaaaaaaaaaaaaaaaaaaaaaaaaaaaaaaaaaaaaaaaaaaaaaaaaaaaaaaaaugcaucccccccccccccccccccccccccccccccaaaggcucuuuucagagccaccagaauu

SEQ ID NO: 17963 - RNA, 2061 nt, Artificial Sequence
  mRNA product Design h-5 comprising derived and/or modified sequence from HRSV(Memphis-37)__AIY60640.1__F_DSCav1_mut6 (opt4)
gggagagggcgcuuggcuugcaaggacccugagcugcggcauugaagcacacccaacccaacucgacugaagucagccucacugaaccggaucugagaaucuucucucucugggcuugccagggcucuccgaaccuagcuagcauccucuucaauuccaacuagaaagcuuaccauggagcugcccauccugaagaccaacgccaucaccaccauccuggccgccgugacccugugcuucgccagcagccagaacaucaccgaggaguucuaccagagcaccugcagcgccgugagcaagggcuaccugggcgcccugagaaccggcugguacaccagcgugaucaccaucgagcugagcaacaucaaggagaacaagugcaacggcaccgacgccaaggugaagcugaucaagcaggagcuggacaaguacaagaacgccgugaccgaccugcagaugcugaugugcagcacccccgccgccggcagcggcagcgccaucgccagcggcaucgccgugugcaaggugcugcaccuggagggcgaggugaacaagaucaagaacgcccugcugagcaccaacaaggccguggugagccugagcaacggcgugagcgugcugaccuucaaggugcuggaccugaagaacuacaucgacaagcagcugcugcccauccugaacaagcagagcugcagcauccccaaccccgagaccgugauggaguuccagcagaagaacaacagacugcuggagaucaccagagaguucagcgugaacgccggcgugaccacccccgugagcaccuacaugcugaccaacagcgagcugcugagccugaucaacgacaugcccaucaccaacgaccagaagaagcugaugagcaacaacgugcagaucgugagacagcagagcuacagcaucaugugcaucaucaaggaggaggugcuggccuacguggugcagcugccccuguacggcgugaucgacacccccugcuggaagcugcacaccagcccccugugcaccaccaacaccaaggagggcagcaacaucugccugaccagaaccgacagaggcugguacugcgacaacgccggcagcgugagcuucuucccccaggccgagaccugcaaggugugcagcaacagaguguucugcgacaccaugaacagccugacccugcccagcgaggugaaccugugcaacaucgacaucuucaaccccaaguacgacugcaagaucaugaccagcaagaccgacgugagcagcagcgugaucaccagccugggcgccaucgugagcugcuacggcaagaccaagugcaccgccagcaacaagaacaagggcaucaucaagaccuucagcaacggcugcgacuacgugagcaacaagggcguggacaccgugagcgugggcaacacccuguacuacgugaacaagcaggagggccagagccuguacgugaagggcgagcccaucaucaacuucuacgacccccugguguuccccagcgacgaguucgacgccagcaucagccaggugaacgagaagaucaaccagagccuggccuucaucagaaagagcgacgagcugcugcacaacgugaacgugggcaagagcaccaccaacaucaugaucaccaccaucaucaucgugaucaucgugauccugcugcugcugaucgccgugggccuguuccuguacugcaaggccagaagcacccccgugacccugagcaaggaccagcugagcggcaucaacaacaucgccuucagcaacugaggacuaguacuggcugcaucucccuuuccucuguccuccauccuucucccaggauggugaagggggaccugguacccagugauccccaccccaggauccuaaaucaugacuuaccugcuaauaaaaacucauuggaaaagugagaagaucuaaaaaaaaaaaaaaaaaaaaaaaaaaaaaaaaaaaaaaaaaaaaaaaaaaaaaaaaaaaaaaaaugcaucccccccccccccccccccccccccccccccaaaggcucuuuucagagccaccagaauu

SEQ ID NO: 17964 - RNA, 2061 nt, Artificial Sequence
  mRNA product Design h-5 comprising derived and/or modified sequence from HRSV(Memphis-37)__AIY60640.1__F_DSCav1_mut6 (opt5)
gggagagggcgcuuggcuugcaaggacccugagcugcggcauugaagcacacccaacccaacucgacugaagucagccucacugaaccggaucugagaaucuucucucucugggcuugccagggcucuccgaaccuagcuagcauccucuucaauuccaacuagaaagcuuaccauggagcugcccauccucaagaccaacgccauuacaacgauccuggcugccgugacccuuugcuucgcgagcucccagaauauuacagaagaguuuuaccaaucuaccuguagcgcugucuccaaaggcuaucugggggcccucagaacaggaugguacaccucuguuaucacaauugaacugagcaacaucaaggagaauaaaugcaacggcaccgacgccaaggugaaacuuaucaagcaggaacuggauaaguauaaaaaugcugugacggaccuccagaugcugauguguuccaccccugccgcugggucuggaagcgccauugcguccggcaucgccgucugcaaggugcugcaccucgagggggagguuaacaaaauuaagaaugcucugcuuagcacaaacaaagccguggucucucuguccaauggagugagcguucucaccuucaaggugcuggaucuuaagaacuacaucgacaaacagcugcucccgauucugaauaagcaaucuuguuccauccccaacccugaaacagucauggaguuucagcagaaaaauaaccggcugcucgaaauuacccgcgaguucagcgugaaugcuggcgugacgacacccgucucuaccuauaugcugacaaacuccgagcuucugagccucaucaacgauaugccuaucaccaaugaccagaagaaacugauguccaacaauguucaaauugugagacagcagucuuacagcaucaugugcauuaucaaggaagaggugcuugccuaugucgugcagcugccccucuacggcguuauugauaccccuuguuggaaacugcauacauccccgcugugcacgaccaacacaaaggaagggagcaauaucugucucacccggacagaccgcggaugguacugcgauaacgcgggcucuguguccuuuuucccccaagccgagaccuguaaggucugcagcaauagaguguuuugcgacacgaugaacucucugacacuuccuagcgaaguuaaucuguguaacaucgauauuuucaaucccaaauaugacugcaagaucaugaccuccaaaaccgaugugucuagcuccgucauuacaagccucggggcuaucgugucuuguuacggaaagaccaaaugcacagccuccaacaagaauaagggcauuaucaaaacguuuagcaacgggugugacuaugucucuaauaagggaguggacaccguuuccgugggcaacacacuguacuaugucaacaaacaggagggccagagccuuuacgugaagggggagccuaucauuaauuucuaugauccccugguuuuuccguccgacgaauuugaugcuucuaucagccaagugaacgagaaaauuaaucagucccucgccuucauccggaagucugacgaacugcugcacaacgucaaugugggaaagagcaccacaaacauuaugaucaccacgauuaucaucgugauuaucguuauucuccugcuucugaucgccgucggccucuuccuguacugcaaagcucgcuccaccccugugacacugagcaaggaucagcuuucugggauuaauaacaucgcguucuccaauugaggacuaguacuggcugcaucucccuuuccucuguccuccauccuucucccaggauggugaagggggaccugguacccagugauccccaccccaggauccuaaaucaugacuuaccugcuaauaaaaacucauuggaaaagugagaagaucuaaaaaaaaaaaaaaaaaaaaaaaaaaaaaaaaaaaaaaaaaaaaaaaaaaaaaaaaaaaaaaaaugcaucccccccccccccccccccccccccccccccaaaggcucuuuucagagccaccagaauu

SEQ ID NO: 17965 - RNA, 2061 nt, Artificial Sequence
  mRNA product Design h-5 comprising derived and/or modified sequence from HRSV(Memphis-37)__AIY60640.1__F_DSCav1_mut6 (opt6)
gggagagggcgcuuggcuugcaaggacccugagcugcggcauugaagcacacccaacccaacucgacugaagucagccucacugaaccggaucugagaaucuucucucucugggcuugccagggcucuccgaaccuagcuagcauccucuucaauuccaacuagaaagcuuaccauggaacuaccaauuuuaaaaacaaacgcaauuacaacuauacucgcagcaguaacauuauguuucgccucaucccaaaacauaacagaagaauuuuaccaaucaacaugcagcgcaguaucaaaaggauaucucggagcauuacgaacagguugguacacaucuguaaucacuauagaacuaucaaacauaaaagaaaacaaaugcaauggaaccgacgcaaaaguaaaauuaauaaaacaagaacucgauaaauacaaaaaugcaguaacagaccuccaaaugcucauguguucaacaccagccgcaggaucagguuccgccauagcaucuggcauagcaguaugcaaaguacuccacuuagaaggagaaguuaacaaaauaaaaaacgcacuauuaucaacaaacaaagcaguaguaucccucucaaacggagucucaguauuaacauucaaaguauuagaccuaaaaaacuacauagacaaacaacuacuuccaauacucaacaaacaaucaugcucaauaccaaacccagaaaccguaauggaauuucaacaaaaaaacaaccgacuacuagaaaucacacgagaauuuucaguaaacgccggugucacaacuccaguaucaacuuauauguuaaccaacucagaacuauuaucauuaauaaacgauaugcccauaacuaacgaccaaaaaaaauuaaugucaaacaacguacaaauaguacgccaacaaaguuacucaauaaugugcaucauaaaagaagaaguauuagcguacguuguacaacuaccucuauacggagucauagacacaccaugcuggaaacuucacacaucaccacuauguacaacaaacacaaaagaaggcaguaacauaugccuaacaagaacagaccguggaugguauugugacaacgcuggaucuguaucauucuucccucaagcagaaaccuguaaaguuugcucaaacagagucuucugugacacaaugaacucucuaacacuaccuuccgaagugaaccucuguaacauagacauauucaauccaaaauaugauugcaaaauaaugacuucaaaaacagauguaucauccucuguuauaacaucauuaggcgccauaguuucaugcuacggaaaaacuaaaugcacagcaucaaacaaaaacaaaggaauaauaaaaaccuucucaaauggaugcgacuacguaagcaacaaaggcguagacacaguaucaguagguaauacauuauacuacguaaacaaacaagaaggacaaucacuuuauguuaaaggagaaccuauaauaaacuucuacgacccacuuguauuuccauccgaugaauuugacgcaucuauaucacaagucaacgaaaaaauaaaccaaucauuagcauucauucgaaaauccgaugaacuacuccauaacguaaaugucggaaaaucaacaaccaacauaaugaucacaacaauaaucauagugauaauaguaauacuccuacuacuaaucgcaguaggucuauuccuauauuguaaagcaagaucuacuccaguuacacucucuaaagaccaauuaagcgguaucaacaacaucgccuucagcaauuaaggacuaguacuggcugcaucucccuuuccucuguccuccauccuucucccaggauggugaagggggaccugguacccagugauccccaccccaggauccuaaaucaugacuuaccugcuaauaaaaacucauuggaaaagugagaagaucuaaaaaaaaaaaaaaaaaaaaaaaaaaaaaaaaaaaaaaaaaaaaaaaaaaaaaaaaaaaaaaaaugcaucccccccccccccccccccccccccccccccaaaggcucuuuucagagccaccagaauu

SEQ ID NO: 17966 - RNA, 2061 nt, Artificial Sequence
  mRNA product Design h-5 comprising derived and/or modified sequence from HRSV(Memphis-37)__AIY60640.1__F_DSCav1_mut6 (opt11)
gggagagggcgcuuggcuugcaaggacccugagcugcggcauugaagcacacccaacccaacucgacugaagucagccucacugaaccggaucugagaaucuucucucucugggcuugccagggcucuccgaaccuagcuagcauccucuucaauuccaacuagaaagcuuaccauggagcugcccauccucaagaccaacgccaucaccacgauccuggccgcggugacccugugcuucgcgagcucccaaaacaucaccgaggaguucuaccagagcacgugcuccgccgucagcaagggcuaccucggggcccugcgcaccggcugguacaccuccgugaucaccaucgagcugagcaacaucaaggaaaacaagugcaacgggacggacgcaaaggugaagcucaucaagcaggagcuggauaaguacaagaacgcggucacggaccugcagaugcucaugugcuccaccccggccgccggcagcggguccgccaucgcguccggcaucgccgugugcaagguguugcaccuggagggcgaggucaacaagaucaagaacgcccuccuuuccaccaauaaggcuguugugagccuguccaacggggucagcgugcucaccuucaaggugcuggaccugaagaacuacaucgacaagcagcuccugcccauccugaacaagcaguccugcagcauccccaaccccgagacagucauggaguuccagcagaagaacaaccggcuccuggagaucacccgcgaguucuccguuaacgccggggugaccaccccgguaagcacauacaugcugaccaacagcgagcuccugagccugaucaacgacaugcccaucaccaacgaccagaagaagcucaugagcaacaacgugcagaucgugcggcagcaguccuacagcaucaugugcaucaucaaggaggagguccuggcguacguggugcaacugccccucuacggggucaucgacacccccugcuggaagcugcacacguccccgcugugcaccaccaacaccaaggagggcagcaacaucugccucacgcgcaccgaccgggggugguacugcgacaacgcaggcuccgugagcuucuucccccaggccgagaccugcaaggugugcuccaaccgcgucuucugcgacaccaugaacagccugacgcugcccuccgaggugaaccucugcaacaucgacaucuucaaccccaaguacgacuguaagaucaugaccagcaagaccgaugucuccagcuccgugaucaccagccugggcgccauaguguccuguuaugggaagacgaagugcaccgccagcaacaagaacaaaggcaucaucaagaccuucuccaacgggugcgacuacgucagcaacaagggcguggacacaguguccgucggcaacacgcuguacuacgugaacaagcaggaggggcagagccucuacgugaagggcgagccgaucaucaacuucuacgauccccuggucuuccccagcgacgaguucgacgcguccaucagccaagugaacgagaagaucaaccagucccuggccuucauccgcaagagcgacgagcuccugcacaacgugaacgucgggaaguccaccaccaacaucaugaucaccaccaucaucaucgugaucaucgucauccugcuccugcugaucgccgucggccucuuccuguacugcaaggcccggagcacgcccgugacccuguccaaggaccagcugucgggcaucaacaacaucgccuucuccaacugaggacuaguacuggcugcaucucccuuuccucuguccuccauccuucucccaggauggugaagggggaccugguacccagugauccccaccccaggauccuaaaucaugacuuaccugcuaauaaaaacucauuggaaaagugagaagaucuaaaaaaaaaaaaaaaaaaaaaaaaaaaaaaaaaaaaaaaaaaaaaaaaaaaaaaaaaaaaaaaaugcaucccccccccccccccccccccccccccccccaaaggcucuuuucagagccaccagaauu

SEQ ID NO: 17967 - RNA, 1994 nt, Artificial Sequence
  mRNA product Design i-1 comprising derived and/or modified sequence from HRSV(Memphis-37)__AIY60640.1__F_DSCav1_mut6 (opt1)
gggagagggcgcuuggcuugcaaggacccugagcugcggcauugaagcacacccaacccaacucgacugaagucagccucacugaaccggaucugagaaucuucucucucugggcuugccagggcucuccgaaccuagcuagcauccucuucaauuccaacuagaaagcuuaccauggagcugcccauccucaagaccaacgccaucaccacgauccuggccgcggugacccugugcuucgccagcucccagaacaucaccgaggaguucuaccagagcacgugcuccgccgucagcaagggcuaccucggcgcccugcgcaccgggugguacaccagcgugaucaccaucgagcuguccaacaucaaggagaacaagugcaacggcaccgacgccaaggugaagcucaucaagcaggagcuggacaaguacaagaacgcggucacggaccugcagaugcugaugugcagcaccccggccgccggcuccgggagcgcgaucgccuccggcaucgccgucugcaaggugcugcaccucgagggcgaggugaacaagaucaagaacgcccugcuguccaccaacaaggccgucgugagccucuccaacggggugagcguccugaccuucaaggugcuggaccucaagaacuacaucgacaagcagcugcugcccauccugaacaagcagagcugcuccauccccaaccccgagaccgucauggaguuccagcagaagaacaaccgccuccuggagaucacgcgggaguucagcgugaacgcgggcgugaccacccccgucuccaccuacaugcugacgaacagcgagcuccugucccugaucaacgacaugccgaucaccaacgaccagaagaagcucaugagcaacaacgugcagaucgugcgccagcaguccuacagcaucaugugcaucaucaaggaggagguccuggccuacguggugcagcugccccucuacggggucaucgacacccccugcuggaagcugcacaccagcccccugugcacgaccaacaccaaggagggcuccaacaucugccucacccggacggaccgcgggugguacugcgacaacgccggcagcguguccuucuucccgcaggccgagaccugcaaggucugcagcaaccggguguucugcgacaccaugaacucccugacccugcccagcgaggugaaccucugcaacaucgacaucuucaaccccaaguacgacugcaagaucaugacguccaagaccgacgucagcuccagcgugaucaccucccugggcgccaucgugagcugcuacgggaagaccaagugcacggcgagcaacaagaacaagggcaucaucaagaccuucuccaacgggugcgacuacgucagcaacaagggcguggacaccguguccgucggcaacacccuguacuacgugaacaagcaggagggccagagccucuacgugaagggggagcccaucaucaacuucuacgacccgcuggucuuccccuccgacgaguucgacgccagcaucucccaggugaacgagaagaucaaccagagccuggccuucauccggaaguccgacgagcuccugcacaacgugaacgucggcaagagcaccacgaacaucaugaucaccaccaucaucaucgugaucaucgugauccugcugcuccugaucgccgucgggcuguuccucuacugcaaggcccgcuccacccccgugacgcugagcaaggaccagcuguccgggaucaacaacaucgcguucagcaacugaggacuaguguccaccugucccuccugggcugcuggauugucucguuuuccugccaaauaaacaggaucagcgcuuuacagaucuaaaaaaaaaaaaaaaaaaaaaaaaaaaaaaaaaaaaaaaaaaaaaaaaaaaaaaaaaaaaaaaaugcaucccccccccccccccccccccccccccccccaaaggcucuuuucagagccaccagaauu

SEQ ID NO: 17968 - RNA, 1994 nt, Artificial Sequence
  mRNA product Design i-1 comprising derived and/or modified sequence from HRSV(Memphis-37)__AIY60640.1__F_DSCav1_mut6 (opt1)
gggagagggcgcuuggcuugcaaggacccugagcugcggcauugaagcacacccaacccaacucgacugaagucagccucacugaaccggaucugagaaucuucucucucugggcuugccagggcucuccgaaccuagcuagcauccucuucaauuccaacuagaaagcuuaccauggagcugcccauccucaagaccaacgccaucaccacgauccuggccgcggugacccugugcuucgccagcucccagaacaucaccgaggaguucuaccagagcacgugcuccgccgucagcaagggcuaccucggggcccugcgcaccggcugguacaccuccgugaucaccaucgagcugagcaacaucaaggagaacaagugcaacgggaccgacgccaaggugaagcucaucaagcaggagcuggacaaguacaagaacgcggucacggaccugcagaugcucaugugcuccaccccggccgccggcagcggguccgccaucgcgagcggcaucgccgugugcaaggugcugcaccuggagggcgaggucaacaagaucaagaacgcccuccuguccaccaacaaggccguggugagccuguccaacggggucagcgugcucaccuucaaggugcuggaccugaagaacuacaucgacaagcagcuccugcccauccugaacaagcaguccugcagcauccccaaccccgagacggucauggaguuccagcagaagaacaaccggcuccuggagaucacccgcgaguucuccgugaacgccggcgugaccaccccggucagcacguacaugcugaccaacuccgagcuccugagccugaucaacgacaugcccaucaccaacgaccagaagaagcucaugagcaacaacgugcagaucgugcggcagcaguccuacagcaucaugugcaucaucaaggaggagguccuggcguacguggugcagcugccccucuacggggucaucgacacccccugcuggaagcugcacacguccccgcugugcaccaccaacaccaaggagggcagcaacaucugccucacgcgcaccgaccgggggugguacugcgacaacgccggcuccgugagcuucuucccccaggccgagaccugcaaggugugcuccaaccgcgucuucugcgacaccaugaacagccugacgcugcccuccgaggugaaccucugcaacaucgacaucuucaaccccaaguacgacugcaagaucaugaccagcaagaccgacgucuccagcuccgugaucaccagccugggcgccaucguguccugcuacgggaagacgaagugcaccgccagcaacaagaacaagggcaucaucaagaccuucuccaacgggugcgacuacgucagcaacaagggcguggacaccguguccgucggcaacacgcuguacuacgugaacaagcaggaggggcagagccucuacgugaagggcgagccgaucaucaacuucuacgacccccuggucuuccccagcgacgaguucgacgcguccaucagccaggugaacgagaagaucaaccagucccuggccuucauccgcaagagcgacgagcuccugcacaacgugaacgucgggaaguccaccaccaacaucaugaucaccaccaucaucaucgugaucaucgugauccugcuccugcugaucgccgucggccucuuccuguacugcaaggcccggagcacgcccgugacccuguccaaggaccagcugagcgggaucaacaacaucgccuucuccaacugaggacuaguguccaccugucccuccugggcugcuggauugucucguuuuccugccaaauaaacaggaucagcgcuuuacagaucuaaaaaaaaaaaaaaaaaaaaaaaaaaaaaaaaaaaaaaaaaaaaaaaaaaaaaaaaaaaaaaaaugcaucccccccccccccccccccccccccccccccaaaggcucuuuucagagccaccagaauu

SEQ ID NO: 17969 - RNA, 1994 nt, Artificial Sequence
  mRNA product Design i-1 comprising derived and/or modified sequence from HRSV(Memphis-37)__AIY60640.1__F_DSCav1_mut6 (opt2)
gggagagggcgcuuggcuugcaaggacccugagcugcggcauugaagcacacccaacccaacucgacugaagucagccucacugaaccggaucugagaaucuucucucucugggcuugccagggcucuccgaaccuagcuagcauccucuucaauuccaacuagaaagcuuaccauggagcuccccauccucaagaccaacgccaucaccaccauccucgccgccgucacccucugcuucgccuccucccagaacaucaccgaggaguucuaccaguccaccugcuccgccgucuccaagggcuaccucggcgcccuccgcaccggcugguacaccuccgucaucaccaucgagcucuccaacaucaaggagaacaagugcaacggcaccgacgccaaggucaagcucaucaagcaggagcucgacaaguacaagaacgccgucaccgaccuccagaugcucaugugcuccacccccgccgccggcuccggcuccgccaucgccuccggcaucgccgucugcaagguccuccaccucgagggcgaggucaacaagaucaagaacgcccuccucuccaccaacaaggccgucgucucccucuccaacggcgucuccguccucaccuucaagguccucgaccucaagaacuacaucgacaagcagcuccuccccauccucaacaagcaguccugcuccauccccaaccccgagaccgucauggaguuccagcagaagaacaaccgccuccucgagaucacccgcgaguucuccgucaacgccggcgucaccacccccgucuccaccuacaugcucaccaacuccgagcuccucucccucaucaacgacaugcccaucaccaacgaccagaagaagcucauguccaacaacguccagaucguccgccagcaguccuacuccaucaugugcaucaucaaggaggagguccucgccuacgucguccagcucccccucuacggcgucaucgacacccccugcuggaagcuccacaccuccccccucugcaccaccaacaccaaggagggcuccaacaucugccucacccgcaccgaccgcggcugguacugcgacaacgccggcuccgucuccuucuucccccaggccgagaccugcaaggucugcuccaaccgcgucuucugcgacaccaugaacucccucacccuccccuccgaggucaaccucugcaacaucgacaucuucaaccccaaguacgacugcaagaucaugaccuccaagaccgacgucuccuccuccgucaucaccucccucggcgccaucgucuccugcuacggcaagaccaagugcaccgccuccaacaagaacaagggcaucaucaagaccuucuccaacggcugcgacuacgucuccaacaagggcgucgacaccgucuccgucggcaacacccucuacuacgucaacaagcaggagggccagucccucuacgucaagggcgagcccaucaucaacuucuacgacccccucgucuuccccuccgacgaguucgacgccuccaucucccaggucaacgagaagaucaaccagucccucgccuucauccgcaaguccgacgagcuccuccacaacgucaacgucggcaaguccaccaccaacaucaugaucaccaccaucaucaucgucaucaucgucauccuccuccuccucaucgccgucggccucuuccucuacugcaaggcccgcuccacccccgucacccucuccaaggaccagcucuccggcaucaacaacaucgccuucuccaacugaggacuaguguccaccugucccuccugggcugcuggauugucucguuuuccugccaaauaaacaggaucagcgcuuuacagaucuaaaaaaaaaaaaaaaaaaaaaaaaaaaaaaaaaaaaaaaaaaaaaaaaaaaaaaaaaaaaaaaaugcaucccccccccccccccccccccccccccccccaaaggcucuuuucagagccaccagaauu

SEQ ID NO: 17970 - RNA, 1994 nt, Artificial Sequence
  mRNA product Design i-1 comprising derived and/or modified sequence from HRSV(Memphis-37)__AIY60640.1__F_DSCav1_mut6 (opt3)
gggagagggcgcuuggcuugcaaggacccugagcugcggcauugaagcacacccaacccaacucgacugaagucagccucacugaaccggaucugagaaucuucucucucugggcuugccagggcucuccgaaccuagcuagcauccucuucaauuccaacuagaaagcuuaccauggagcugcccauccucaagaccaacgccauuacaacuauacuugcugcagugacgcugugcuucgccagcucccagaauaucaccgaagaguuuuaccaaucuacauguucagcggucaguaaaggcuauuugggggcuuuaagaacuggaugguacaccagcguuauuacaaucgaacuguccaacauuaaggagaauaaaugcaacgguaccgacgccaaggugaaacuaaucaagcaggaacucgauaaguauaaaaaugcaguaacugaccugcagaugcuuauguguucuacuccugccgcuggcucggggucagcaauagccagcggaaucgcugugugcaagguccugcacuuggagggcgaggugaacaaaauuaagaaugcccuccugaguaccaacaaagcgguugugucccugucuaauggugucagcgugcucacguucaagguauuagaucugaagaacuacaucgacaaacagcuuuugccaauucugaauaagcaauccuguucaaucccgaaccccgaaacuguuauggaguuucagcagaaaaauaacaggcuacucgaaauaacccgggaguucagugugaaugcaggggucacaacuccugugagcaccuauaugcugacaaacucugagcuucuguccuugauuaacgauaugccaaucaccaaugaccagaagaaacucaugucaaacaaugugcaaauuguccgccagcagagcuacaguaucaugugcaucauuaaggaagagguucuggccuaugugguacaguuaccccuguacggagugauagauacgccuuguuggaaacuccauacuucuccacuuugcacaaccaacacuaaggaaggcuccaauaucugucugacacgaaccgaccguggcugguacugcgauaacgcugggagcgucucguuuuucccccaagccgagacguguaaggugugcucuaauagaguuuucugcgacaccaugaacuccuugacacuaccuucagaagugaaucuguguaacauugauaucuucaauccaaaauaugacugcaagauaaugacaaguaaaaccgaugucagcuccucugugauuacaagccucggagcaaucguaucauguuacgguaagacuaaaugcaccgcuaguaacaagaauaagggcaucauuaaaacauuuuccaacgggugugacuauguuagcaauaagggaguggacaccgucucugugggcaacacucuguacuaugucaacaaacaggagggucagucacuuuacgugaagggggagccgaucauuaauuucuaugauccccugguuuuuccuagugacgaauuugaugccagcauaucccaagugaacgagaaaaucaaucagucuuuggcguuuauuaggaagucggacgaacuccugcacaacguaaaugucggaaagagcacgacaaacaucaugaucaccacuauuauaaucgugauuaucguuauuuuacugcuacucaucgccgugggccuguuccuuuacugcaaagcacgguccaccccagucacauugucaaaggaucagcugaguggcauaaauaacaucgcuuucucuaauugaggacuaguguccaccugucccuccugggcugcuggauugucucguuuuccugccaaauaaacaggaucagcgcuuuacagaucuaaaaaaaaaaaaaaaaaaaaaaaaaaaaaaaaaaaaaaaaaaaaaaaaaaaaaaaaaaaaaaaaugcaucccccccccccccccccccccccccccccccaaaggcucuuuucagagccaccagaauu

SEQ ID NO: 17971 - RNA, 1994 nt, Artificial Sequence
  mRNA product Design i-1 comprising derived and/or modified sequence from HRSV(Memphis-37)__AIY60640.1__F_DSCav1_mut6 (opt4)
gggagagggcgcuuggcuugcaaggacccugagcugcggcauugaagcacacccaacccaacucgacugaagucagccucacugaaccggaucugagaaucuucucucucugggcuugccagggcucuccgaaccuagcuagcauccucuucaauuccaacuagaaagcuuaccauggagcugcccauccugaagaccaacgccaucaccaccauccuggccgccgugacccugugcuucgccagcagccagaacaucaccgaggaguucuaccagagcaccugcagcgccgugagcaagggcuaccugggcgcccugagaaccggcugguacaccagcgugaucaccaucgagcugagcaacaucaaggagaacaagugcaacggcaccgacgccaaggugaagcugaucaagcaggagcuggacaaguacaagaacgccgugaccgaccugcagaugcugaugugcagcacccccgccgccggcagcggcagcgccaucgccagcggcaucgccgugugcaaggugcugcaccuggagggcgaggugaacaagaucaagaacgcccugcugagcaccaacaaggccguggugagccugagcaacggcgugagcgugcugaccuucaaggugcuggaccugaagaacuacaucgacaagcagcugcugcccauccugaacaagcagagcugcagcauccccaaccccgagaccgugauggaguuccagcagaagaacaacagacugcuggagaucaccagagaguucagcgugaacgccggcgugaccacccccgugagcaccuacaugcugaccaacagcgagcugcugagccugaucaacgacaugcccaucaccaacgaccagaagaagcugaugagcaacaacgugcagaucgugagacagcagagcuacagcaucaugugcaucaucaaggaggaggugcuggccuacguggugcagcugccccuguacggcgugaucgacacccccugcuggaagcugcacaccagcccccugugcaccaccaacaccaaggagggcagcaacaucugccugaccagaaccgacagaggcugguacugcgacaacgccggcagcgugagcuucuucccccaggccgagaccugcaaggugugcagcaacagaguguucugcgacaccaugaacagccugacccugcccagcgaggugaaccugugcaacaucgacaucuucaaccccaaguacgacugcaagaucaugaccagcaagaccgacgugagcagcagcgugaucaccagccugggcgccaucgugagcugcuacggcaagaccaagugcaccgccagcaacaagaacaagggcaucaucaagaccuucagcaacggcugcgacuacgugagcaacaagggcguggacaccgugagcgugggcaacacccuguacuacgugaacaagcaggagggccagagccuguacgugaagggcgagcccaucaucaacuucuacgacccccugguguuccccagcgacgaguucgacgccagcaucagccaggugaacgagaagaucaaccagagccuggccuucaucagaaagagcgacgagcugcugcacaacgugaacgugggcaagagcaccaccaacaucaugaucaccaccaucaucaucgugaucaucgugauccugcugcugcugaucgccgugggccuguuccuguacugcaaggccagaagcacccccgugacccugagcaaggaccagcugagcggcaucaacaacaucgccuucagcaacugaggacuaguguccaccugucccuccugggcugcuggauugucucguuuuccugccaaauaaacaggaucagcgcuuuacagaucuaaaaaaaaaaaaaaaaaaaaaaaaaaaaaaaaaaaaaaaaaaaaaaaaaaaaaaaaaaaaaaaaugcaucccccccccccccccccccccccccccccccaaaggcucuuuucagagccaccagaauu

SEQ ID NO: 17972 - RNA, 1994 nt, Artificial Sequence
  mRNA product Design i-1 comprising derived and/or modified sequence from HRSV(Memphis-37)__AIY60640.1__F_DSCav1_mut6 (opt5)
gggagagggcgcuuggcuugcaaggacccugagcugcggcauugaagcacacccaacccaacucgacugaagucagccucacugaaccggaucugagaaucuucucucucugggcuugccagggcucuccgaaccuagcuagcauccucuucaauuccaacuagaaagcuuaccauggagcugcccauccucaagaccaacgccauuacaacgauccuggcugccgugacccuuugcuucgcgagcucccagaauauuacagaagaguuuuaccaaucuaccuguagcgcugucuccaaaggcuaucugggggcccucagaacaggaugguacaccucuguuaucacaauugaacugagcaacaucaaggagaauaaaugcaacggcaccgacgccaaggugaaacuuaucaagcaggaacuggauaaguauaaaaaugcugugacggaccuccagaugcugauguguuccaccccugccgcugggucuggaagcgccauugcguccggcaucgccgucugcaaggugcugcaccucgagggggagguuaacaaaauuaagaaugcucugcuuagcacaaacaaagccguggucucucuguccaauggagugagcguucucaccuucaaggugcuggaucuuaagaacuacaucgacaaacagcugcucccgauucugaauaagcaaucuuguuccauccccaacccugaaacagucauggaguuucagcagaaaaauaaccggcugcucgaaauuacccgcgaguucagcgugaaugcuggcgugacgacacccgucucuaccuauaugcugacaaacuccgagcuucugagccucaucaacgauaugccuaucaccaaugaccagaagaaacugauguccaacaauguucaaauugugagacagcagucuuacagcaucaugugcauuaucaaggaagaggugcuugccuaugucgugcagcugccccucuacggcguuauugauaccccuuguuggaaacugcauacauccccgcugugcacgaccaacacaaaggaagggagcaauaucugucucacccggacagaccgcggaugguacugcgauaacgcgggcucuguguccuuuuucccccaagccgagaccuguaaggucugcagcaauagaguguuuugcgacacgaugaacucucugacacuuccuagcgaaguuaaucuguguaacaucgauauuuucaaucccaaauaugacugcaagaucaugaccuccaaaaccgaugugucuagcuccgucauuacaagccucggggcuaucgugucuuguuacggaaagaccaaaugcacagccuccaacaagaauaagggcauuaucaaaacguuuagcaacgggugugacuaugucucuaauaagggaguggacaccguuuccgugggcaacacacuguacuaugucaacaaacaggagggccagagccuuuacgugaagggggagccuaucauuaauuucuaugauccccugguuuuuccguccgacgaauuugaugcuucuaucagccaagugaacgagaaaauuaaucagucccucgccuucauccggaagucugacgaacugcugcacaacgucaaugugggaaagagcaccacaaacauuaugaucaccacgauuaucaucgugauuaucguuauucuccugcuucugaucgccgucggccucuuccuguacugcaaagcucgcuccaccccugugacacugagcaaggaucagcuuucugggauuaauaacaucgcguucuccaauugaggacuaguguccaccugucccuccugggcugcuggauugucucguuuuccugccaaauaaacaggaucagcgcuuuacagaucuaaaaaaaaaaaaaaaaaaaaaaaaaaaaaaaaaaaaaaaaaaaaaaaaaaaaaaaaaaaaaaaaugcaucccccccccccccccccccccccccccccccaaaggcucuuuucagagccaccagaauu

SEQ ID NO: 17973 - RNA, 1994 nt, Artificial Sequence
  mRNA product Design i-1 comprising derived and/or modified sequence from HRSV(Memphis-37)__AIY60640.1__F_DSCav1_mut6 (opt6)
gggagagggcgcuuggcuugcaaggacccugagcugcggcauugaagcacacccaacccaacucgacugaagucagccucacugaaccggaucugagaaucuucucucucugggcuugccagggcucuccgaaccuagcuagcauccucuucaauuccaacuagaaagcuuaccauggaacuaccaauuuuaaaaacaaacgcaauuacaacuauacucgcagcaguaacauuauguuucgccucaucccaaaacauaacagaagaauuuuaccaaucaacaugcagcgcaguaucaaaaggauaucucggagcauuacgaacagguugguacacaucuguaaucacuauagaacuaucaaacauaaaagaaaacaaaugcaauggaaccgacgcaaaaguaaaauuaauaaaacaagaacucgauaaauacaaaaaugcaguaacagaccuccaaaugcucauguguucaacaccagccgcaggaucagguuccgccauagcaucuggcauagcaguaugcaaaguacuccacuuagaaggagaaguuaacaaaauaaaaaacgcacuauuaucaacaaacaaagcaguaguaucccucucaaacggagucucaguauuaacauucaaaguauuagaccuaaaaaacuacauagacaaacaacuacuuccaauacucaacaaacaaucaugcucaauaccaaacccagaaaccguaauggaauuucaacaaaaaaacaaccgacuacuagaaaucacacgagaauuuucaguaaacgccggugucacaacuccaguaucaacuuauauguuaaccaacucagaacuauuaucauuaauaaacgauaugcccauaacuaacgaccaaaaaaaauuaaugucaaacaacguacaaauaguacgccaacaaaguuacucaauaaugugcaucauaaaagaagaaguauuagcguacguuguacaacuaccucuauacggagucauagacacaccaugcuggaaacuucacacaucaccacuauguacaacaaacacaaaagaaggcaguaacauaugccuaacaagaacagaccguggaugguauugugacaacgcuggaucuguaucauucuucccucaagcagaaaccuguaaaguuugcucaaacagagucuucugugacacaaugaacucucuaacacuaccuuccgaagugaaccucuguaacauagacauauucaauccaaaauaugauugcaaaauaaugacuucaaaaacagauguaucauccucuguuauaacaucauuaggcgccauaguuucaugcuacggaaaaacuaaaugcacagcaucaaacaaaaacaaaggaauaauaaaaaccuucucaaauggaugcgacuacguaagcaacaaaggcguagacacaguaucaguagguaauacauuauacuacguaaacaaacaagaaggacaaucacuuuauguuaaaggagaaccuauaauaaacuucuacgacccacuuguauuuccauccgaugaauuugacgcaucuauaucacaagucaacgaaaaaauaaaccaaucauuagcauucauucgaaaauccgaugaacuacuccauaacguaaaugucggaaaaucaacaaccaacauaaugaucacaacaauaaucauagugauaauaguaauacuccuacuacuaaucgcaguaggucuauuccuauauuguaaagcaagaucuacuccaguuacacucucuaaagaccaauuaagcgguaucaacaacaucgccuucagcaauuaaggacuaguguccaccugucccuccugggcugcuggauugucucguuuuccugccaaauaaacaggaucagcgcuuuacagaucuaaaaaaaaaaaaaaaaaaaaaaaaaaaaaaaaaaaaaaaaaaaaaaaaaaaaaaaaaaaaaaaaugcaucccccccccccccccccccccccccccccccaaaggcucuuuucagagccaccagaauu

SEQ ID NO: 17974 - RNA, 1994 nt, Artificial Sequence
  mRNA product Design i-1 comprising derived and/or modified sequence from HRSV(Memphis-37)__AIY60640.1__F_DSCav1_mut6 (opt11)
gggagagggcgcuuggcuugcaaggacccugagcugcggcauugaagcacacccaacccaacucgacugaagucagccucacugaaccggaucugagaaucuucucucucugggcuugccagggcucuccgaaccuagcuagcauccucuucaauuccaacuagaaagcuuaccauggagcugcccauccucaagaccaacgccaucaccacgauccuggccgcggugacccugugcuucgcgagcucccaaaacaucaccgaggaguucuaccagagcacgugcuccgccgucagcaagggcuaccucggggcccugcgcaccggcugguacaccuccgugaucaccaucgagcugagcaacaucaaggaaaacaagugcaacgggacggacgcaaaggugaagcucaucaagcaggagcuggauaaguacaagaacgcggucacggaccugcagaugcucaugugcuccaccccggccgccggcagcggguccgccaucgcguccggcaucgccgugugcaagguguugcaccuggagggcgaggucaacaagaucaagaacgcccuccuuuccaccaauaaggcuguugugagccuguccaacggggucagcgugcucaccuucaaggugcuggaccugaagaacuacaucgacaagcagcuccugcccauccugaacaagcaguccugcagcauccccaaccccgagacagucauggaguuccagcagaagaacaaccggcuccuggagaucacccgcgaguucuccguuaacgccggggugaccaccccgguaagcacauacaugcugaccaacagcgagcuccugagccugaucaacgacaugcccaucaccaacgaccagaagaagcucaugagcaacaacgugcagaucgugcggcagcaguccuacagcaucaugugcaucaucaaggaggagguccuggcguacguggugcaacugccccucuacggggucaucgacacccccugcuggaagcugcacacguccccgcugugcaccaccaacaccaaggagggcagcaacaucugccucacgcgcaccgaccgggggugguacugcgacaacgcaggcuccgugagcuucuucccccaggccgagaccugcaaggugugcuccaaccgcgucuucugcgacaccaugaacagccugacgcugcccuccgaggugaaccucugcaacaucgacaucuucaaccccaaguacgacuguaagaucaugaccagcaagaccgaugucuccagcuccgugaucaccagccugggcgccauaguguccuguuaugggaagacgaagugcaccgccagcaacaagaacaaaggcaucaucaagaccuucuccaacgggugcgacuacgucagcaacaagggcguggacacaguguccgucggcaacacgcuguacuacgugaacaagcaggaggggcagagccucuacgugaagggcgagccgaucaucaacuucuacgauccccuggucuuccccagcgacgaguucgacgcguccaucagccaagugaacgagaagaucaaccagucccuggccuucauccgcaagagcgacgagcuccugcacaacgugaacgucgggaaguccaccaccaacaucaugaucaccaccaucaucaucgugaucaucgucauccugcuccugcugaucgccgucggccucuuccuguacugcaaggcccggagcacgcccgugacccuguccaaggaccagcugucgggcaucaacaacaucgccuucuccaacugaggacuaguguccaccugucccuccugggcugcuggauugucucguuuuccugccaaauaaacaggaucagcgcuuuacagaucuaaaaaaaaaaaaaaaaaaaaaaaaaaaaaaaaaaaaaaaaaaaaaaaaaaaaaaaaaaaaaaaaugcaucccccccccccccccccccccccccccccccaaaggcucuuuucagagccaccagaauu

SEQ ID NO: 17975 - RNA, 1994 nt, Artificial Sequence
  mRNA product Design i-2 comprising derived and/or modified sequence from HRSV(Memphis-37)__AIY60640.1__F_DSCav1_mut6 (opt1)
gggagaggcgcugccuacggagguggcagccaucuccuucucggcaucaagcuuaccauggagcugcccauccucaagaccaacgccaucaccacgauccuggccgcggugacccugugcuucgccagcucccagaacaucaccgaggaguucuaccagagcacgugcuccgccgucagcaagggcuaccucggcgcccugcgcaccgggugguacaccagcgugaucaccaucgagcuguccaacaucaaggagaacaagugcaacggcaccgacgccaaggugaagcucaucaagcaggagcuggacaaguacaagaacgcggucacggaccugcagaugcugaugugcagcaccccggccgccggcuccgggagcgcgaucgccuccggcaucgccgucugcaaggugcugcaccucgagggcgaggugaacaagaucaagaacgcccugcuguccaccaacaaggccgucgugagccucuccaacggggugagcguccugaccuucaaggugcuggaccucaagaacuacaucgacaagcagcugcugcccauccugaacaagcagagcugcuccauccccaaccccgagaccgucauggaguuccagcagaagaacaaccgccuccuggagaucacgcgggaguucagcgugaacgcgggcgugaccacccccgucuccaccuacaugcugacgaacagcgagcuccugucccugaucaacgacaugccgaucaccaacgaccagaagaagcucaugagcaacaacgugcagaucgugcgccagcaguccuacagcaucaugugcaucaucaaggaggagguccuggccuacguggugcagcugccccucuacggggucaucgacacccccugcuggaagcugcacaccagcccccugugcacgaccaacaccaaggagggcuccaacaucugccucacccggacggaccgcgggugguacugcgacaacgccggcagcguguccuucuucccgcaggccgagaccugcaaggucugcagcaaccggguguucugcgacaccaugaacucccugacccugcccagcgaggugaaccucugcaacaucgacaucuucaaccccaaguacgacugcaagaucaugacguccaagaccgacgucagcuccagcgugaucaccucccugggcgccaucgugagcugcuacgggaagaccaagugcacggcgagcaacaagaacaagggcaucaucaagaccuucuccaacgggugcgacuacgucagcaacaagggcguggacaccguguccgucggcaacacccuguacuacgugaacaagcaggagggccagagccucuacgugaagggggagcccaucaucaacuucuacgacccgcuggucuuccccuccgacgaguucgacgccagcaucucccaggugaacgagaagaucaaccagagccuggccuucauccggaaguccgacgagcuccugcacaacgugaacgucggcaagagcaccacgaacaucaugaucaccaccaucaucaucgugaucaucgugauccugcugcuccugaucgccgucgggcuguuccucuacugcaaggcccgcuccacccccgugacgcugagcaaggaccagcuguccgggaucaacaacaucgcguucagcaacugaggacuagugcaucacauuuaaaagcaucucagccuaccaugagaauaagagaaagaaaaugaagaucaauagcuuauucaucucuuuuucuuuuucguugguguaaagccaacacccugucuaaaaaacauaaauuucuuuaaucauuuugccucuuuucucugugcuucaauuaauaaaaaauggaaagaaccuagaucuaaaaaaaaaaaaaaaaaaaaaaaaaaaaaaaaaaaaaaaaaaaaaaaaaaaaaaaaaaaaaaaaugcaucccccccccccccccccccccccccccccccaaaggcucuuuucagagccaccagaauu

SEQ ID NO: 17976 - RNA, 1994 nt, Artificial Sequence
  mRNA product Design i-2 comprising derived and/or modified sequence from HRSV(Memphis-37)__AIY60640.1__F_DSCav1_mut6 (opt1)
gggagaggcgcugccuacggagguggcagccaucuccuucucggcaucaagcuuaccauggagcugcccauccucaagaccaacgccaucaccacgauccuggccgcggugacccugugcuucgccagcucccagaacaucaccgaggaguucuaccagagcacgugcuccgccgucagcaagggcuaccucggggcccugcgcaccggcugguacaccuccgugaucaccaucgagcugagcaacaucaaggagaacaagugcaacgggaccgacgccaaggugaagcucaucaagcaggagcuggacaaguacaagaacgcggucacggaccugcagaugcucaugugcuccaccccggccgccggcagcggguccgccaucgcgagcggcaucgccgugugcaaggugcugcaccuggagggcgaggucaacaagaucaagaacgcccuccuguccaccaacaaggccguggugagccuguccaacggggucagcgugcucaccuucaaggugcuggaccugaagaacuacaucgacaagcagcuccugcccauccugaacaagcaguccugcagcauccccaaccccgagacggucauggaguuccagcagaagaacaaccggcuccuggagaucacccgcgaguucuccgugaacgccggcgugaccaccccggucagcacguacaugcugaccaacuccgagcuccugagccugaucaacgacaugcccaucaccaacgaccagaagaagcucaugagcaacaacgugcagaucgugcggcagcaguccuacagcaucaugugcaucaucaaggaggagguccuggcguacguggugcagcugccccucuacggggucaucgacacccccugcuggaagcugcacacguccccgcugugcaccaccaacaccaaggagggcagcaacaucugccucacgcgcaccgaccgggggugguacugcgacaacgccggcuccgugagcuucuucccccaggccgagaccugcaaggugugcuccaaccgcgucuucugcgacaccaugaacagccugacgcugcccuccgaggugaaccucugcaacaucgacaucuucaaccccaaguacgacugcaagaucaugaccagcaagaccgacgucuccagcuccgugaucaccagccugggcgccaucguguccugcuacgggaagacgaagugcaccgccagcaacaagaacaagggcaucaucaagaccuucuccaacgggugcgacuacgucagcaacaagggcguggacaccguguccgucggcaacacgcuguacuacgugaacaagcaggaggggcagagccucuacgugaagggcgagccgaucaucaacuucuacgacccccuggucuuccccagcgacgaguucgacgcguccaucagccaggugaacgagaagaucaaccagucccuggccuucauccgcaagagcgacgagcuccugcacaacgugaacgucgggaaguccaccaccaacaucaugaucaccaccaucaucaucgugaucaucgugauccugcuccugcugaucgccgucggccucuuccuguacugcaaggcccggagcacgcccgugacccuguccaaggaccagcugagcgggaucaacaacaucgccuucuccaacugaggacuagugcaucacauuuaaaagcaucucagccuaccaugagaauaagagaaagaaaaugaagaucaauagcuuauucaucucuuuuucuuuuucguugguguaaagccaacacccugucuaaaaaacauaaauuucuuuaaucauuuugccucuuuucucugugcuucaauuaauaaaaaauggaaagaaccuagaucuaaaaaaaaaaaaaaaaaaaaaaaaaaaaaaaaaaaaaaaaaaaaaaaaaaaaaaaaaaaaaaaaugcaucccccccccccccccccccccccccccccccaaaggcucuuuucagagccaccagaauu

SEQ ID NO: 17977 - RNA, 1994 nt, Artificial Sequence
  mRNA product Design i-2 comprising derived and/or modified sequence from HRSV(Memphis-37)__AIY60640.1__F_DSCav1_mut6 (opt2)
gggagaggcgcugccuacggagguggcagccaucuccuucucggcaucaagcuuaccauggagcuccccauccucaagaccaacgccaucaccaccauccucgccgccgucacccucugcuucgccuccucccagaacaucaccgaggaguucuaccaguccaccugcuccgccgucuccaagggcuaccucggcgcccuccgcaccggcugguacaccuccgucaucaccaucgagcucuccaacaucaaggagaacaagugcaacggcaccgacgccaaggucaagcucaucaagcaggagcucgacaaguacaagaacgccgucaccgaccuccagaugcucaugugcuccacccccgccgccggcuccggcuccgccaucgccuccggcaucgccgucugcaagguccuccaccucgagggcgaggucaacaagaucaagaacgcccuccucuccaccaacaaggccgucgucucccucuccaacggcgucuccguccucaccuucaagguccucgaccucaagaacuacaucgacaagcagcuccuccccauccucaacaagcaguccugcuccauccccaaccccgagaccgucauggaguuccagcagaagaacaaccgccuccucgagaucacccgcgaguucuccgucaacgccggcgucaccacccccgucuccaccuacaugcucaccaacuccgagcuccucucccucaucaacgacaugcccaucaccaacgaccagaagaagcucauguccaacaacguccagaucguccgccagcaguccuacuccaucaugugcaucaucaaggaggagguccucgccuacgucguccagcucccccucuacggcgucaucgacacccccugcuggaagcuccacaccuccccccucugcaccaccaacaccaaggagggcuccaacaucugccucacccgcaccgaccgcggcugguacugcgacaacgccggcuccgucuccuucuucccccaggccgagaccugcaaggucugcuccaaccgcgucuucugcgacaccaugaacucccucacccuccccuccgaggucaaccucugcaacaucgacaucuucaaccccaaguacgacugcaagaucaugaccuccaagaccgacgucuccuccuccgucaucaccucccucggcgccaucgucuccugcuacggcaagaccaagugcaccgccuccaacaagaacaagggcaucaucaagaccuucuccaacggcugcgacuacgucuccaacaagggcgucgacaccgucuccgucggcaacacccucuacuacgucaacaagcaggagggccagucccucuacgucaagggcgagcccaucaucaacuucuacgacccccucgucuuccccuccgacgaguucgacgccuccaucucccaggucaacgagaagaucaaccagucccucgccuucauccgcaaguccgacgagcuccuccacaacgucaacgucggcaaguccaccaccaacaucaugaucaccaccaucaucaucgucaucaucgucauccuccuccuccucaucgccgucggccucuuccucuacugcaaggcccgcuccacccccgucacccucuccaaggaccagcucuccggcaucaacaacaucgccuucuccaacugaggacuagugcaucacauuuaaaagcaucucagccuaccaugagaauaagagaaagaaaaugaagaucaauagcuuauucaucucuuuuucuuuuucguugguguaaagccaacacccugucuaaaaaacauaaauuucuuuaaucauuuugccucuuuucucugugcuucaauuaauaaaaaauggaaagaaccuagaucuaaaaaaaaaaaaaaaaaaaaaaaaaaaaaaaaaaaaaaaaaaaaaaaaaaaaaaaaaaaaaaaaugcaucccccccccccccccccccccccccccccccaaaggcucuuuucagagccaccagaauu

SEQ ID NO: 17978 - RNA, 1994 nt, Artificial Sequence
  mRNA product Design i-2 comprising derived and/or modified sequence from HRSV(Memphis-37)__AIY60640.1__F_DSCav1_mut6 (opt3)
gggagaggcgcugccuacggagguggcagccaucuccuucucggcaucaagcuuaccauggagcugcccauccucaagaccaacgccauuacaacuauacuugcugcagugacgcugugcuucgccagcucccagaauaucaccgaagaguuuuaccaaucuacauguucagcggucaguaaaggcuauuugggggcuuuaagaacuggaugguacaccagcguuauuacaaucgaacuguccaacauuaaggagaauaaaugcaacgguaccgacgccaaggugaaacuaaucaagcaggaacucgauaaguauaaaaaugcaguaacugaccugcagaugcuuauguguucuacuccugccgcuggcucggggucagcaauagccagcggaaucgcugugugcaagguccugcacuuggagggcgaggugaacaaaauuaagaaugcccuccugaguaccaacaaagcgguugugucccugucuaauggugucagcgugcucacguucaagguauuagaucugaagaacuacaucgacaaacagcuuuugccaauucugaauaagcaauccuguucaaucccgaaccccgaaacuguuauggaguuucagcagaaaaauaacaggcuacucgaaauaacccgggaguucagugugaaugcaggggucacaacuccugugagcaccuauaugcugacaaacucugagcuucuguccuugauuaacgauaugccaaucaccaaugaccagaagaaacucaugucaaacaaugugcaaauuguccgccagcagagcuacaguaucaugugcaucauuaaggaagagguucuggccuaugugguacaguuaccccuguacggagugauagauacgccuuguuggaaacuccauacuucuccacuuugcacaaccaacacuaaggaaggcuccaauaucugucugacacgaaccgaccguggcugguacugcgauaacgcugggagcgucucguuuuucccccaagccgagacguguaaggugugcucuaauagaguuuucugcgacaccaugaacuccuugacacuaccuucagaagugaaucuguguaacauugauaucuucaauccaaaauaugacugcaagauaaugacaaguaaaaccgaugucagcuccucugugauuacaagccucggagcaaucguaucauguuacgguaagacuaaaugcaccgcuaguaacaagaauaagggcaucauuaaaacauuuuccaacgggugugacuauguuagcaauaagggaguggacaccgucucugugggcaacacucuguacuaugucaacaaacaggagggucagucacuuuacgugaagggggagccgaucauuaauuucuaugauccccugguuuuuccuagugacgaauuugaugccagcauaucccaagugaacgagaaaaucaaucagucuuuggcguuuauuaggaagucggacgaacuccugcacaacguaaaugucggaaagagcacgacaaacaucaugaucaccacuauuauaaucgugauuaucguuauuuuacugcuacucaucgccgugggccuguuccuuuacugcaaagcacgguccaccccagucacauugucaaaggaucagcugaguggcauaaauaacaucgcuuucucuaauugaggacuagugcaucacauuuaaaagcaucucagccuaccaugagaauaagagaaagaaaaugaagaucaauagcuuauucaucucuuuuucuuuuucguugguguaaagccaacacccugucuaaaaaacauaaauuucuuuaaucauuuugccucuuuucucugugcuucaauuaauaaaaaauggaaagaaccuagaucuaaaaaaaaaaaaaaaaaaaaaaaaaaaaaaaaaaaaaaaaaaaaaaaaaaaaaaaaaaaaaaaaugcaucccccccccccccccccccccccccccccccaaaggcucuuuucagagccaccagaauu

SEQ ID NO: 17979 - RNA, 1994 nt, Artificial Sequence
  mRNA product Design i-2 comprising derived and/or modified sequence from HRSV(Memphis-37)__AIY60640.1__F_DSCav1_mut6 (opt4)
gggagaggcgcugccuacggagguggcagccaucuccuucucggcaucaagcuuaccauggagcugcccauccugaagaccaacgccaucaccaccauccuggccgccgugacccugugcuucgccagcagccagaacaucaccgaggaguucuaccagagcaccugcagcgccgugagcaagggcuaccugggcgcccugagaaccggcugguacaccagcgugaucaccaucgagcugagcaacaucaaggagaacaagugcaacggcaccgacgccaaggugaagcugaucaagcaggagcuggacaaguacaagaacgccgugaccgaccugcagaugcugaugugcagcacccccgccgccggcagcggcagcgccaucgccagcggcaucgccgugugcaaggugcugcaccuggagggcgaggugaacaagaucaagaacgcccugcugagcaccaacaaggccguggugagccugagcaacggcgugagcgugcugaccuucaaggugcuggaccugaagaacuacaucgacaagcagcugcugcccauccugaacaagcagagcugcagcauccccaaccccgagaccgugauggaguuccagcagaagaacaacagacugcuggagaucaccagagaguucagcgugaacgccggcgugaccacccccgugagcaccuacaugcugaccaacagcgagcugcugagccugaucaacgacaugcccaucaccaacgaccagaagaagcugaugagcaacaacgugcagaucgugagacagcagagcuacagcaucaugugcaucaucaaggaggaggugcuggccuacguggugcagcugccccuguacggcgugaucgacacccccugcuggaagcugcacaccagcccccugugcaccaccaacaccaaggagggcagcaacaucugccugaccagaaccgacagaggcugguacugcgacaacgccggcagcgugagcuucuucccccaggccgagaccugcaaggugugcagcaacagaguguucugcgacaccaugaacagccugacccugcccagcgaggugaaccugugcaacaucgacaucuucaaccccaaguacgacugcaagaucaugaccagcaagaccgacgugagcagcagcgugaucaccagccugggcgccaucgugagcugcuacggcaagaccaagugcaccgccagcaacaagaacaagggcaucaucaagaccuucagcaacggcugcgacuacgugagcaacaagggcguggacaccgugagcgugggcaacacccuguacuacgugaacaagcaggagggccagagccuguacgugaagggcgagcccaucaucaacuucuacgacccccugguguuccccagcgacgaguucgacgccagcaucagccaggugaacgagaagaucaaccagagccuggccuucaucagaaagagcgacgagcugcugcacaacgugaacgugggcaagagcaccaccaacaucaugaucaccaccaucaucaucgugaucaucgugauccugcugcugcugaucgccgugggccuguuccuguacugcaaggccagaagcacccccgugacccugagcaaggaccagcugagcggcaucaacaacaucgccuucagcaacugaggacuagugcaucacauuuaaaagcaucucagccuaccaugagaauaagagaaagaaaaugaagaucaauagcuuauucaucucuuuuucuuuuucguugguguaaagccaacacccugucuaaaaaacauaaauuucuuuaaucauuuugccucuuuucucugugcuucaauuaauaaaaaauggaaagaaccuagaucuaaaaaaaaaaaaaaaaaaaaaaaaaaaaaaaaaaaaaaaaaaaaaaaaaaaaaaaaaaaaaaaaugcaucccccccccccccccccccccccccccccccaaaggcucuuuucagagccaccagaauu

SEQ ID NO: 17980 - RNA, 1994 nt, Artificial Sequence
  mRNA product Design i-2 comprising derived and/or modified sequence from HRSV(Memphis-37)__AIY60640.1__F_DSCav1_mut6 (opt5)
gggagaggcgcugccuacggagguggcagccaucuccuucucggcaucaagcuuaccauggagcugcccauccucaagaccaacgccauuacaacgauccuggcugccgugacccuuugcuucgcgagcucccagaauauuacagaagaguuuuaccaaucuaccuguagcgcugucuccaaaggcuaucugggggcccucagaacaggaugguacaccucuguuaucacaauugaacugagcaacaucaaggagaauaaaugcaacggcaccgacgccaaggugaaacuuaucaagcaggaacuggauaaguauaaaaaugcugugacggaccuccagaugcugauguguuccaccccugccgcugggucuggaagcgccauugcguccggcaucgccgucugcaaggugcugcaccucgagggggagguuaacaaaauuaagaaugcucugcuuagcacaaacaaagccguggucucucuguccaauggagugagcguucucaccuucaaggugcuggaucuuaagaacuacaucgacaaacagcugcucccgauucugaauaagcaaucuuguuccauccccaacccugaaacagucauggaguuucagcagaaaaauaaccggcugcucgaaauuacccgcgaguucagcgugaaugcuggcgugacgacacccgucucuaccuauaugcugacaaacuccgagcuucugagccucaucaacgauaugccuaucaccaaugaccagaagaaacugauguccaacaauguucaaauugugagacagcagucuuacagcaucaugugcauuaucaaggaagaggugcuugccuaugucgugcagcugccccucuacggcguuauugauaccccuuguuggaaacugcauacauccccgcugugcacgaccaacacaaaggaagggagcaauaucugucucacccggacagaccgcggaugguacugcgauaacgcgggcucuguguccuuuuucccccaagccgagaccuguaaggucugcagcaauagaguguuuugcgacacgaugaacucucugacacuuccuagcgaaguuaaucuguguaacaucgauauuuucaaucccaaauaugacugcaagaucaugaccuccaaaaccgaugugucuagcuccgucauuacaagccucggggcuaucgugucuuguuacggaaagaccaaaugcacagccuccaacaagaauaagggcauuaucaaaacguuuagcaacgggugugacuaugucucuaauaagggaguggacaccguuuccgugggcaacacacuguacuaugucaacaaacaggagggccagagccuuuacgugaagggggagccuaucauuaauuucuaugauccccugguuuuuccguccgacgaauuugaugcuucuaucagccaagugaacgagaaaauuaaucagucccucgccuucauccggaagucugacgaacugcugcacaacgucaaugugggaaagagcaccacaaacauuaugaucaccacgauuaucaucgugauuaucguuauucuccugcuucugaucgccgucggccucuuccuguacugcaaagcucgcuccaccccugugacacugagcaaggaucagcuuucugggauuaauaacaucgcguucuccaauugaggacuagugcaucacauuuaaaagcaucucagccuaccaugagaauaagagaaagaaaaugaagaucaauagcuuauucaucucuuuuucuuuuucguugguguaaagccaacacccugucuaaaaaacauaaauuucuuuaaucauuuugccucuuuucucugugcuucaauuaauaaaaaauggaaagaaccuagaucuaaaaaaaaaaaaaaaaaaaaaaaaaaaaaaaaaaaaaaaaaaaaaaaaaaaaaaaaaaaaaaaaugcaucccccccccccccccccccccccccccccccaaaggcucuuuucagagccaccagaauu

SEQ ID NO: 17981 - RNA, 1994 nt, Artificial Sequence
  mRNA product Design i-2 comprising derived and/or modified sequence from HRSV(Memphis-37)__AIY60640.1__F_DSCav1_mut6 (opt6)
gggagaggcgcugccuacggagguggcagccaucuccuucucggcaucaagcuuaccauggaacuaccaauuuuaaaaacaaacgcaauuacaacuauacucgcagcaguaacauuauguuucgccucaucccaaaacauaacagaagaauuuuaccaaucaacaugcagcgcaguaucaaaaggauaucucggagcauuacgaacagguugguacacaucuguaaucacuauagaacuaucaaacauaaaagaaaacaaaugcaauggaaccgacgcaaaaguaaaauuaauaaaacaagaacucgauaaauacaaaaaugcaguaacagaccuccaaaugcucauguguucaacaccagccgcaggaucagguuccgccauagcaucuggcauagcaguaugcaaaguacuccacuuagaaggagaaguuaacaaaauaaaaaacgcacuauuaucaacaaacaaagcaguaguaucccucucaaacggagucucaguauuaacauucaaaguauuagaccuaaaaaacuacauagacaaacaacuacuuccaauacucaacaaacaaucaugcucaauaccaaacccagaaaccguaauggaauuucaacaaaaaaacaaccgacuacuagaaaucacacgagaauuuucaguaaacgccggugucacaacuccaguaucaacuuauauguuaaccaacucagaacuauuaucauuaauaaacgauaugcccauaacuaacgaccaaaaaaaauuaaugucaaacaacguacaaauaguacgccaacaaaguuacucaauaaugugcaucauaaaagaagaaguauuagcguacguuguacaacuaccucuauacggagucauagacacaccaugcuggaaacuucacacaucaccacuauguacaacaaacacaaaagaaggcaguaacauaugccuaacaagaacagaccguggaugguauugugacaacgcuggaucuguaucauucuucccucaagcagaaaccuguaaaguuugcucaaacagagucuucugugacacaaugaacucucuaacacuaccuuccgaagugaaccucuguaacauagacauauucaauccaaaauaugauugcaaaauaaugacuucaaaaacagauguaucauccucuguuauaacaucauuaggcgccauaguuucaugcuacggaaaaacuaaaugcacagcaucaaacaaaaacaaaggaauaauaaaaaccuucucaaauggaugcgacuacguaagcaacaaaggcguagacacaguaucaguagguaauacauuauacuacguaaacaaacaagaaggacaaucacuuuauguuaaaggagaaccuauaauaaacuucuacgacccacuuguauuuccauccgaugaauuugacgcaucuauaucacaagucaacgaaaaaauaaaccaaucauuagcauucauucgaaaauccgaugaacuacuccauaacguaaaugucggaaaaucaacaaccaacauaaugaucacaacaauaaucauagugauaauaguaauacuccuacuacuaaucgcaguaggucuauuccuauauuguaaagcaagaucuacuccaguuacacucucuaaagaccaauuaagcgguaucaacaacaucgccuucagcaauuaaggacuagugcaucacauuuaaaagcaucucagccuaccaugagaauaagagaaagaaaaugaagaucaauagcuuauucaucucuuuuucuuuuucguugguguaaagccaacacccugucuaaaaaacauaaauuucuuuaaucauuuugccucuuuucucugugcuucaauuaauaaaaaauggaaagaaccuagaucuaaaaaaaaaaaaaaaaaaaaaaaaaaaaaaaaaaaaaaaaaaaaaaaaaaaaaaaaaaaaaaaaugcaucccccccccccccccccccccccccccccccaaaggcucuuuucagagccaccagaauu

SEQ ID NO: 17982 - RNA, 1994 nt, Artificial Sequence
  mRNA product Design i-2 comprising derived and/or modified sequence from HRSV(Memphis-37)__AIY60640.1__F_DSCav1_mut6 (opt11)
gggagaggcgcugccuacggagguggcagccaucuccuucucggcaucaagcuuaccauggagcugcccauccucaagaccaacgccaucaccacgauccuggccgcggugacccugugcuucgcgagcucccaaaacaucaccgaggaguucuaccagagcacgugcuccgccgucagcaagggcuaccucggggcccugcgcaccggcugguacaccuccgugaucaccaucgagcugagcaacaucaaggaaaacaagugcaacgggacggacgcaaaggugaagcucaucaagcaggagcuggauaaguacaagaacgcggucacggaccugcagaugcucaugugcuccaccccggccgccggcagcggguccgccaucgcguccggcaucgccgugugcaagguguugcaccuggagggcgaggucaacaagaucaagaacgcccuccuuuccaccaauaaggcuguugugagccuguccaacggggucagcgugcucaccuucaaggugcuggaccugaagaacuacaucgacaagcagcuccugcccauccugaacaagcaguccugcagcauccccaaccccgagacagucauggaguuccagcagaagaacaaccggcuccuggagaucacccgcgaguucuccguuaacgccggggugaccaccccgguaagcacauacaugcugaccaacagcgagcuccugagccugaucaacgacaugcccaucaccaacgaccagaagaagcucaugagcaacaacgugcagaucgugcggcagcaguccuacagcaucaugugcaucaucaaggaggagguccuggcguacguggugcaacugccccucuacggggucaucgacacccccugcuggaagcugcacacguccccgcugugcaccaccaacaccaaggagggcagcaacaucugccucacgcgcaccgaccgggggugguacugcgacaacgcaggcuccgugagcuucuucccccaggccgagaccugcaaggugugcuccaaccgcgucuucugcgacaccaugaacagccugacgcugcccuccgaggugaaccucugcaacaucgacaucuucaaccccaaguacgacuguaagaucaugaccagcaagaccgaugucuccagcuccgugaucaccagccugggcgccauaguguccuguuaugggaagacgaagugcaccgccagcaacaagaacaaaggcaucaucaagaccuucuccaacgggugcgacuacgucagcaacaagggcguggacacaguguccgucggcaacacgcuguacuacgugaacaagcaggaggggcagagccucuacgugaagggcgagccgaucaucaacuucuacgauccccuggucuuccccagcgacgaguucgacgcguccaucagccaagugaacgagaagaucaaccagucccuggccuucauccgcaagagcgacgagcuccugcacaacgugaacgucgggaaguccaccaccaacaucaugaucaccaccaucaucaucgugaucaucgucauccugcuccugcugaucgccgucggccucuuccuguacugcaaggcccggagcacgcccgugacccuguccaaggaccagcugucgggcaucaacaacaucgccuucuccaacugaggacuagugcaucacauuuaaaagcaucucagccuaccaugagaauaagagaaagaaaaugaagaucaauagcuuauucaucucuuuuucuuuuucguugguguaaagccaacacccugucuaaaaaacauaaauuucuuuaaucauuuugccucuuuucucugugcuucaauuaauaaaaaauggaaagaaccuagaucuaaaaaaaaaaaaaaaaaaaaaaaaaaaaaaaaaaaaaaaaaaaaaaaaaaaaaaaaaaaaaaaaugcaucccccccccccccccccccccccccccccccaaaggcucuuuucagagccaccagaauu

SEQ ID NO: 17983 - RNA, 1990 nt, Artificial Sequence
  mRNA product Design i-2 comprising derived and/or modified sequence from HRSV(Memphis-37)__AIY60640.1__F_DSCav1_mut6 (opt1)
ggggcgcugccuacggagguggcagccaucuccuucucggcaucaagcuuaccauggagcugcccauccucaagaccaacgccaucaccacgauccuggccgcggugacccugugcuucgccagcucccagaacaucaccgaggaguucuaccagagcacgugcuccgccgucagcaagggcuaccucggcgcccugcgcaccgggugguacaccagcgugaucaccaucgagcuguccaacaucaaggagaacaagugcaacggcaccgacgccaaggugaagcucaucaagcaggagcuggacaaguacaagaacgcggucacggaccugcagaugcugaugugcagcaccccggccgccggcuccgggagcgcgaucgccuccggcaucgccgucugcaaggugcugcaccucgagggcgaggugaacaagaucaagaacgcccugcuguccaccaacaaggccgucgugagccucuccaacggggugagcguccugaccuucaaggugcuggaccucaagaacuacaucgacaagcagcugcugcccauccugaacaagcagagcugcuccauccccaaccccgagaccgucauggaguuccagcagaagaacaaccgccuccuggagaucacgcgggaguucagcgugaacgcgggcgugaccacccccgucuccaccuacaugcugacgaacagcgagcuccugucccugaucaacgacaugccgaucaccaacgaccagaagaagcucaugagcaacaacgugcagaucgugcgccagcaguccuacagcaucaugugcaucaucaaggaggagguccuggccuacguggugcagcugccccucuacggggucaucgacacccccugcuggaagcugcacaccagcccccugugcacgaccaacaccaaggagggcuccaacaucugccucacccggacggaccgcgggugguacugcgacaacgccggcagcguguccuucuucccgcaggccgagaccugcaaggucugcagcaaccggguguucugcgacaccaugaacucccugacccugcccagcgaggugaaccucugcaacaucgacaucuucaaccccaaguacgacugcaagaucaugacguccaagaccgacgucagcuccagcgugaucaccucccugggcgccaucgugagcugcuacgggaagaccaagugcacggcgagcaacaagaacaagggcaucaucaagaccuucuccaacgggugcgacuacgucagcaacaagggcguggacaccguguccgucggcaacacccuguacuacgugaacaagcaggagggccagagccucuacgugaagggggagcccaucaucaacuucuacgacccgcuggucuuccccuccgacgaguucgacgccagcaucucccaggugaacgagaagaucaaccagagccuggccuucauccggaaguccgacgagcuccugcacaacgugaacgucggcaagagcaccacgaacaucaugaucaccaccaucaucaucgugaucaucgugauccugcugcuccugaucgccgucgggcuguuccucuacugcaaggcccgcuccacccccgugacgcugagcaaggaccagcuguccgggaucaacaacaucgcguucagcaacugaggacuagugcaucacauuuaaaagcaucucagccuaccaugagaauaagagaaagaaaaugaagaucaauagcuuauucaucucuuuuucuuuuucguugguguaaagccaacacccugucuaaaaaacauaaauuucuuuaaucauuuugccucuuuucucugugcuucaauuaauaaaaaauggaaagaaccuagaucuaaaaaaaaaaaaaaaaaaaaaaaaaaaaaaaaaaaaaaaaaaaaaaaaaaaaaaaaaaaaaaaaugcaucccccccccccccccccccccccccccccccaaaggcucuuuucagagccaccagaauu

SEQ ID NO: 17984 - RNA, 1990 nt, Artificial Sequence
  mRNA product Design i-2 comprising derived and/or modified sequence from HRSV(Memphis-37)__AIY60640.1__F_DSCav1_mut6 (opt1)
ggggcgcugccuacggagguggcagccaucuccuucucggcaucaagcuuaccauggagcugcccauccucaagaccaacgccaucaccacgauccuggccgcggugacccugugcuucgccagcucccagaacaucaccgaggaguucuaccagagcacgugcuccgccgucagcaagggcuaccucggggcccugcgcaccggcugguacaccuccgugaucaccaucgagcugagcaacaucaaggagaacaagugcaacgggaccgacgccaaggugaagcucaucaagcaggagcuggacaaguacaagaacgcggucacggaccugcagaugcucaugugcuccaccccggccgccggcagcggguccgccaucgcgagcggcaucgccgugugcaaggugcugcaccuggagggcgaggucaacaagaucaagaacgcccuccuguccaccaacaaggccguggugagccuguccaacggggucagcgugcucaccuucaaggugcuggaccugaagaacuacaucgacaagcagcuccugcccauccugaacaagcaguccugcagcauccccaaccccgagacggucauggaguuccagcagaagaacaaccggcuccuggagaucacccgcgaguucuccgugaacgccggcgugaccaccccggucagcacguacaugcugaccaacuccgagcuccugagccugaucaacgacaugcccaucaccaacgaccagaagaagcucaugagcaacaacgugcagaucgugcggcagcaguccuacagcaucaugugcaucaucaaggaggagguccuggcguacguggugcagcugccccucuacggggucaucgacacccccugcuggaagcugcacacguccccgcugugcaccaccaacaccaaggagggcagcaacaucugccucacgcgcaccgaccgggggugguacugcgacaacgccggcuccgugagcuucuucccccaggccgagaccugcaaggugugcuccaaccgcgucuucugcgacaccaugaacagccugacgcugcccuccgaggugaaccucugcaacaucgacaucuucaaccccaaguacgacugcaagaucaugaccagcaagaccgacgucuccagcuccgugaucaccagccugggcgccaucguguccugcuacgggaagacgaagugcaccgccagcaacaagaacaagggcaucaucaagaccuucuccaacgggugcgacuacgucagcaacaagggcguggacaccguguccgucggcaacacgcuguacuacgugaacaagcaggaggggcagagccucuacgugaagggcgagccgaucaucaacuucuacgacccccuggucuuccccagcgacgaguucgacgcguccaucagccaggugaacgagaagaucaaccagucccuggccuucauccgcaagagcgacgagcuccugcacaacgugaacgucgggaaguccaccaccaacaucaugaucaccaccaucaucaucgugaucaucgugauccugcuccugcugaucgccgucggccucuuccuguacugcaaggcccggagcacgcccgugacccuguccaaggaccagcugagcgggaucaacaacaucgccuucuccaacugaggacuagugcaucacauuuaaaagcaucucagccuaccaugagaauaagagaaagaaaaugaagaucaauagcuuauucaucucuuuuucuuuuucguugguguaaagccaacacccugucuaaaaaacauaaauuucuuuaaucauuuugccucuuuucucugugcuucaauuaauaaaaaauggaaagaaccuagaucuaaaaaaaaaaaaaaaaaaaaaaaaaaaaaaaaaaaaaaaaaaaaaaaaaaaaaaaaaaaaaaaaugcaucccccccccccccccccccccccccccccccaaaggcucuuuucagagccaccagaauu

SEQ ID NO: 17985 - RNA, 1990 nt, Artificial Sequence
  mRNA product Design i-2 comprising derived and/or modified sequence from HRSV(Memphis-37)__AIY60640.1__F_DSCav1_mut6 (opt2)
ggggcgcugccuacggagguggcagccaucuccuucucggcaucaagcuuaccauggagcuccccauccucaagaccaacgccaucaccaccauccucgccgccgucacccucugcuucgccuccucccagaacaucaccgaggaguucuaccaguccaccugcuccgccgucuccaagggcuaccucggcgcccuccgcaccggcugguacaccuccgucaucaccaucgagcucuccaacaucaaggagaacaagugcaacggcaccgacgccaaggucaagcucaucaagcaggagcucgacaaguacaagaacgccgucaccgaccuccagaugcucaugugcuccacccccgccgccggcuccggcuccgccaucgccuccggcaucgccgucugcaagguccuccaccucgagggcgaggucaacaagaucaagaacgcccuccucuccaccaacaaggccgucgucucccucuccaacggcgucuccguccucaccuucaagguccucgaccucaagaacuacaucgacaagcagcuccuccccauccucaacaagcaguccugcuccauccccaaccccgagaccgucauggaguuccagcagaagaacaaccgccuccucgagaucacccgcgaguucuccgucaacgccggcgucaccacccccgucuccaccuacaugcucaccaacuccgagcuccucucccucaucaacgacaugcccaucaccaacgaccagaagaagcucauguccaacaacguccagaucguccgccagcaguccuacuccaucaugugcaucaucaaggaggagguccucgccuacgucguccagcucccccucuacggcgucaucgacacccccugcuggaagcuccacaccuccccccucugcaccaccaacaccaaggagggcuccaacaucugccucacccgcaccgaccgcggcugguacugcgacaacgccggcuccgucuccuucuucccccaggccgagaccugcaaggucugcuccaaccgcgucuucugcgacaccaugaacucccucacccuccccuccgaggucaaccucugcaacaucgacaucuucaaccccaaguacgacugcaagaucaugaccuccaagaccgacgucuccuccuccgucaucaccucccucggcgccaucgucuccugcuacggcaagaccaagugcaccgccuccaacaagaacaagggcaucaucaagaccuucuccaacggcugcgacuacgucuccaacaagggcgucgacaccgucuccgucggcaacacccucuacuacgucaacaagcaggagggccagucccucuacgucaagggcgagcccaucaucaacuucuacgacccccucgucuuccccuccgacgaguucgacgccuccaucucccaggucaacgagaagaucaaccagucccucgccuucauccgcaaguccgacgagcuccuccacaacgucaacgucggcaaguccaccaccaacaucaugaucaccaccaucaucaucgucaucaucgucauccuccuccuccucaucgccgucggccucuuccucuacugcaaggcccgcuccacccccgucacccucuccaaggaccagcucuccggcaucaacaacaucgccuucuccaacugaggacuagugcaucacauuuaaaagcaucucagccuaccaugagaauaagagaaagaaaaugaagaucaauagcuuauucaucucuuuuucuuuuucguugguguaaagccaacacccugucuaaaaaacauaaauuucuuuaaucauuuugccucuuuucucugugcuucaauuaauaaaaaauggaaagaaccuagaucuaaaaaaaaaaaaaaaaaaaaaaaaaaaaaaaaaaaaaaaaaaaaaaaaaaaaaaaaaaaaaaaaugcaucccccccccccccccccccccccccccccccaaaggcucuuuucagagccaccagaauu

SEQ ID NO: 17986 - RNA, 1990 nt, Artificial Sequence
  mRNA product Design i-2 comprising derived and/or modified sequence from HRSV(Memphis-37)__AIY60640.1__F_DSCav1_mut6 (opt3)
ggggcgcugccuacggagguggcagccaucuccuucucggcaucaagcuuaccauggagcugcccauccucaagaccaacgccauuacaacuauacuugcugcagugacgcugugcuucgccagcucccagaauaucaccgaagaguuuuaccaaucuacauguucagcggucaguaaaggcuauuugggggcuuuaagaacuggaugguacaccagcguuauuacaaucgaacuguccaacauuaaggagaauaaaugcaacgguaccgacgccaaggugaaacuaaucaagcaggaacucgauaaguauaaaaaugcaguaacugaccugcagaugcuuauguguucuacuccugccgcuggcucggggucagcaauagccagcggaaucgcugugugcaagguccugcacuuggagggcgaggugaacaaaauuaagaaugcccuccugaguaccaacaaagcgguugugucccugucuaauggugucagcgugcucacguucaagguauuagaucugaagaacuacaucgacaaacagcuuuugccaauucugaauaagcaauccuguucaaucccgaaccccgaaacuguuauggaguuucagcagaaaaauaacaggcuacucgaaauaacccgggaguucagugugaaugcaggggucacaacuccugugagcaccuauaugcugacaaacucugagcuucuguccuugauuaacgauaugccaaucaccaaugaccagaagaaacucaugucaaacaaugugcaaauuguccgccagcagagcuacaguaucaugugcaucauuaaggaagagguucuggccuaugugguacaguuaccccuguacggagugauagauacgccuuguuggaaacuccauacuucuccacuuugcacaaccaacacuaaggaaggcuccaauaucugucugacacgaaccgaccguggcugguacugcgauaacgcugggagcgucucguuuuucccccaagccgagacguguaaggugugcucuaauagaguuuucugcgacaccaugaacuccuugacacuaccuucagaagugaaucuguguaacauugauaucuucaauccaaaauaugacugcaagauaaugacaaguaaaaccgaugucagcuccucugugauuacaagccucggagcaaucguaucauguuacgguaagacuaaaugcaccgcuaguaacaagaauaagggcaucauuaaaacauuuuccaacgggugugacuauguuagcaauaagggaguggacaccgucucugugggcaacacucuguacuaugucaacaaacaggagggucagucacuuuacgugaagggggagccgaucauuaauuucuaugauccccugguuuuuccuagugacgaauuugaugccagcauaucccaagugaacgagaaaaucaaucagucuuuggcguuuauuaggaagucggacgaacuccugcacaacguaaaugucggaaagagcacgacaaacaucaugaucaccacuauuauaaucgugauuaucguuauuuuacugcuacucaucgccgugggccuguuccuuuacugcaaagcacgguccaccccagucacauugucaaaggaucagcugaguggcauaaauaacaucgcuuucucuaauugaggacuagugcaucacauuuaaaagcaucucagccuaccaugagaauaagagaaagaaaaugaagaucaauagcuuauucaucucuuuuucuuuuucguugguguaaagccaacacccugucuaaaaaacauaaauuucuuuaaucauuuugccucuuuucucugugcuucaauuaauaaaaaauggaaagaaccuagaucuaaaaaaaaaaaaaaaaaaaaaaaaaaaaaaaaaaaaaaaaaaaaaaaaaaaaaaaaaaaaaaaaugcaucccccccccccccccccccccccccccccccaaaggcucuuuucagagccaccagaauu

SEQ ID NO: 17987 - RNA, 1990 nt, Artificial Sequence
  mRNA product Design i-2 comprising derived and/or modified sequence from HRSV(Memphis-37)__AIY60640.1__F_DSCav1_mut6 (opt4)
ggggcgcugccuacggagguggcagccaucuccuucucggcaucaagcuuaccauggagcugcccauccugaagaccaacgccaucaccaccauccuggccgccgugacccugugcuucgccagcagccagaacaucaccgaggaguucuaccagagcaccugcagcgccgugagcaagggcuaccugggcgcccugagaaccggcugguacaccagcgugaucaccaucgagcugagcaacaucaaggagaacaagugcaacggcaccgacgccaaggugaagcugaucaagcaggagcuggacaaguacaagaacgccgugaccgaccugcagaugcugaugugcagcacccccgccgccggcagcggcagcgccaucgccagcggcaucgccgugugcaaggugcugcaccuggagggcgaggugaacaagaucaagaacgcccugcugagcaccaacaaggccguggugagccugagcaacggcgugagcgugcugaccuucaaggugcuggaccugaagaacuacaucgacaagcagcugcugcccauccugaacaagcagagcugcagcauccccaaccccgagaccgugauggaguuccagcagaagaacaacagacugcuggagaucaccagagaguucagcgugaacgccggcgugaccacccccgugagcaccuacaugcugaccaacagcgagcugcugagccugaucaacgacaugcccaucaccaacgaccagaagaagcugaugagcaacaacgugcagaucgugagacagcagagcuacagcaucaugugcaucaucaaggaggaggugcuggccuacguggugcagcugccccuguacggcgugaucgacacccccugcuggaagcugcacaccagcccccugugcaccaccaacaccaaggagggcagcaacaucugccugaccagaaccgacagaggcugguacugcgacaacgccggcagcgugagcuucuucccccaggccgagaccugcaaggugugcagcaacagaguguucugcgacaccaugaacagccugacccugcccagcgaggugaaccugugcaacaucgacaucuucaaccccaaguacgacugcaagaucaugaccagcaagaccgacgugagcagcagcgugaucaccagccugggcgccaucgugagcugcuacggcaagaccaagugcaccgccagcaacaagaacaagggcaucaucaagaccuucagcaacggcugcgacuacgugagcaacaagggcguggacaccgugagcgugggcaacacccuguacuacgugaacaagcaggagggccagagccuguacgugaagggcgagcccaucaucaacuucuacgacccccugguguuccccagcgacgaguucgacgccagcaucagccaggugaacgagaagaucaaccagagccuggccuucaucagaaagagcgacgagcugcugcacaacgugaacgugggcaagagcaccaccaacaucaugaucaccaccaucaucaucgugaucaucgugauccugcugcugcugaucgccgugggccuguuccuguacugcaaggccagaagcacccccgugacccugagcaaggaccagcugagcggcaucaacaacaucgccuucagcaacugaggacuagugcaucacauuuaaaagcaucucagccuaccaugagaauaagagaaagaaaaugaagaucaauagcuuauucaucucuuuuucuuuuucguugguguaaagccaacacccugucuaaaaaacauaaauuucuuuaaucauuuugccucuuuucucugugcuucaauuaauaaaaaauggaaagaaccuagaucuaaaaaaaaaaaaaaaaaaaaaaaaaaaaaaaaaaaaaaaaaaaaaaaaaaaaaaaaaaaaaaaaugcaucccccccccccccccccccccccccccccccaaaggcucuuuucagagccaccagaauu

SEQ ID NO: 17988 - RNA, 1990 nt, Artificial Sequence
  mRNA product Design i-2 comprising derived and/or modified sequence from HRSV(Memphis-37)__AIY60640.1__F_DSCav1_mut6 (opt5)
ggggcgcugccuacggagguggcagccaucuccuucucggcaucaagcuuaccauggagcugcccauccucaagaccaacgccauuacaacgauccuggcugccgugacccuuugcuucgcgagcucccagaauauuacagaagaguuuuaccaaucuaccuguagcgcugucuccaaaggcuaucugggggcccucagaacaggaugguacaccucuguuaucacaauugaacugagcaacaucaaggagaauaaaugcaacggcaccgacgccaaggugaaacuuaucaagcaggaacuggauaaguauaaaaaugcugugacggaccuccagaugcugauguguuccaccccugccgcugggucuggaagcgccauugcguccggcaucgccgucugcaaggugcugcaccucgagggggagguuaacaaaauuaagaaugcucugcuuagcacaaacaaagccguggucucucuguccaauggagugagcguucucaccuucaaggugcuggaucuuaagaacuacaucgacaaacagcugcucccgauucugaauaagcaaucuuguuccauccccaacccugaaacagucauggaguuucagcagaaaaauaaccggcugcucgaaauuacccgcgaguucagcgugaaugcuggcgugacgacacccgucucuaccuauaugcugacaaacuccgagcuucugagccucaucaacgauaugccuaucaccaaugaccagaagaaacugauguccaacaauguucaaauugugagacagcagucuuacagcaucaugugcauuaucaaggaagaggugcuugccuaugucgugcagcugccccucuacggcguuauugauaccccuuguuggaaacugcauacauccccgcugugcacgaccaacacaaaggaagggagcaauaucugucucacccggacagaccgcggaugguacugcgauaacgcgggcucuguguccuuuuucccccaagccgagaccuguaaggucugcagcaauagaguguuuugcgacacgaugaacucucugacacuuccuagcgaaguuaaucuguguaacaucgauauuuucaaucccaaauaugacugcaagaucaugaccuccaaaaccgaugugucuagcuccgucauuacaagccucggggcuaucgugucuuguuacggaaagaccaaaugcacagccuccaacaagaauaagggcauuaucaaaacguuuagcaacgggugugacuaugucucuaauaagggaguggacaccguuuccgugggcaacacacuguacuaugucaacaaacaggagggccagagccuuuacgugaagggggagccuaucauuaauuucuaugauccccugguuuuuccguccgacgaauuugaugcuucuaucagccaagugaacgagaaaauuaaucagucccucgccuucauccggaagucugacgaacugcugcacaacgucaaugugggaaagagcaccacaaacauuaugaucaccacgauuaucaucgugauuaucguuauucuccugcuucugaucgccgucggccucuuccuguacugcaaagcucgcuccaccccugugacacugagcaaggaucagcuuucugggauuaauaacaucgcguucuccaauugaggacuagugcaucacauuuaaaagcaucucagccuaccaugagaauaagagaaagaaaaugaagaucaauagcuuauucaucucuuuuucuuuuucguugguguaaagccaacacccugucuaaaaaacauaaauuucuuuaaucauuuugccucuuuucucugugcuucaauuaauaaaaaauggaaagaaccuagaucuaaaaaaaaaaaaaaaaaaaaaaaaaaaaaaaaaaaaaaaaaaaaaaaaaaaaaaaaaaaaaaaaugcaucccccccccccccccccccccccccccccccaaaggcucuuuucagagccaccagaauu

SEQ ID NO: 17989 - RNA, 1990 nt, Artificial Sequence
  mRNA product Design i-2 comprising derived and/or modified sequence from HRSV(Memphis-37)__AIY60640.1__F_DSCav1_mut6 (opt6)
ggggcgcugccuacggagguggcagccaucuccuucucggcaucaagcuuaccauggaacuaccaauuuuaaaaacaaacgcaauuacaacuauacucgcagcaguaacauuauguuucgccucaucccaaaacauaacagaagaauuuuaccaaucaacaugcagcgcaguaucaaaaggauaucucggagcauuacgaacagguugguacacaucuguaaucacuauagaacuaucaaacauaaaagaaaacaaaugcaauggaaccgacgcaaaaguaaaauuaauaaaacaagaacucgauaaauacaaaaaugcaguaacagaccuccaaaugcucauguguucaacaccagccgcaggaucagguuccgccauagcaucuggcauagcaguaugcaaaguacuccacuuagaaggagaaguuaacaaaauaaaaaacgcacuauuaucaacaaacaaagcaguaguaucccucucaaacggagucucaguauuaacauucaaaguauuagaccuaaaaaacuacauagacaaacaacuacuuccaauacucaacaaacaaucaugcucaauaccaaacccagaaaccguaauggaauuucaacaaaaaaacaaccgacuacuagaaaucacacgagaauuuucaguaaacgccggugucacaacuccaguaucaacuuauauguuaaccaacucagaacuauuaucauuaauaaacgauaugcccauaacuaacgaccaaaaaaaauuaaugucaaacaacguacaaauaguacgccaacaaaguuacucaauaaugugcaucauaaaagaagaaguauuagcguacguuguacaacuaccucuauacggagucauagacacaccaugcuggaaacuucacacaucaccacuauguacaacaaacacaaaagaaggcaguaacauaugccuaacaagaacagaccguggaugguauugugacaacgcuggaucuguaucauucuucccucaagcagaaaccuguaaaguuugcucaaacagagucuucugugacacaaugaacucucuaacacuaccuuccgaagugaaccucuguaacauagacauauucaauccaaaauaugauugcaaaauaaugacuucaaaaacagauguaucauccucuguuauaacaucauuaggcgccauaguuucaugcuacggaaaaacuaaaugcacagcaucaaacaaaaacaaaggaauaauaaaaaccuucucaaauggaugcgacuacguaagcaacaaaggcguagacacaguaucaguagguaauacauuauacuacguaaacaaacaagaaggacaaucacuuuauguuaaaggagaaccuauaauaaacuucuacgacccacuuguauuuccauccgaugaauuugacgcaucuauaucacaagucaacgaaaaaauaaaccaaucauuagcauucauucgaaaauccgaugaacuacuccauaacguaaaugucggaaaaucaacaaccaacauaaugaucacaacaauaaucauagugauaauaguaauacuccuacuacuaaucgcaguaggucuauuccuauauuguaaagcaagaucuacuccaguuacacucucuaaagaccaauuaagcgguaucaacaacaucgccuucagcaauuaaggacuagugcaucacauuuaaaagcaucucagccuaccaugagaauaagagaaagaaaaugaagaucaauagcuuauucaucucuuuuucuuuuucguugguguaaagccaacacccugucuaaaaaacauaaauuucuuuaaucauuuugccucuuuucucugugcuucaauuaauaaaaaauggaaagaaccuagaucuaaaaaaaaaaaaaaaaaaaaaaaaaaaaaaaaaaaaaaaaaaaaaaaaaaaaaaaaaaaaaaaaugcaucccccccccccccccccccccccccccccccaaaggcucuuuucagagccaccagaauu

SEQ ID NO: 17990 - RNA, 1990 nt, Artificial Sequence
  mRNA product Design i-2 comprising derived and/or modified sequence from HRSV(Memphis-37)__AIY60640.1__F_DSCav1_mut6 (opt11)
ggggcgcugccuacggagguggcagccaucuccuucucggcaucaagcuuaccauggagcugcccauccucaagaccaacgccaucaccacgauccuggccgcggugacccugugcuucgcgagcucccaaaacaucaccgaggaguucuaccagagcacgugcuccgccgucagcaagggcuaccucggggcccugcgcaccggcugguacaccuccgugaucaccaucgagcugagcaacaucaaggaaaacaagugcaacgggacggacgcaaaggugaagcucaucaagcaggagcuggauaaguacaagaacgcggucacggaccugcagaugcucaugugcuccaccccggccgccggcagcggguccgccaucgcguccggcaucgccgugugcaagguguugcaccuggagggcgaggucaacaagaucaagaacgcccuccuuuccaccaauaaggcuguugugagccuguccaacggggucagcgugcucaccuucaaggugcuggaccugaagaacuacaucgacaagcagcuccugcccauccugaacaagcaguccugcagcauccccaaccccgagacagucauggaguuccagcagaagaacaaccggcuccuggagaucacccgcgaguucuccguuaacgccggggugaccaccccgguaagcacauacaugcugaccaacagcgagcuccugagccugaucaacgacaugcccaucaccaacgaccagaagaagcucaugagcaacaacgugcagaucgugcggcagcaguccuacagcaucaugugcaucaucaaggaggagguccuggcguacguggugcaacugccccucuacggggucaucgacacccccugcuggaagcugcacacguccccgcugugcaccaccaacaccaaggagggcagcaacaucugccucacgcgcaccgaccgggggugguacugcgacaacgcaggcuccgugagcuucuucccccaggccgagaccugcaaggugugcuccaaccgcgucuucugcgacaccaugaacagccugacgcugcccuccgaggugaaccucugcaacaucgacaucuucaaccccaaguacgacuguaagaucaugaccagcaagaccgaugucuccagcuccgugaucaccagccugggcgccauaguguccuguuaugggaagacgaagugcaccgccagcaacaagaacaaaggcaucaucaagaccuucuccaacgggugcgacuacgucagcaacaagggcguggacacaguguccgucggcaacacgcuguacuacgugaacaagcaggaggggcagagccucuacgugaagggcgagccgaucaucaacuucuacgauccccuggucuuccccagcgacgaguucgacgcguccaucagccaagugaacgagaagaucaaccagucccuggccuucauccgcaagagcgacgagcuccugcacaacgugaacgucgggaaguccaccaccaacaucaugaucaccaccaucaucaucgugaucaucgucauccugcuccugcugaucgccgucggccucuuccuguacugcaaggcccggagcacgcccgugacccuguccaaggaccagcugucgggcaucaacaacaucgccuucuccaacugaggacuagugcaucacauuuaaaagcaucucagccuaccaugagaauaagagaaagaaaaugaagaucaauagcuuauucaucucuuuuucuuuuucguugguguaaagccaacacccugucuaaaaaacauaaauuucuuuaaucauuuugccucuuuucucugugcuucaauuaauaaaaaauggaaagaaccuagaucuaaaaaaaaaaaaaaaaaaaaaaaaaaaaaaaaaaaaaaaaaaaaaaaaaaaaaaaaaaaaaaaaugcaucccccccccccccccccccccccccccccccaaaggcucuuuucagagccaccagaauu

SEQ ID NO: 17991 - RNA, 1825 nt, Artificial Sequence
  mRNA product Design i-3 comprising derived and/or modified sequence from HRSV(Memphis-37)__AIY60640.1__F_DSCav1_mut6 (opt1)
gggagaaagcuuaccauggagcugcccauccucaagaccaacgccaucaccacgauccuggccgcggugacccugugcuucgccagcucccagaacaucaccgaggaguucuaccagagcacgugcuccgccgucagcaagggcuaccucggcgcccugcgcaccgggugguacaccagcgugaucaccaucgagcuguccaacaucaaggagaacaagugcaacggcaccgacgccaaggugaagcucaucaagcaggagcuggacaaguacaagaacgcggucacggaccugcagaugcugaugugcagcaccccggccgccggcuccgggagcgcgaucgccuccggcaucgccgucugcaaggugcugcaccucgagggcgaggugaacaagaucaagaacgcccugcuguccaccaacaaggccgucgugagccucuccaacggggugagcguccugaccuucaaggugcuggaccucaagaacuacaucgacaagcagcugcugcccauccugaacaagcagagcugcuccauccccaaccccgagaccgucauggaguuccagcagaagaacaaccgccuccuggagaucacgcgggaguucagcgugaacgcgggcgugaccacccccgucuccaccuacaugcugacgaacagcgagcuccugucccugaucaacgacaugccgaucaccaacgaccagaagaagcucaugagcaacaacgugcagaucgugcgccagcaguccuacagcaucaugugcaucaucaaggaggagguccuggccuacguggugcagcugccccucuacggggucaucgacacccccugcuggaagcugcacaccagcccccugugcacgaccaacaccaaggagggcuccaacaucugccucacccggacggaccgcgggugguacugcgacaacgccggcagcguguccuucuucccgcaggccgagaccugcaaggucugcagcaaccggguguucugcgacaccaugaacucccugacccugcccagcgaggugaaccucugcaacaucgacaucuucaaccccaaguacgacugcaagaucaugacguccaagaccgacgucagcuccagcgugaucaccucccugggcgccaucgugagcugcuacgggaagaccaagugcacggcgagcaacaagaacaagggcaucaucaagaccuucuccaacgggugcgacuacgucagcaacaagggcguggacaccguguccgucggcaacacccuguacuacgugaacaagcaggagggccagagccucuacgugaagggggagcccaucaucaacuucuacgacccgcuggucuuccccuccgacgaguucgacgccagcaucucccaggugaacgagaagaucaaccagagccuggccuucauccggaaguccgacgagcuccugcacaacgugaacgucggcaagagcaccacgaacaucaugaucaccaccaucaucaucgugaucaucgugauccugcugcuccugaucgccgucgggcuguuccucuacugcaaggcccgcuccacccccgugacgcugagcaaggaccagcuguccgggaucaacaacaucgcguucagcaacugaggacuaguuauaagacugacuagcccgaugggccucccaacgggcccuccuccccuccuugcaccgagauuaauaaaaaaaaaaaaaaaaaaaaaaaaaaaaaaaaaaaaaaaaaaaaaaaaaaaaaaaaaaaaaaaaugcaucccccccccccccccccccccccccccccccaaaggcucuuuucagagccaccagaauu

SEQ ID NO: 17992 - RNA, 1825 nt, Artificial Sequence
  mRNA product Design i-3 comprising derived and/or modified sequence from HRSV(Memphis-37)__AIY60640.1__F_DSCav1_mut6 (opt1)
gggagaaagcuuaccauggagcugcccauccucaagaccaacgccaucaccacgauccuggccgcggugacccugugcuucgccagcucccagaacaucaccgaggaguucuaccagagcacgugcuccgccgucagcaagggcuaccucggggcccugcgcaccggcugguacaccuccgugaucaccaucgagcugagcaacaucaaggagaacaagugcaacgggaccgacgccaaggugaagcucaucaagcaggagcuggacaaguacaagaacgcggucacggaccugcagaugcucaugugcuccaccccggccgccggcagcggguccgccaucgcgagcggcaucgccgugugcaaggugcugcaccuggagggcgaggucaacaagaucaagaacgcccuccuguccaccaacaaggccguggugagccuguccaacggggucagcgugcucaccuucaaggugcuggaccugaagaacuacaucgacaagcagcuccugcccauccugaacaagcaguccugcagcauccccaaccccgagacggucauggaguuccagcagaagaacaaccggcuccuggagaucacccgcgaguucuccgugaacgccggcgugaccaccccggucagcacguacaugcugaccaacuccgagcuccugagccugaucaacgacaugcccaucaccaacgaccagaagaagcucaugagcaacaacgugcagaucgugcggcagcaguccuacagcaucaugugcaucaucaaggaggagguccuggcguacguggugcagcugccccucuacggggucaucgacacccccugcuggaagcugcacacguccccgcugugcaccaccaacaccaaggagggcagcaacaucugccucacgcgcaccgaccgggggugguacugcgacaacgccggcuccgugagcuucuucccccaggccgagaccugcaaggugugcuccaaccgcgucuucugcgacaccaugaacagccugacgcugcccuccgaggugaaccucugcaacaucgacaucuucaaccccaaguacgacugcaagaucaugaccagcaagaccgacgucuccagcuccgugaucaccagccugggcgccaucguguccugcuacgggaagacgaagugcaccgccagcaacaagaacaagggcaucaucaagaccuucuccaacgggugcgacuacgucagcaacaagggcguggacaccguguccgucggcaacacgcuguacuacgugaacaagcaggaggggcagagccucuacgugaagggcgagccgaucaucaacuucuacgacccccuggucuuccccagcgacgaguucgacgcguccaucagccaggugaacgagaagaucaaccagucccuggccuucauccgcaagagcgacgagcuccugcacaacgugaacgucgggaaguccaccaccaacaucaugaucaccaccaucaucaucgugaucaucgugauccugcuccugcugaucgccgucggccucuuccuguacugcaaggcccggagcacgcccgugacccuguccaaggaccagcugagcgggaucaacaacaucgccuucuccaacugaggacuaguuauaagacugacuagcccgaugggccucccaacgggcccuccuccccuccuugcaccgagauuaauaaaaaaaaaaaaaaaaaaaaaaaaaaaaaaaaaaaaaaaaaaaaaaaaaaaaaaaaaaaaaaaaugcaucccccccccccccccccccccccccccccccaaaggcucuuuucagagccaccagaauu

SEQ ID NO: 17993 - RNA, 1825 nt, Artificial Sequence
  mRNA product Design i-3 comprising derived and/or modified sequence from HRSV(Memphis-37)__AIY60640.1__F_DSCav1_mut6 (opt2)
gggagaaagcuuaccauggagcuccccauccucaagaccaacgccaucaccaccauccucgccgccgucacccucugcuucgccuccucccagaacaucaccgaggaguucuaccaguccaccugcuccgccgucuccaagggcuaccucggcgcccuccgcaccggcugguacaccuccgucaucaccaucgagcucuccaacaucaaggagaacaagugcaacggcaccgacgccaaggucaagcucaucaagcaggagcucgacaaguacaagaacgccgucaccgaccuccagaugcucaugugcuccacccccgccgccggcuccggcuccgccaucgccuccggcaucgccgucugcaagguccuccaccucgagggcgaggucaacaagaucaagaacgcccuccucuccaccaacaaggccgucgucucccucuccaacggcgucuccguccucaccuucaagguccucgaccucaagaacuacaucgacaagcagcuccuccccauccucaacaagcaguccugcuccauccccaaccccgagaccgucauggaguuccagcagaagaacaaccgccuccucgagaucacccgcgaguucuccgucaacgccggcgucaccacccccgucuccaccuacaugcucaccaacuccgagcuccucucccucaucaacgacaugcccaucaccaacgaccagaagaagcucauguccaacaacguccagaucguccgccagcaguccuacuccaucaugugcaucaucaaggaggagguccucgccuacgucguccagcucccccucuacggcgucaucgacacccccugcuggaagcuccacaccuccccccucugcaccaccaacaccaaggagggcuccaacaucugccucacccgcaccgaccgcggcugguacugcgacaacgccggcuccgucuccuucuucccccaggccgagaccugcaaggucugcuccaaccgcgucuucugcgacaccaugaacucccucacccuccccuccgaggucaaccucugcaacaucgacaucuucaaccccaaguacgacugcaagaucaugaccuccaagaccgacgucuccuccuccgucaucaccucccucggcgccaucgucuccugcuacggcaagaccaagugcaccgccuccaacaagaacaagggcaucaucaagaccuucuccaacggcugcgacuacgucuccaacaagggcgucgacaccgucuccgucggcaacacccucuacuacgucaacaagcaggagggccagucccucuacgucaagggcgagcccaucaucaacuucuacgacccccucgucuuccccuccgacgaguucgacgccuccaucucccaggucaacgagaagaucaaccagucccucgccuucauccgcaaguccgacgagcuccuccacaacgucaacgucggcaaguccaccaccaacaucaugaucaccaccaucaucaucgucaucaucgucauccuccuccuccucaucgccgucggccucuuccucuacugcaaggcccgcuccacccccgucacccucuccaaggaccagcucuccggcaucaacaacaucgccuucuccaacugaggacuaguuauaagacugacuagcccgaugggccucccaacgggcccuccuccccuccuugcaccgagauuaauaaaaaaaaaaaaaaaaaaaaaaaaaaaaaaaaaaaaaaaaaaaaaaaaaaaaaaaaaaaaaaaaugcaucccccccccccccccccccccccccccccccaaaggcucuuuucagagccaccagaauu

SEQ ID NO: 17994 - RNA, 1825 nt, Artificial Sequence
  mRNA product Design i-3 comprising derived and/or modified sequence from HRSV(Memphis-37)__AIY60640.1__F_DSCav1_mut6 (opt3)
gggagaaagcuuaccauggagcugcccauccucaagaccaacgccauuacaacuauacuugcugcagugacgcugugcuucgccagcucccagaauaucaccgaagaguuuuaccaaucuacauguucagcggucaguaaaggcuauuugggggcuuuaagaacuggaugguacaccagcguuauuacaaucgaacuguccaacauuaaggagaauaaaugcaacgguaccgacgccaaggugaaacuaaucaagcaggaacucgauaaguauaaaaaugcaguaacugaccugcagaugcuuauguguucuacuccugccgcuggcucggggucagcaauagccagcggaaucgcugugugcaagguccugcacuuggagggcgaggugaacaaaauuaagaaugcccuccugaguaccaacaaagcgguugugucccugucuaauggugucagcgugcucacguucaagguauuagaucugaagaacuacaucgacaaacagcuuuugccaauucugaauaagcaauccuguucaaucccgaaccccgaaacuguuauggaguuucagcagaaaaauaacaggcuacucgaaauaacccgggaguucagugugaaugcaggggucacaacuccugugagcaccuauaugcugacaaacucugagcuucuguccuugauuaacgauaugccaaucaccaaugaccagaagaaacucaugucaaacaaugugcaaauuguccgccagcagagcuacaguaucaugugcaucauuaaggaagagguucuggccuaugugguacaguuaccccuguacggagugauagauacgccuuguuggaaacuccauacuucuccacuuugcacaaccaacacuaaggaaggcuccaauaucugucugacacgaaccgaccguggcugguacugcgauaacgcugggagcgucucguuuuucccccaagccgagacguguaaggugugcucuaauagaguuuucugcgacaccaugaacuccuugacacuaccuucagaagugaaucuguguaacauugauaucuucaauccaaaauaugacugcaagauaaugacaaguaaaaccgaugucagcuccucugugauuacaagccucggagcaaucguaucauguuacgguaagacuaaaugcaccgcuaguaacaagaauaagggcaucauuaaaacauuuuccaacgggugugacuauguuagcaauaagggaguggacaccgucucugugggcaacacucuguacuaugucaacaaacaggagggucagucacuuuacgugaagggggagccgaucauuaauuucuaugauccccugguuuuuccuagugacgaauuugaugccagcauaucccaagugaacgagaaaaucaaucagucuuuggcguuuauuaggaagucggacgaacuccugcacaacguaaaugucggaaagagcacgacaaacaucaugaucaccacuauuauaaucgugauuaucguuauuuuacugcuacucaucgccgugggccuguuccuuuacugcaaagcacgguccaccccagucacauugucaaaggaucagcugaguggcauaaauaacaucgcuuucucuaauugaggacuaguuauaagacugacuagcccgaugggccucccaacgggcccuccuccccuccuugcaccgagauuaauaaaaaaaaaaaaaaaaaaaaaaaaaaaaaaaaaaaaaaaaaaaaaaaaaaaaaaaaaaaaaaaaugcaucccccccccccccccccccccccccccccccaaaggcucuuuucagagccaccagaauu

SEQ ID NO: 17995 - RNA, 1825 nt, Artificial Sequence
  mRNA product Design i-3 comprising derived and/or modified sequence from HRSV(Memphis-37)__AIY60640.1__F_DSCav1_mut6 (opt4)
gggagaaagcuuaccauggagcugcccauccugaagaccaacgccaucaccaccauccuggccgccgugacccugugcuucgccagcagccagaacaucaccgaggaguucuaccagagcaccugcagcgccgugagcaagggcuaccugggcgcccugagaaccggcugguacaccagcgugaucaccaucgagcugagcaacaucaaggagaacaagugcaacggcaccgacgccaaggugaagcugaucaagcaggagcuggacaaguacaagaacgccgugaccgaccugcagaugcugaugugcagcacccccgccgccggcagcggcagcgccaucgccagcggcaucgccgugugcaaggugcugcaccuggagggcgaggugaacaagaucaagaacgcccugcugagcaccaacaaggccguggugagccugagcaacggcgugagcgugcugaccuucaaggugcuggaccugaagaacuacaucgacaagcagcugcugcccauccugaacaagcagagcugcagcauccccaaccccgagaccgugauggaguuccagcagaagaacaacagacugcuggagaucaccagagaguucagcgugaacgccggcgugaccacccccgugagcaccuacaugcugaccaacagcgagcugcugagccugaucaacgacaugcccaucaccaacgaccagaagaagcugaugagcaacaacgugcagaucgugagacagcagagcuacagcaucaugugcaucaucaaggaggaggugcuggccuacguggugcagcugccccuguacggcgugaucgacacccccugcuggaagcugcacaccagcccccugugcaccaccaacaccaaggagggcagcaacaucugccugaccagaaccgacagaggcugguacugcgacaacgccggcagcgugagcuucuucccccaggccgagaccugcaaggugugcagcaacagaguguucugcgacaccaugaacagccugacccugcccagcgaggugaaccugugcaacaucgacaucuucaaccccaaguacgacugcaagaucaugaccagcaagaccgacgugagcagcagcgugaucaccagccugggcgccaucgugagcugcuacggcaagaccaagugcaccgccagcaacaagaacaagggcaucaucaagaccuucagcaacggcugcgacuacgugagcaacaagggcguggacaccgugagcgugggcaacacccuguacuacgugaacaagcaggagggccagagccuguacgugaagggcgagcccaucaucaacuucuacgacccccugguguuccccagcgacgaguucgacgccagcaucagccaggugaacgagaagaucaaccagagccuggccuucaucagaaagagcgacgagcugcugcacaacgugaacgugggcaagagcaccaccaacaucaugaucaccaccaucaucaucgugaucaucgugauccugcugcugcugaucgccgugggccuguuccuguacugcaaggccagaagcacccccgugacccugagcaaggaccagcugagcggcaucaacaacaucgccuucagcaacugaggacuaguuauaagacugacuagcccgaugggccucccaacgggcccuccuccccuccuugcaccgagauuaauaaaaaaaaaaaaaaaaaaaaaaaaaaaaaaaaaaaaaaaaaaaaaaaaaaaaaaaaaaaaaaaaugcaucccccccccccccccccccccccccccccccaaaggcucuuuucagagccaccagaauu

SEQ ID NO: 17996 - RNA, 1825 nt, Artificial Sequence
  mRNA product Design i-3 comprising derived and/or modified sequence from HRSV(Memphis-37)__AIY60640.1__F_DSCav1_mut6 (opt5)
gggagaaagcuuaccauggagcugcccauccucaagaccaacgccauuacaacgauccuggcugccgugacccuuugcuucgcgagcucccagaauauuacagaagaguuuuaccaaucuaccuguagcgcugucuccaaaggcuaucugggggcccucagaacaggaugguacaccucuguuaucacaauugaacugagcaacaucaaggagaauaaaugcaacggcaccgacgccaaggugaaacuuaucaagcaggaacuggauaaguauaaaaaugcugugacggaccuccagaugcugauguguuccaccccugccgcugggucuggaagcgccauugcguccggcaucgccgucugcaaggugcugcaccucgagggggagguuaacaaaauuaagaaugcucugcuuagcacaaacaaagccguggucucucuguccaauggagugagcguucucaccuucaaggugcuggaucuuaagaacuacaucgacaaacagcugcucccgauucugaauaagcaaucuuguuccauccccaacccugaaacagucauggaguuucagcagaaaaauaaccggcugcucgaaauuacccgcgaguucagcgugaaugcuggcgugacgacacccgucucuaccuauaugcugacaaacuccgagcuucugagccucaucaacgauaugccuaucaccaaugaccagaagaaacugauguccaacaauguucaaauugugagacagcagucuuacagcaucaugugcauuaucaaggaagaggugcuugccuaugucgugcagcugccccucuacggcguuauugauaccccuuguuggaaacugcauacauccccgcugugcacgaccaacacaaaggaagggagcaauaucugucucacccggacagaccgcggaugguacugcgauaacgcgggcucuguguccuuuuucccccaagccgagaccuguaaggucugcagcaauagaguguuuugcgacacgaugaacucucugacacuuccuagcgaaguuaaucuguguaacaucgauauuuucaaucccaaauaugacugcaagaucaugaccuccaaaaccgaugugucuagcuccgucauuacaagccucggggcuaucgugucuuguuacggaaagaccaaaugcacagccuccaacaagaauaagggcauuaucaaaacguuuagcaacgggugugacuaugucucuaauaagggaguggacaccguuuccgugggcaacacacuguacuaugucaacaaacaggagggccagagccuuuacgugaagggggagccuaucauuaauuucuaugauccccugguuuuuccguccgacgaauuugaugcuucuaucagccaagugaacgagaaaauuaaucagucccucgccuucauccggaagucugacgaacugcugcacaacgucaaugugggaaagagcaccacaaacauuaugaucaccacgauuaucaucgugauuaucguuauucuccugcuucugaucgccgucggccucuuccuguacugcaaagcucgcuccaccccugugacacugagcaaggaucagcuuucugggauuaauaacaucgcguucuccaauugaggacuaguuauaagacugacuagcccgaugggccucccaacgggcccuccuccccuccuugcaccgagauuaauaaaaaaaaaaaaaaaaaaaaaaaaaaaaaaaaaaaaaaaaaaaaaaaaaaaaaaaaaaaaaaaaugcaucccccccccccccccccccccccccccccccaaaggcucuuuucagagccaccagaauu

SEQ ID NO: 17997 - RNA, 1825 nt, Artificial Sequence
  mRNA product Design i-3 comprising derived and/or modified sequence from HRSV(Memphis-37)__AIY60640.1__F_DSCav1_mut6 (opt6)
gggagaaagcuuaccauggaacuaccaauuuuaaaaacaaacgcaauuacaacuauacucgcagcaguaacauuauguuucgccucaucccaaaacauaacagaagaauuuuaccaaucaacaugcagcgcaguaucaaaaggauaucucggagcauuacgaacagguugguacacaucuguaaucacuauagaacuaucaaacauaaaagaaaacaaaugcaauggaaccgacgcaaaaguaaaauuaauaaaacaagaacucgauaaauacaaaaaugcaguaacagaccuccaaaugcucauguguucaacaccagccgcaggaucagguuccgccauagcaucuggcauagcaguaugcaaaguacuccacuuagaaggagaaguuaacaaaauaaaaaacgcacuauuaucaacaaacaaagcaguaguaucccucucaaacggagucucaguauuaacauucaaaguauuagaccuaaaaaacuacauagacaaacaacuacuuccaauacucaacaaacaaucaugcucaauaccaaacccagaaaccguaauggaauuucaacaaaaaaacaaccgacuacuagaaaucacacgagaauuuucaguaaacgccggugucacaacuccaguaucaacuuauauguuaaccaacucagaacuauuaucauuaauaaacgauaugcccauaacuaacgaccaaaaaaaauuaaugucaaacaacguacaaauaguacgccaacaaaguuacucaauaaugugcaucauaaaagaagaaguauuagcguacguuguacaacuaccucuauacggagucauagacacaccaugcuggaaacuucacacaucaccacuauguacaacaaacacaaaagaaggcaguaacauaugccuaacaagaacagaccguggaugguauugugacaacgcuggaucuguaucauucuucccucaagcagaaaccuguaaaguuugcucaaacagagucuucugugacacaaugaacucucuaacacuaccuuccgaagugaaccucuguaacauagacauauucaauccaaaauaugauugcaaaauaaugacuucaaaaacagauguaucauccucuguuauaacaucauuaggcgccauaguuucaugcuacggaaaaacuaaaugcacagcaucaaacaaaaacaaaggaauaauaaaaaccuucucaaauggaugcgacuacguaagcaacaaaggcguagacacaguaucaguagguaauacauuauacuacguaaacaaacaagaaggacaaucacuuuauguuaaaggagaaccuauaauaaacuucuacgacccacuuguauuuccauccgaugaauuugacgcaucuauaucacaagucaacgaaaaaauaaaccaaucauuagcauucauucgaaaauccgaugaacuacuccauaacguaaaugucggaaaaucaacaaccaacauaaugaucacaacaauaaucauagugauaauaguaauacuccuacuacuaaucgcaguaggucuauuccuauauuguaaagcaagaucuacuccaguuacacucucuaaagaccaauuaagcgguaucaacaacaucgccuucagcaauuaaggacuaguuauaagacugacuagcccgaugggccucccaacgggcccuccuccccuccuugcaccgagauuaauaaaaaaaaaaaaaaaaaaaaaaaaaaaaaaaaaaaaaaaaaaaaaaaaaaaaaaaaaaaaaaaaugcaucccccccccccccccccccccccccccccccaaaggcucuuuucagagccaccagaauu

SEQ ID NO: 17998 - RNA, 1825 nt, Artificial Sequence
  mRNA product Design i-3 comprising derived and/or modified sequence from HRSV(Memphis-37)__AIY60640.1__F_DSCav1_mut6 (opt11)
gggagaaagcuuaccauggagcugcccauccucaagaccaacgccaucaccacgauccuggccgcggugacccugugcuucgcgagcucccaaaacaucaccgaggaguucuaccagagcacgugcuccgccgucagcaagggcuaccucggggcccugcgcaccggcugguacaccuccgugaucaccaucgagcugagcaacaucaaggaaaacaagugcaacgggacggacgcaaaggugaagcucaucaagcaggagcuggauaaguacaagaacgcggucacggaccugcagaugcucaugugcuccaccccggccgccggcagcggguccgccaucgcguccggcaucgccgugugcaagguguugcaccuggagggcgaggucaacaagaucaagaacgcccuccuuuccaccaauaaggcuguugugagccuguccaacggggucagcgugcucaccuucaaggugcuggaccugaagaacuacaucgacaagcagcuccugcccauccugaacaagcaguccugcagcauccccaaccccgagacagucauggaguuccagcagaagaacaaccggcuccuggagaucacccgcgaguucuccguuaacgccggggugaccaccccgguaagcacauacaugcugaccaacagcgagcuccugagccugaucaacgacaugcccaucaccaacgaccagaagaagcucaugagcaacaacgugcagaucgugcggcagcaguccuacagcaucaugugcaucaucaaggaggagguccuggcguacguggugcaacugccccucuacggggucaucgacacccccugcuggaagcugcacacguccccgcugugcaccaccaacaccaaggagggcagcaacaucugccucacgcgcaccgaccgggggugguacugcgacaacgcaggcuccgugagcuucuucccccaggccgagaccugcaaggugugcuccaaccgcgucuucugcgacaccaugaacagccugacgcugcccuccgaggugaaccucugcaacaucgacaucuucaaccccaaguacgacuguaagaucaugaccagcaagaccgaugucuccagcuccgugaucaccagccugggcgccauaguguccuguuaugggaagacgaagugcaccgccagcaacaagaacaaaggcaucaucaagaccuucuccaacgggugcgacuacgucagcaacaagggcguggacacaguguccgucggcaacacgcuguacuacgugaacaagcaggaggggcagagccucuacgugaagggcgagccgaucaucaacuucuacgauccccuggucuuccccagcgacgaguucgacgcguccaucagccaagugaacgagaagaucaaccagucccuggccuucauccgcaagagcgacgagcuccugcacaacgugaacgucgggaaguccaccaccaacaucaugaucaccaccaucaucaucgugaucaucgucauccugcuccugcugaucgccgucggccucuuccuguacugcaaggcccggagcacgcccgugacccuguccaaggaccagcugucgggcaucaacaacaucgccuucuccaacugaggacuaguuauaagacugacuagcccgaugggccucccaacgggcccuccuccccuccuugcaccgagauuaauaaaaaaaaaaaaaaaaaaaaaaaaaaaaaaaaaaaaaaaaaaaaaaaaaaaaaaaaaaaaaaaaugcaucccccccccccccccccccccccccccccccaaaggcucuuuucagagccaccagaauu

SEQ ID NO: 17999 - protein, 514 aa, Artificial Sequence
  derived and/or modified protein sequence (artificial) from HRSV(Memphis-37)__AIY60640.1__F-del_DSCav1_mut6
MELPILKTNAITTILAAVTLCFASSQNITEEFYQSTCSAVSKGYLGALRTGWYTSVITIELSNIKENKCNGTDAKVKLIKQELDKYKNAVTDLQMLMCSTPAAGSGSAIASGIAVCKVLHLEGEVNKIKNALLSTNKAVVSLSNGVSVLTFKVLDLKNYIDKQLLPILNKQSCSIPNPETVMEFQQKNNRLLEITREFSVNAGVTTPVSTYMLTNSELLSLINDMPITNDQKKLMSNNVQIVRQQSYSIMCIIKEEVLAYVVQLPLYGVIDTPCWKLHTSPLCTTNTKEGSNICLTRTDRGWYCDNAGSVSFFPQAETCKVCSNRVFCDTMNSLTLPSEVNLCNIDIFNPKYDCKIMTSKTDVSSSVITSLGAIVSCYGKTKCTASNKNKGIIKTFSNGCDYVSNKGVDTVSVGNTLYYVNKQEGQSLYVKGEPIINFYDPLVFPSDEFDASISQVNEKINQSLAFIRKSDELLHNVNVGKSTTNIMITTIIIVIIVILLLLIAVGLFLYCKAR

SEQ ID NO: 18000 - RNA, 1545 nt, Artificial Sequence
  derived and/or modified CDS sequence (opt1) from HRSV(Memphis-37)__AIY60640.1__F-del_DSCav1_mut6
auggagcugcccauccucaagaccaacgccaucaccacgauccuggccgcggugacccugugcuucgccagcucccagaacaucaccgaggaguucuaccagagcacgugcuccgccgucagcaagggcuaccucggcgcccugcgcaccgggugguacaccagcgugaucaccaucgagcuguccaacaucaaggagaacaagugcaacggcaccgacgccaaggugaagcucaucaagcaggagcuggacaaguacaagaacgcggucacggaccugcagaugcugaugugcagcaccccggccgccggcuccgggagcgcgaucgccuccggcaucgccgucugcaaggugcugcaccucgagggcgaggugaacaagaucaagaacgcccugcuguccaccaacaaggccgucgugagccucuccaacggggugagcguccugaccuucaaggugcuggaccucaagaacuacaucgacaagcagcugcugcccauccugaacaagcagagcugcuccauccccaaccccgagaccgucauggaguuccagcagaagaacaaccgccuccuggagaucacgcgggaguucagcgugaacgcgggcgugaccacccccgucuccaccuacaugcugacgaacagcgagcuccugucccugaucaacgacaugccgaucaccaacgaccagaagaagcucaugagcaacaacgugcagaucgugcgccagcaguccuacagcaucaugugcaucaucaaggaggagguccuggccuacguggugcagcugccccucuacggggucaucgacacccccugcuggaagcugcacaccagcccccugugcacgaccaacaccaaggagggcuccaacaucugccucacccggacggaccgcgggugguacugcgacaacgccggcagcguguccuucuucccgcaggccgagaccugcaaggucugcagcaaccggguguucugcgacaccaugaacucccugacccugcccagcgaggugaaccucugcaacaucgacaucuucaaccccaaguacgacugcaagaucaugacguccaagaccgacgucagcuccagcgugaucaccucccugggcgccaucgugagcugcuacgggaagaccaagugcacggcgagcaacaagaacaagggcaucaucaagaccuucuccaacgggugcgacuacgucagcaacaagggcguggacaccguguccgucggcaacacccuguacuacgugaacaagcaggagggccagagccucuacgugaagggggagcccaucaucaacuucuacgacccgcuggucuuccccuccgacgaguucgacgccagcaucucccaggugaacgagaagaucaaccagagccuggccuucauccggaaguccgacgagcuccugcacaacgugaacgucggcaagagcaccacgaacaucaugaucaccaccaucaucaucgugaucaucgugauccugcugcuccugaucgccgucgggcuguuccucuacugcaaggcccgcuga

SEQ ID NO: 18001 - RNA, 1545 nt, Artificial Sequence
  derived and/or modified CDS sequence (opt1) from HRSV(Memphis-37)__AIY60640.1__F-del_DSCav1_mut6
auggagcugcccauccucaagaccaacgccaucaccacgauccuggccgcggugacccugugcuucgccagcucccagaacaucaccgaggaguucuaccagagcacgugcuccgccgucagcaagggcuaccucggggcccugcgcaccggcugguacaccuccgugaucaccaucgagcugagcaacaucaaggagaacaagugcaacgggaccgacgccaaggugaagcucaucaagcaggagcuggacaaguacaagaacgcggucacggaccugcagaugcucaugugcuccaccccggccgccggcagcggguccgccaucgcgagcggcaucgccgugugcaaggugcugcaccuggagggcgaggucaacaagaucaagaacgcccuccuguccaccaacaaggccguggugagccuguccaacggggucagcgugcucaccuucaaggugcuggaccugaagaacuacaucgacaagcagcuccugcccauccugaacaagcaguccugcagcauccccaaccccgagacggucauggaguuccagcagaagaacaaccggcuccuggagaucacccgcgaguucuccgugaacgccggcgugaccaccccggucagcacguacaugcugaccaacuccgagcuccugagccugaucaacgacaugcccaucaccaacgaccagaagaagcucaugagcaacaacgugcagaucgugcggcagcaguccuacagcaucaugugcaucaucaaggaggagguccuggcguacguggugcagcugccccucuacggggucaucgacacccccugcuggaagcugcacacguccccgcugugcaccaccaacaccaaggagggcagcaacaucugccucacgcgcaccgaccgggggugguacugcgacaacgccggcuccgugagcuucuucccccaggccgagaccugcaaggugugcuccaaccgcgucuucugcgacaccaugaacagccugacgcugcccuccgaggugaaccucugcaacaucgacaucuucaaccccaaguacgacugcaagaucaugaccagcaagaccgacgucuccagcuccgugaucaccagccugggcgccaucguguccugcuacgggaagacgaagugcaccgccagcaacaagaacaagggcaucaucaagaccuucuccaacgggugcgacuacgucagcaacaagggcguggacaccguguccgucggcaacacgcuguacuacgugaacaagcaggaggggcagagccucuacgugaagggcgagccgaucaucaacuucuacgacccccuggucuuccccagcgacgaguucgacgcguccaucagccaggugaacgagaagaucaaccagucccuggccuucauccgcaagagcgacgagcuccugcacaacgugaacgucgggaaguccaccaccaacaucaugaucaccaccaucaucaucgugaucaucgugauccugcuccugcugaucgccgucggccucuuccuguacugcaaggcccgguga

SEQ ID NO: 18002 - RNA, 1545 nt, Artificial Sequence
  derived and/or modified CDS sequence (opt2) from HRSV(Memphis-37)__AIY60640.1__F-del_DSCav1_mut6
auggagcuccccauccucaagaccaacgccaucaccaccauccucgccgccgucacccucugcuucgccuccucccagaacaucaccgaggaguucuaccaguccaccugcuccgccgucuccaagggcuaccucggcgcccuccgcaccggcugguacaccuccgucaucaccaucgagcucuccaacaucaaggagaacaagugcaacggcaccgacgccaaggucaagcucaucaagcaggagcucgacaaguacaagaacgccgucaccgaccuccagaugcucaugugcuccacccccgccgccggcuccggcuccgccaucgccuccggcaucgccgucugcaagguccuccaccucgagggcgaggucaacaagaucaagaacgcccuccucuccaccaacaaggccgucgucucccucuccaacggcgucuccguccucaccuucaagguccucgaccucaagaacuacaucgacaagcagcuccuccccauccucaacaagcaguccugcuccauccccaaccccgagaccgucauggaguuccagcagaagaacaaccgccuccucgagaucacccgcgaguucuccgucaacgccggcgucaccacccccgucuccaccuacaugcucaccaacuccgagcuccucucccucaucaacgacaugcccaucaccaacgaccagaagaagcucauguccaacaacguccagaucguccgccagcaguccuacuccaucaugugcaucaucaaggaggagguccucgccuacgucguccagcucccccucuacggcgucaucgacacccccugcuggaagcuccacaccuccccccucugcaccaccaacaccaaggagggcuccaacaucugccucacccgcaccgaccgcggcugguacugcgacaacgccggcuccgucuccuucuucccccaggccgagaccugcaaggucugcuccaaccgcgucuucugcgacaccaugaacucccucacccuccccuccgaggucaaccucugcaacaucgacaucuucaaccccaaguacgacugcaagaucaugaccuccaagaccgacgucuccuccuccgucaucaccucccucggcgccaucgucuccugcuacggcaagaccaagugcaccgccuccaacaagaacaagggcaucaucaagaccuucuccaacggcugcgacuacgucuccaacaagggcgucgacaccgucuccgucggcaacacccucuacuacgucaacaagcaggagggccagucccucuacgucaagggcgagcccaucaucaacuucuacgacccccucgucuuccccuccgacgaguucgacgccuccaucucccaggucaacgagaagaucaaccagucccucgccuucauccgcaaguccgacgagcuccuccacaacgucaacgucggcaaguccaccaccaacaucaugaucaccaccaucaucaucgucaucaucgucauccuccuccuccucaucgccgucggccucuuccucuacugcaaggcccgcuga

SEQ ID NO: 18003 - RNA, 1545 nt, Artificial Sequence
  derived and/or modified CDS sequence (opt3) from HRSV(Memphis-37)__AIY60640.1__F-del_DSCav1_mut6
auggagcugcccauccucaagaccaacgccauuacaacuauacuugcugcagugacgcugugcuucgccagcucccagaauaucaccgaagaguuuuaccaaucuacauguucagcggucaguaaaggcuauuugggggcuuuaagaacuggaugguacaccagcguuauuacaaucgaacuguccaacauuaaggagaauaaaugcaacgguaccgacgccaaggugaaacuaaucaagcaggaacucgauaaguauaaaaaugcaguaacugaccugcagaugcuuauguguucuacuccugccgcuggcucggggucagcaauagccagcggaaucgcugugugcaagguccugcacuuggagggcgaggugaacaaaauuaagaaugcccuccugaguaccaacaaagcgguugugucccugucuaauggugucagcgugcucacguucaagguauuagaucugaagaacuacaucgacaaacagcuuuugccaauucugaauaagcaauccuguucaaucccgaaccccgaaacuguuauggaguuucagcagaaaaauaacaggcuacucgaaauaacccgggaguucagugugaaugcaggggucacaacuccugugagcaccuauaugcugacaaacucugagcuucuguccuugauuaacgauaugccaaucaccaaugaccagaagaaacucaugucaaacaaugugcaaauuguccgccagcagagcuacaguaucaugugcaucauuaaggaagagguucuggccuaugugguacaguuaccccuguacggagugauagauacgccuuguuggaaacuccauacuucuccacuuugcacaaccaacacuaaggaaggcuccaauaucugucugacacgaaccgaccguggcugguacugcgauaacgcugggagcgucucguuuuucccccaagccgagacguguaaggugugcucuaauagaguuuucugcgacaccaugaacuccuugacacuaccuucagaagugaaucuguguaacauugauaucuucaauccaaaauaugacugcaagauaaugacaaguaaaaccgaugucagcuccucugugauuacaagccucggagcaaucguaucauguuacgguaagacuaaaugcaccgcuaguaacaagaauaagggcaucauuaaaacauuuuccaacgggugugacuauguuagcaauaagggaguggacaccgucucugugggcaacacucuguacuaugucaacaaacaggagggucagucacuuuacgugaagggggagccgaucauuaauuucuaugauccccugguuuuuccuagugacgaauuugaugccagcauaucccaagugaacgagaaaaucaaucagucuuuggcguuuauuaggaagucggacgaacuccugcacaacguaaaugucggaaagagcacgacaaacaucaugaucaccacuauuauaaucgugauuaucguuauuuuacugcuacucaucgccgugggccuguuccuuuacugcaaagcacgguga

SEQ ID NO: 18004 - RNA, 1545 nt, Artificial Sequence
  derived and/or modified CDS sequence (opt4) from HRSV(Memphis-37)__AIY60640.1__F-del_DSCav1_mut6
auggagcugcccauccugaagaccaacgccaucaccaccauccuggccgccgugacccugugcuucgccagcagccagaacaucaccgaggaguucuaccagagcaccugcagcgccgugagcaagggcuaccugggcgcccugagaaccggcugguacaccagcgugaucaccaucgagcugagcaacaucaaggagaacaagugcaacggcaccgacgccaaggugaagcugaucaagcaggagcuggacaaguacaagaacgccgugaccgaccugcagaugcugaugugcagcacccccgccgccggcagcggcagcgccaucgccagcggcaucgccgugugcaaggugcugcaccuggagggcgaggugaacaagaucaagaacgcccugcugagcaccaacaaggccguggugagccugagcaacggcgugagcgugcugaccuucaaggugcuggaccugaagaacuacaucgacaagcagcugcugcccauccugaacaagcagagcugcagcauccccaaccccgagaccgugauggaguuccagcagaagaacaacagacugcuggagaucaccagagaguucagcgugaacgccggcgugaccacccccgugagcaccuacaugcugaccaacagcgagcugcugagccugaucaacgacaugcccaucaccaacgaccagaagaagcugaugagcaacaacgugcagaucgugagacagcagagcuacagcaucaugugcaucaucaaggaggaggugcuggccuacguggugcagcugccccuguacggcgugaucgacacccccugcuggaagcugcacaccagcccccugugcaccaccaacaccaaggagggcagcaacaucugccugaccagaaccgacagaggcugguacugcgacaacgccggcagcgugagcuucuucccccaggccgagaccugcaaggugugcagcaacagaguguucugcgacaccaugaacagccugacccugcccagcgaggugaaccugugcaacaucgacaucuucaaccccaaguacgacugcaagaucaugaccagcaagaccgacgugagcagcagcgugaucaccagccugggcgccaucgugagcugcuacggcaagaccaagugcaccgccagcaacaagaacaagggcaucaucaagaccuucagcaacggcugcgacuacgugagcaacaagggcguggacaccgugagcgugggcaacacccuguacuacgugaacaagcaggagggccagagccuguacgugaagggcgagcccaucaucaacuucuacgacccccugguguuccccagcgacgaguucgacgccagcaucagccaggugaacgagaagaucaaccagagccuggccuucaucagaaagagcgacgagcugcugcacaacgugaacgugggcaagagcaccaccaacaucaugaucaccaccaucaucaucgugaucaucgugauccugcugcugcugaucgccgugggccuguuccuguacugcaaggccagauga

SEQ ID NO: 18005 - RNA, 1545 nt, Artificial Sequence
  derived and/or modified CDS sequence (opt5) from HRSV(Memphis-37)__AIY60640.1__F-del_DSCav1_mut6
auggagcugcccauccucaagaccaacgccauuacaacgauccuggcugccgugacccuuugcuucgcgagcucccagaauauuacagaagaguuuuaccaaucuaccuguagcgcugucuccaaaggcuaucugggggcccucagaacaggaugguacaccucuguuaucacaauugaacugagcaacaucaaggagaauaaaugcaacggcaccgacgccaaggugaaacuuaucaagcaggaacuggauaaguauaaaaaugcugugacggaccuccagaugcugauguguuccaccccugccgcugggucuggaagcgccauugcguccggcaucgccgucugcaaggugcugcaccucgagggggagguuaacaaaauuaagaaugcucugcuuagcacaaacaaagccguggucucucuguccaauggagugagcguucucaccuucaaggugcuggaucuuaagaacuacaucgacaaacagcugcucccgauucugaauaagcaaucuuguuccauccccaacccugaaacagucauggaguuucagcagaaaaauaaccggcugcucgaaauuacccgcgaguucagcgugaaugcuggcgugacgacacccgucucuaccuauaugcugacaaacuccgagcuucugagccucaucaacgauaugccuaucaccaaugaccagaagaaacugauguccaacaauguucaaauugugagacagcagucuuacagcaucaugugcauuaucaaggaagaggugcuugccuaugucgugcagcugccccucuacggcguuauugauaccccuuguuggaaacugcauacauccccgcugugcacgaccaacacaaaggaagggagcaauaucugucucacccggacagaccgcggaugguacugcgauaacgcgggcucuguguccuuuuucccccaagccgagaccuguaaggucugcagcaauagaguguuuugcgacacgaugaacucucugacacuuccuagcgaaguuaaucuguguaacaucgauauuuucaaucccaaauaugacugcaagaucaugaccuccaaaaccgaugugucuagcuccgucauuacaagccucggggcuaucgugucuuguuacggaaagaccaaaugcacagccuccaacaagaauaagggcauuaucaaaacguuuagcaacgggugugacuaugucucuaauaagggaguggacaccguuuccgugggcaacacacuguacuaugucaacaaacaggagggccagagccuuuacgugaagggggagccuaucauuaauuucuaugauccccugguuuuuccguccgacgaauuugaugcuucuaucagccaagugaacgagaaaauuaaucagucccucgccuucauccggaagucugacgaacugcugcacaacgucaaugugggaaagagcaccacaaacauuaugaucaccacgauuaucaucgugauuaucguuauucuccugcuucugaucgccgucggccucuuccuguacugcaaagcucgcuga

SEQ ID NO: 18006 - RNA, 1545 nt, Artificial Sequence
  derived and/or modified CDS sequence (opt6) from HRSV(Memphis-37)__AIY60640.1__F-del_DSCav1_mut6
auggaacuaccuauacuaaaaaccaacgccauaacaacaauacuagccgcaguuacacucugcuuugcauccucacaaaacaucacagaggaauuuuaccaaucuacuugcuccgcaguaucaaaaggauaccuaggagcacuccguacaggaugguacacaucagucauaacaauugaauuaucuaacaucaaagaaaacaaauguaaugguacagacgccaaaguaaaauuaauaaaacaagaacuagacaaauacaaaaacgccguaacagaccuacaaaugcuaaugugcucaacccccgccgcaggaucuggaucagcaauugccucaggcauagcaguaugcaaaguccuacaccuagaaggagaagucaacaaaauaaaaaacgcucuccucucaaccaauaaagcaguaguaucccucucaaacggaguaucaguacuaacauucaaaguacuagaccucaaaaauuauauagacaagcaacuacucccaauauuaaauaaacaauccugcucaauacccaauccagaaacagucauggaauuucaacaaaaaaacaaccgacucuuagaaauaacaagagaauuuucagucaaugccggcgucacaaccccaguaucaacauacaugcuaacaaacucagaacuacuaucacuaaucaacgauaugcccauaaccaacgaccaaaaaaaacuaaugucaaacaauguacaaauuguaagacaacagucuuauucaauaaugugcauaauaaaagaagaagucuuagcauauguaguacaacuaccacuauacggaguaauagacacaccauguuggaaauuacacacauccccacuauguaccaccaacacaaaagaaggaucuaacauaugccuaaccagaacagaccgaggcugguauugcgacaaugcaggaucaguauccuucuuuccacaagcagaaacaugcaaagucugcucuaacagaguauucugcgauacuaugaacucacuuaccuuaccaucagaaguaaaucuauguaauaucgacauauucaaucccaaauaugauugcaaaauaaugaccucaaaaacagauguaucaucaucagucauaacaucacuaggagcaauagucagcugcuaugggaaaacaaaaugcacagcuuccaacaaaaacaaaggaaucauaaaaacauucucaaaugguugugacuacguauccaacaaaggaguagauacaguaucuguaggcaacacauuauacuauguaaauaaacaagaaggacaaagccuauacgucaaaggagaacccaucauaaauuucuaugacccauuaguuuucccaucugacgaauuugacgcuuccaucucccaaguaaaugaaaaaaucaaccaaagccucgcauucauucgcaaaucugacgaauuacuccacaacguaaacguaggaaaauccacaacaaacauuaugaucaccaccauaauaaucguaauaauagucauauuacuacuccucauagcaguaggacuauuccuauacuguaaagcuagauaa

SEQ ID NO: 18007 - RNA, 1545 nt, Artificial Sequence
  derived and/or modified CDS sequence (opt11) from HRSV(Memphis-37)__AIY60640.1__F-del_DSCav1_mut6
auggaauuaccaauccucaaaacuaacgccaucaccaccauccucgcugccgucacccucugcuucgccuccagccaaaacaucacagaagaguucuaccaaagcacaugcuccgcugucuccaaaggcuaccuuggcgcccuccgcaccggcugguacaccucaguaauuaccauugaacuaagcaacaucaaagaaaauaaaugcaacggcaccgacgccaaaguuaaacucauaaaacaggaacucgacaaauacaaaaacgccguaacagaccuccaaaugcucaugugcuccacccccgccgccggcucaggcuccgccaucgcaagcggaauagcaguuugcaaaguccuccaccuagaaggcgaggucaacaagauuaaaaacgcacuucucucaaccaacaaggccgucguaucacucucaaacggcgucuccguccucaccuucaaaguucuggaccucaaaaacuacaucgauaaacaacuacucccaauacuuaacaaacaaucaugcuccaucccaaaccccgaaaccgucauggaguuccaacagaaaaacaaccgccuacuggaaaucacacgcgaguucagcguaaacgcuggcgucacuacacccgucuccaccuacaugcucaccaauucugaacuccuaucacucauaaacgacaugcccauuaccaacgaccaaaagaaacuaaugucaaacaacguccaaaucguaagacaacaaucguauuccaucaugugcauaauuaaagaagaaguucucgccuacgugguccaacuaccccucuacggagucauagacacuccuuguuggaaacuccacaccucuccccucugcacuaccaacacaaaagaaggcuccaacaucugccucacccgaaccgacagaggcugguacugcgacaacgccggcuccgucuccuucuucccccaagccgaaaccugcaaagucugcuccaaccgcguuuucugcgacaccaugaacucccucacacuccccuccgaagucaaccuauguaacauagacauauucaacccaaaauacgacugcaaaaucaugacauccaaaaccgacgugucuuccucggucaucaccucccucggcgccaucgucucaugcuacggcaaaacuaaaugcaccgcauccaacaaaaacaaaggcauaaucaaaacauucuccaacggcugcgacuacguuucuaacaaaggcgucgauaccgucuccgucggaaacacccucuacuacguaaacaagcaagaaggccagucccuauacguaaaaggagaaccaauuaucaacuucuacgacccccuagucuuccccuccgacgaguucgacgccuccauaucccaagucaacgagaaaaucaaccaaucccuagccuucauccgcaaaucagacgaacuccuccacaacgucaacgucggaaaauccacaacuaacaucaugaucaccaccaucauuaucgucaucauaguuauacuccuccuccucauagccgucggccucuuccuauacugcaaagcucgcuaa

SEQ ID NO: 18008 - RNA, 1821 nt, Artificial Sequence
  mRNA product Design a-1 comprising derived and/or modified sequence from HRSV(Memphis-37)__AIY60640.1__F-del_DSCav1_mut6 (opt1)
gggagagucccgcagucggcguccagcggcucugcuuguucgugugugugucguugcaggccuuauucaagcuuaccauggagcugcccauccucaagaccaacgccaucaccacgauccuggccgcggugacccugugcuucgccagcucccagaacaucaccgaggaguucuaccagagcacgugcuccgccgucagcaagggcuaccucggcgcccugcgcaccgggugguacaccagcgugaucaccaucgagcuguccaacaucaaggagaacaagugcaacggcaccgacgccaaggugaagcucaucaagcaggagcuggacaaguacaagaacgcggucacggaccugcagaugcugaugugcagcaccccggccgccggcuccgggagcgcgaucgccuccggcaucgccgucugcaaggugcugcaccucgagggcgaggugaacaagaucaagaacgcccugcuguccaccaacaaggccgucgugagccucuccaacggggugagcguccugaccuucaaggugcuggaccucaagaacuacaucgacaagcagcugcugcccauccugaacaagcagagcugcuccauccccaaccccgagaccgucauggaguuccagcagaagaacaaccgccuccuggagaucacgcgggaguucagcgugaacgcgggcgugaccacccccgucuccaccuacaugcugacgaacagcgagcuccugucccugaucaacgacaugccgaucaccaacgaccagaagaagcucaugagcaacaacgugcagaucgugcgccagcaguccuacagcaucaugugcaucaucaaggaggagguccuggccuacguggugcagcugccccucuacggggucaucgacacccccugcuggaagcugcacaccagcccccugugcacgaccaacaccaaggagggcuccaacaucugccucacccggacggaccgcgggugguacugcgacaacgccggcagcguguccuucuucccgcaggccgagaccugcaaggucugcagcaaccggguguucugcgacaccaugaacucccugacccugcccagcgaggugaaccucugcaacaucgacaucuucaaccccaaguacgacugcaagaucaugacguccaagaccgacgucagcuccagcgugaucaccucccugggcgccaucgugagcugcuacgggaagaccaagugcacggcgagcaacaagaacaagggcaucaucaagaccuucuccaacgggugcgacuacgucagcaacaagggcguggacaccguguccgucggcaacacccuguacuacgugaacaagcaggagggccagagccucuacgugaagggggagcccaucaucaacuucuacgacccgcuggucuuccccuccgacgaguucgacgccagcaucucccaggugaacgagaagaucaaccagagccuggccuucauccggaaguccgacgagcuccugcacaacgugaacgucggcaagagcaccacgaacaucaugaucaccaccaucaucaucgugaucaucgugauccugcugcuccugaucgccgucgggcuguuccucuacugcaaggcccgcugaggacuagucccuguucccagagcccacuuuuuuuucuuuuuuugaaauaaaauagccugucuuucagaucuaaaaaaaaaaaaaaaaaaaaaaaaaaaaaaaaaaaaaaaaaaaaaaaaaaaaaaaaaaaaaaaaugcaucccccccccccccccccccccccccccccccaaaggcucuuuucagagccaccagaauu

SEQ ID NO: 18009 - RNA, 1821 nt, Artificial Sequence
  mRNA product Design a-1 comprising derived and/or modified sequence from HRSV(Memphis-37)__AIY60640.1__F-del_DSCav1_mut6 (opt1)
gggagagucccgcagucggcguccagcggcucugcuuguucgugugugugucguugcaggccuuauucaagcuuaccauggagcugcccauccucaagaccaacgccaucaccacgauccuggccgcggugacccugugcuucgccagcucccagaacaucaccgaggaguucuaccagagcacgugcuccgccgucagcaagggcuaccucggggcccugcgcaccggcugguacaccuccgugaucaccaucgagcugagcaacaucaaggagaacaagugcaacgggaccgacgccaaggugaagcucaucaagcaggagcuggacaaguacaagaacgcggucacggaccugcagaugcucaugugcuccaccccggccgccggcagcggguccgccaucgcgagcggcaucgccgugugcaaggugcugcaccuggagggcgaggucaacaagaucaagaacgcccuccuguccaccaacaaggccguggugagccuguccaacggggucagcgugcucaccuucaaggugcuggaccugaagaacuacaucgacaagcagcuccugcccauccugaacaagcaguccugcagcauccccaaccccgagacggucauggaguuccagcagaagaacaaccggcuccuggagaucacccgcgaguucuccgugaacgccggcgugaccaccccggucagcacguacaugcugaccaacuccgagcuccugagccugaucaacgacaugcccaucaccaacgaccagaagaagcucaugagcaacaacgugcagaucgugcggcagcaguccuacagcaucaugugcaucaucaaggaggagguccuggcguacguggugcagcugccccucuacggggucaucgacacccccugcuggaagcugcacacguccccgcugugcaccaccaacaccaaggagggcagcaacaucugccucacgcgcaccgaccgggggugguacugcgacaacgccggcuccgugagcuucuucccccaggccgagaccugcaaggugugcuccaaccgcgucuucugcgacaccaugaacagccugacgcugcccuccgaggugaaccucugcaacaucgacaucuucaaccccaaguacgacugcaagaucaugaccagcaagaccgacgucuccagcuccgugaucaccagccugggcgccaucguguccugcuacgggaagacgaagugcaccgccagcaacaagaacaagggcaucaucaagaccuucuccaacgggugcgacuacgucagcaacaagggcguggacaccguguccgucggcaacacgcuguacuacgugaacaagcaggaggggcagagccucuacgugaagggcgagccgaucaucaacuucuacgacccccuggucuuccccagcgacgaguucgacgcguccaucagccaggugaacgagaagaucaaccagucccuggccuucauccgcaagagcgacgagcuccugcacaacgugaacgucgggaaguccaccaccaacaucaugaucaccaccaucaucaucgugaucaucgugauccugcuccugcugaucgccgucggccucuuccuguacugcaaggcccggugaggacuagucccuguucccagagcccacuuuuuuuucuuuuuuugaaauaaaauagccugucuuucagaucuaaaaaaaaaaaaaaaaaaaaaaaaaaaaaaaaaaaaaaaaaaaaaaaaaaaaaaaaaaaaaaaaugcaucccccccccccccccccccccccccccccccaaaggcucuuuucagagccaccagaauu

SEQ ID NO: 18010 - RNA, 1821 nt, Artificial Sequence
  mRNA product Design a-1 comprising derived and/or modified sequence from HRSV(Memphis-37)__AIY60640.1__F-del_DSCav1_mut6 (opt2)
gggagagucccgcagucggcguccagcggcucugcuuguucgugugugugucguugcaggccuuauucaagcuuaccauggagcuccccauccucaagaccaacgccaucaccaccauccucgccgccgucacccucugcuucgccuccucccagaacaucaccgaggaguucuaccaguccaccugcuccgccgucuccaagggcuaccucggcgcccuccgcaccggcugguacaccuccgucaucaccaucgagcucuccaacaucaaggagaacaagugcaacggcaccgacgccaaggucaagcucaucaagcaggagcucgacaaguacaagaacgccgucaccgaccuccagaugcucaugugcuccacccccgccgccggcuccggcuccgccaucgccuccggcaucgccgucugcaagguccuccaccucgagggcgaggucaacaagaucaagaacgcccuccucuccaccaacaaggccgucgucucccucuccaacggcgucuccguccucaccuucaagguccucgaccucaagaacuacaucgacaagcagcuccuccccauccucaacaagcaguccugcuccauccccaaccccgagaccgucauggaguuccagcagaagaacaaccgccuccucgagaucacccgcgaguucuccgucaacgccggcgucaccacccccgucuccaccuacaugcucaccaacuccgagcuccucucccucaucaacgacaugcccaucaccaacgaccagaagaagcucauguccaacaacguccagaucguccgccagcaguccuacuccaucaugugcaucaucaaggaggagguccucgccuacgucguccagcucccccucuacggcgucaucgacacccccugcuggaagcuccacaccuccccccucugcaccaccaacaccaaggagggcuccaacaucugccucacccgcaccgaccgcggcugguacugcgacaacgccggcuccgucuccuucuucccccaggccgagaccugcaaggucugcuccaaccgcgucuucugcgacaccaugaacucccucacccuccccuccgaggucaaccucugcaacaucgacaucuucaaccccaaguacgacugcaagaucaugaccuccaagaccgacgucuccuccuccgucaucaccucccucggcgccaucgucuccugcuacggcaagaccaagugcaccgccuccaacaagaacaagggcaucaucaagaccuucuccaacggcugcgacuacgucuccaacaagggcgucgacaccgucuccgucggcaacacccucuacuacgucaacaagcaggagggccagucccucuacgucaagggcgagcccaucaucaacuucuacgacccccucgucuuccccuccgacgaguucgacgccuccaucucccaggucaacgagaagaucaaccagucccucgccuucauccgcaaguccgacgagcuccuccacaacgucaacgucggcaaguccaccaccaacaucaugaucaccaccaucaucaucgucaucaucgucauccuccuccuccucaucgccgucggccucuuccucuacugcaaggcccgcugaggacuagucccuguucccagagcccacuuuuuuuucuuuuuuugaaauaaaauagccugucuuucagaucuaaaaaaaaaaaaaaaaaaaaaaaaaaaaaaaaaaaaaaaaaaaaaaaaaaaaaaaaaaaaaaaaugcaucccccccccccccccccccccccccccccccaaaggcucuuuucagagccaccagaauu

SEQ ID NO: 18011 - RNA, 1821 nt, Artificial Sequence
  mRNA product Design a-1 comprising derived and/or modified sequence from HRSV(Memphis-37)__AIY60640.1__F-del_DSCav1_mut6 (opt3)
gggagagucccgcagucggcguccagcggcucugcuuguucgugugugugucguugcaggccuuauucaagcuuaccauggagcugcccauccucaagaccaacgccauuacaacuauacuugcugcagugacgcugugcuucgccagcucccagaauaucaccgaagaguuuuaccaaucuacauguucagcggucaguaaaggcuauuugggggcuuuaagaacuggaugguacaccagcguuauuacaaucgaacuguccaacauuaaggagaauaaaugcaacgguaccgacgccaaggugaaacuaaucaagcaggaacucgauaaguauaaaaaugcaguaacugaccugcagaugcuuauguguucuacuccugccgcuggcucggggucagcaauagccagcggaaucgcugugugcaagguccugcacuuggagggcgaggugaacaaaauuaagaaugcccuccugaguaccaacaaagcgguugugucccugucuaauggugucagcgugcucacguucaagguauuagaucugaagaacuacaucgacaaacagcuuuugccaauucugaauaagcaauccuguucaaucccgaaccccgaaacuguuauggaguuucagcagaaaaauaacaggcuacucgaaauaacccgggaguucagugugaaugcaggggucacaacuccugugagcaccuauaugcugacaaacucugagcuucuguccuugauuaacgauaugccaaucaccaaugaccagaagaaacucaugucaaacaaugugcaaauuguccgccagcagagcuacaguaucaugugcaucauuaaggaagagguucuggccuaugugguacaguuaccccuguacggagugauagauacgccuuguuggaaacuccauacuucuccacuuugcacaaccaacacuaaggaaggcuccaauaucugucugacacgaaccgaccguggcugguacugcgauaacgcugggagcgucucguuuuucccccaagccgagacguguaaggugugcucuaauagaguuuucugcgacaccaugaacuccuugacacuaccuucagaagugaaucuguguaacauugauaucuucaauccaaaauaugacugcaagauaaugacaaguaaaaccgaugucagcuccucugugauuacaagccucggagcaaucguaucauguuacgguaagacuaaaugcaccgcuaguaacaagaauaagggcaucauuaaaacauuuuccaacgggugugacuauguuagcaauaagggaguggacaccgucucugugggcaacacucuguacuaugucaacaaacaggagggucagucacuuuacgugaagggggagccgaucauuaauuucuaugauccccugguuuuuccuagugacgaauuugaugccagcauaucccaagugaacgagaaaaucaaucagucuuuggcguuuauuaggaagucggacgaacuccugcacaacguaaaugucggaaagagcacgacaaacaucaugaucaccacuauuauaaucgugauuaucguuauuuuacugcuacucaucgccgugggccuguuccuuuacugcaaagcacggugaggacuagucccuguucccagagcccacuuuuuuuucuuuuuuugaaauaaaauagccugucuuucagaucuaaaaaaaaaaaaaaaaaaaaaaaaaaaaaaaaaaaaaaaaaaaaaaaaaaaaaaaaaaaaaaaaugcaucccccccccccccccccccccccccccccccaaaggcucuuuucagagccaccagaauu

SEQ ID NO: 18012 - RNA, 1821 nt, Artificial Sequence
  mRNA product Design a-1 comprising derived and/or modified sequence from HRSV(Memphis-37)__AIY60640.1__F-del_DSCav1_mut6 (opt4)
gggagagucccgcagucggcguccagcggcucugcuuguucgugugugugucguugcaggccuuauucaagcuuaccauggagcugcccauccugaagaccaacgccaucaccaccauccuggccgccgugacccugugcuucgccagcagccagaacaucaccgaggaguucuaccagagcaccugcagcgccgugagcaagggcuaccugggcgcccugagaaccggcugguacaccagcgugaucaccaucgagcugagcaacaucaaggagaacaagugcaacggcaccgacgccaaggugaagcugaucaagcaggagcuggacaaguacaagaacgccgugaccgaccugcagaugcugaugugcagcacccccgccgccggcagcggcagcgccaucgccagcggcaucgccgugugcaaggugcugcaccuggagggcgaggugaacaagaucaagaacgcccugcugagcaccaacaaggccguggugagccugagcaacggcgugagcgugcugaccuucaaggugcuggaccugaagaacuacaucgacaagcagcugcugcccauccugaacaagcagagcugcagcauccccaaccccgagaccgugauggaguuccagcagaagaacaacagacugcuggagaucaccagagaguucagcgugaacgccggcgugaccacccccgugagcaccuacaugcugaccaacagcgagcugcugagccugaucaacgacaugcccaucaccaacgaccagaagaagcugaugagcaacaacgugcagaucgugagacagcagagcuacagcaucaugugcaucaucaaggaggaggugcuggccuacguggugcagcugccccuguacggcgugaucgacacccccugcuggaagcugcacaccagcccccugugcaccaccaacaccaaggagggcagcaacaucugccugaccagaaccgacagaggcugguacugcgacaacgccggcagcgugagcuucuucccccaggccgagaccugcaaggugugcagcaacagaguguucugcgacaccaugaacagccugacccugcccagcgaggugaaccugugcaacaucgacaucuucaaccccaaguacgacugcaagaucaugaccagcaagaccgacgugagcagcagcgugaucaccagccugggcgccaucgugagcugcuacggcaagaccaagugcaccgccagcaacaagaacaagggcaucaucaagaccuucagcaacggcugcgacuacgugagcaacaagggcguggacaccgugagcgugggcaacacccuguacuacgugaacaagcaggagggccagagccuguacgugaagggcgagcccaucaucaacuucuacgacccccugguguuccccagcgacgaguucgacgccagcaucagccaggugaacgagaagaucaaccagagccuggccuucaucagaaagagcgacgagcugcugcacaacgugaacgugggcaagagcaccaccaacaucaugaucaccaccaucaucaucgugaucaucgugauccugcugcugcugaucgccgugggccuguuccuguacugcaaggccagaugaggacuagucccuguucccagagcccacuuuuuuuucuuuuuuugaaauaaaauagccugucuuucagaucuaaaaaaaaaaaaaaaaaaaaaaaaaaaaaaaaaaaaaaaaaaaaaaaaaaaaaaaaaaaaaaaaugcaucccccccccccccccccccccccccccccccaaaggcucuuuucagagccaccagaauu

SEQ ID NO: 18013 - RNA, 1821 nt, Artificial Sequence
  mRNA product Design a-1 comprising derived and/or modified sequence from HRSV(Memphis-37)__AIY60640.1__F-del_DSCav1_mut6 (opt5)
gggagagucccgcagucggcguccagcggcucugcuuguucgugugugugucguugcaggccuuauucaagcuuaccauggagcugcccauccucaagaccaacgccauuacaacgauccuggcugccgugacccuuugcuucgcgagcucccagaauauuacagaagaguuuuaccaaucuaccuguagcgcugucuccaaaggcuaucugggggcccucagaacaggaugguacaccucuguuaucacaauugaacugagcaacaucaaggagaauaaaugcaacggcaccgacgccaaggugaaacuuaucaagcaggaacuggauaaguauaaaaaugcugugacggaccuccagaugcugauguguuccaccccugccgcugggucuggaagcgccauugcguccggcaucgccgucugcaaggugcugcaccucgagggggagguuaacaaaauuaagaaugcucugcuuagcacaaacaaagccguggucucucuguccaauggagugagcguucucaccuucaaggugcuggaucuuaagaacuacaucgacaaacagcugcucccgauucugaauaagcaaucuuguuccauccccaacccugaaacagucauggaguuucagcagaaaaauaaccggcugcucgaaauuacccgcgaguucagcgugaaugcuggcgugacgacacccgucucuaccuauaugcugacaaacuccgagcuucugagccucaucaacgauaugccuaucaccaaugaccagaagaaacugauguccaacaauguucaaauugugagacagcagucuuacagcaucaugugcauuaucaaggaagaggugcuugccuaugucgugcagcugccccucuacggcguuauugauaccccuuguuggaaacugcauacauccccgcugugcacgaccaacacaaaggaagggagcaauaucugucucacccggacagaccgcggaugguacugcgauaacgcgggcucuguguccuuuuucccccaagccgagaccuguaaggucugcagcaauagaguguuuugcgacacgaugaacucucugacacuuccuagcgaaguuaaucuguguaacaucgauauuuucaaucccaaauaugacugcaagaucaugaccuccaaaaccgaugugucuagcuccgucauuacaagccucggggcuaucgugucuuguuacggaaagaccaaaugcacagccuccaacaagaauaagggcauuaucaaaacguuuagcaacgggugugacuaugucucuaauaagggaguggacaccguuuccgugggcaacacacuguacuaugucaacaaacaggagggccagagccuuuacgugaagggggagccuaucauuaauuucuaugauccccugguuuuuccguccgacgaauuugaugcuucuaucagccaagugaacgagaaaauuaaucagucccucgccuucauccggaagucugacgaacugcugcacaacgucaaugugggaaagagcaccacaaacauuaugaucaccacgauuaucaucgugauuaucguuauucuccugcuucugaucgccgucggccucuuccuguacugcaaagcucgcugaggacuagucccuguucccagagcccacuuuuuuuucuuuuuuugaaauaaaauagccugucuuucagaucuaaaaaaaaaaaaaaaaaaaaaaaaaaaaaaaaaaaaaaaaaaaaaaaaaaaaaaaaaaaaaaaaugcaucccccccccccccccccccccccccccccccaaaggcucuuuucagagccaccagaauu

SEQ ID NO: 18014 - RNA, 1821 nt, Artificial Sequence
  mRNA product Design a-1 comprising derived and/or modified sequence from HRSV(Memphis-37)__AIY60640.1__F-del_DSCav1_mut6 (opt6)
gggagagucccgcagucggcguccagcggcucugcuuguucgugugugugucguugcaggccuuauucaagcuuaccauggaacuaccuauacuaaaaaccaacgccauaacaacaauacuagccgcaguuacacucugcuuugcauccucacaaaacaucacagaggaauuuuaccaaucuacuugcuccgcaguaucaaaaggauaccuaggagcacuccguacaggaugguacacaucagucauaacaauugaauuaucuaacaucaaagaaaacaaauguaaugguacagacgccaaaguaaaauuaauaaaacaagaacuagacaaauacaaaaacgccguaacagaccuacaaaugcuaaugugcucaacccccgccgcaggaucuggaucagcaauugccucaggcauagcaguaugcaaaguccuacaccuagaaggagaagucaacaaaauaaaaaacgcucuccucucaaccaauaaagcaguaguaucccucucaaacggaguaucaguacuaacauucaaaguacuagaccucaaaaauuauauagacaagcaacuacucccaauauuaaauaaacaauccugcucaauacccaauccagaaacagucauggaauuucaacaaaaaaacaaccgacucuuagaaauaacaagagaauuuucagucaaugccggcgucacaaccccaguaucaacauacaugcuaacaaacucagaacuacuaucacuaaucaacgauaugcccauaaccaacgaccaaaaaaaacuaaugucaaacaauguacaaauuguaagacaacagucuuauucaauaaugugcauaauaaaagaagaagucuuagcauauguaguacaacuaccacuauacggaguaauagacacaccauguuggaaauuacacacauccccacuauguaccaccaacacaaaagaaggaucuaacauaugccuaaccagaacagaccgaggcugguauugcgacaaugcaggaucaguauccuucuuuccacaagcagaaacaugcaaagucugcucuaacagaguauucugcgauacuaugaacucacuuaccuuaccaucagaaguaaaucuauguaauaucgacauauucaaucccaaauaugauugcaaaauaaugaccucaaaaacagauguaucaucaucagucauaacaucacuaggagcaauagucagcugcuaugggaaaacaaaaugcacagcuuccaacaaaaacaaaggaaucauaaaaacauucucaaaugguugugacuacguauccaacaaaggaguagauacaguaucuguaggcaacacauuauacuauguaaauaaacaagaaggacaaagccuauacgucaaaggagaacccaucauaaauuucuaugacccauuaguuuucccaucugacgaauuugacgcuuccaucucccaaguaaaugaaaaaaucaaccaaagccucgcauucauucgcaaaucugacgaauuacuccacaacguaaacguaggaaaauccacaacaaacauuaugaucaccaccauaauaaucguaauaauagucauauuacuacuccucauagcaguaggacuauuccuauacuguaaagcuagauaaggacuagucccuguucccagagcccacuuuuuuuucuuuuuuugaaauaaaauagccugucuuucagaucuaaaaaaaaaaaaaaaaaaaaaaaaaaaaaaaaaaaaaaaaaaaaaaaaaaaaaaaaaaaaaaaaugcaucccccccccccccccccccccccccccccccaaaggcucuuuucagagccaccagaauu

SEQ ID NO: 18015 - RNA, 1821 nt, Artificial Sequence
  mRNA product Design a-1 comprising derived and/or modified sequence from HRSV(Memphis-37)__AIY60640.1__F-del_DSCav1_mut6 (opt11)
gggagagucccgcagucggcguccagcggcucugcuuguucgugugugugucguugcaggccuuauucaagcuuaccauggaauuaccaauccucaaaacuaacgccaucaccaccauccucgcugccgucacccucugcuucgccuccagccaaaacaucacagaagaguucuaccaaagcacaugcuccgcugucuccaaaggcuaccuuggcgcccuccgcaccggcugguacaccucaguaauuaccauugaacuaagcaacaucaaagaaaauaaaugcaacggcaccgacgccaaaguuaaacucauaaaacaggaacucgacaaauacaaaaacgccguaacagaccuccaaaugcucaugugcuccacccccgccgccggcucaggcuccgccaucgcaagcggaauagcaguuugcaaaguccuccaccuagaaggcgaggucaacaagauuaaaaacgcacuucucucaaccaacaaggccgucguaucacucucaaacggcgucuccguccucaccuucaaaguucuggaccucaaaaacuacaucgauaaacaacuacucccaauacuuaacaaacaaucaugcuccaucccaaaccccgaaaccgucauggaguuccaacagaaaaacaaccgccuacuggaaaucacacgcgaguucagcguaaacgcuggcgucacuacacccgucuccaccuacaugcucaccaauucugaacuccuaucacucauaaacgacaugcccauuaccaacgaccaaaagaaacuaaugucaaacaacguccaaaucguaagacaacaaucguauuccaucaugugcauaauuaaagaagaaguucucgccuacgugguccaacuaccccucuacggagucauagacacuccuuguuggaaacuccacaccucuccccucugcacuaccaacacaaaagaaggcuccaacaucugccucacccgaaccgacagaggcugguacugcgacaacgccggcuccgucuccuucuucccccaagccgaaaccugcaaagucugcuccaaccgcguuuucugcgacaccaugaacucccucacacuccccuccgaagucaaccuauguaacauagacauauucaacccaaaauacgacugcaaaaucaugacauccaaaaccgacgugucuuccucggucaucaccucccucggcgccaucgucucaugcuacggcaaaacuaaaugcaccgcauccaacaaaaacaaaggcauaaucaaaacauucuccaacggcugcgacuacguuucuaacaaaggcgucgauaccgucuccgucggaaacacccucuacuacguaaacaagcaagaaggccagucccuauacguaaaaggagaaccaauuaucaacuucuacgacccccuagucuuccccuccgacgaguucgacgccuccauaucccaagucaacgagaaaaucaaccaaucccuagccuucauccgcaaaucagacgaacuccuccacaacgucaacgucggaaaauccacaacuaacaucaugaucaccaccaucauuaucgucaucauaguuauacuccuccuccucauagccgucggccucuuccuauacugcaaagcucgcuaaggacuagucccuguucccagagcccacuuuuuuuucuuuuuuugaaauaaaauagccugucuuucagaucuaaaaaaaaaaaaaaaaaaaaaaaaaaaaaaaaaaaaaaaaaaaaaaaaaaaaaaaaaaaaaaaaugcaucccccccccccccccccccccccccccccccaaaggcucuuuucagagccaccagaauu

SEQ ID NO: 18016 - RNA, 1840 nt, Artificial Sequence
  mRNA product Design a-2 comprising derived and/or modified sequence from HRSV(Memphis-37)__AIY60640.1__F-del_DSCav1_mut6 (opt1)
gggagaguccgcucagccagguugcagaagcggcuuagcguguguccuaaucuucucucugcguguagguaggccugugccgcaaacaagcuuaccauggagcugcccauccucaagaccaacgccaucaccacgauccuggccgcggugacccugugcuucgccagcucccagaacaucaccgaggaguucuaccagagcacgugcuccgccgucagcaagggcuaccucggcgcccugcgcaccgggugguacaccagcgugaucaccaucgagcuguccaacaucaaggagaacaagugcaacggcaccgacgccaaggugaagcucaucaagcaggagcuggacaaguacaagaacgcggucacggaccugcagaugcugaugugcagcaccccggccgccggcuccgggagcgcgaucgccuccggcaucgccgucugcaaggugcugcaccucgagggcgaggugaacaagaucaagaacgcccugcuguccaccaacaaggccgucgugagccucuccaacggggugagcguccugaccuucaaggugcuggaccucaagaacuacaucgacaagcagcugcugcccauccugaacaagcagagcugcuccauccccaaccccgagaccgucauggaguuccagcagaagaacaaccgccuccuggagaucacgcgggaguucagcgugaacgcgggcgugaccacccccgucuccaccuacaugcugacgaacagcgagcuccugucccugaucaacgacaugccgaucaccaacgaccagaagaagcucaugagcaacaacgugcagaucgugcgccagcaguccuacagcaucaugugcaucaucaaggaggagguccuggccuacguggugcagcugccccucuacggggucaucgacacccccugcuggaagcugcacaccagcccccugugcacgaccaacaccaaggagggcuccaacaucugccucacccggacggaccgcgggugguacugcgacaacgccggcagcguguccuucuucccgcaggccgagaccugcaaggucugcagcaaccggguguucugcgacaccaugaacucccugacccugcccagcgaggugaaccucugcaacaucgacaucuucaaccccaaguacgacugcaagaucaugacguccaagaccgacgucagcuccagcgugaucaccucccugggcgccaucgugagcugcuacgggaagaccaagugcacggcgagcaacaagaacaagggcaucaucaagaccuucuccaacgggugcgacuacgucagcaacaagggcguggacaccguguccgucggcaacacccuguacuacgugaacaagcaggagggccagagccucuacgugaagggggagcccaucaucaacuucuacgacccgcuggucuuccccuccgacgaguucgacgccagcaucucccaggugaacgagaagaucaaccagagccuggccuucauccggaaguccgacgagcuccugcacaacgugaacgucggcaagagcaccacgaacaucaugaucaccaccaucaucaucgugaucaucgugauccugcugcuccugaucgccgucgggcuguuccucuacugcaaggcccgcugaggacuagucccuguucccagagcccacuuuuuuuucuuuuuuugaaauaaaauagccugucuuucagaucuaaaaaaaaaaaaaaaaaaaaaaaaaaaaaaaaaaaaaaaaaaaaaaaaaaaaaaaaaaaaaaaaugcaucccccccccccccccccccccccccccccccaaaggcucuuuucagagccaccagaauu

SEQ ID NO: 18017 - RNA, 1840 nt, Artificial Sequence
  mRNA product Design a-2 comprising derived and/or modified sequence from HRSV(Memphis-37)__AIY60640.1__F-del_DSCav1_mut6 (opt1)
gggagaguccgcucagccagguugcagaagcggcuuagcguguguccuaaucuucucucugcguguagguaggccugugccgcaaacaagcuuaccauggagcugcccauccucaagaccaacgccaucaccacgauccuggccgcggugacccugugcuucgccagcucccagaacaucaccgaggaguucuaccagagcacgugcuccgccgucagcaagggcuaccucggggcccugcgcaccggcugguacaccuccgugaucaccaucgagcugagcaacaucaaggagaacaagugcaacgggaccgacgccaaggugaagcucaucaagcaggagcuggacaaguacaagaacgcggucacggaccugcagaugcucaugugcuccaccccggccgccggcagcggguccgccaucgcgagcggcaucgccgugugcaaggugcugcaccuggagggcgaggucaacaagaucaagaacgcccuccuguccaccaacaaggccguggugagccuguccaacggggucagcgugcucaccuucaaggugcuggaccugaagaacuacaucgacaagcagcuccugcccauccugaacaagcaguccugcagcauccccaaccccgagacggucauggaguuccagcagaagaacaaccggcuccuggagaucacccgcgaguucuccgugaacgccggcgugaccaccccggucagcacguacaugcugaccaacuccgagcuccugagccugaucaacgacaugcccaucaccaacgaccagaagaagcucaugagcaacaacgugcagaucgugcggcagcaguccuacagcaucaugugcaucaucaaggaggagguccuggcguacguggugcagcugccccucuacggggucaucgacacccccugcuggaagcugcacacguccccgcugugcaccaccaacaccaaggagggcagcaacaucugccucacgcgcaccgaccgggggugguacugcgacaacgccggcuccgugagcuucuucccccaggccgagaccugcaaggugugcuccaaccgcgucuucugcgacaccaugaacagccugacgcugcccuccgaggugaaccucugcaacaucgacaucuucaaccccaaguacgacugcaagaucaugaccagcaagaccgacgucuccagcuccgugaucaccagccugggcgccaucguguccugcuacgggaagacgaagugcaccgccagcaacaagaacaagggcaucaucaagaccuucuccaacgggugcgacuacgucagcaacaagggcguggacaccguguccgucggcaacacgcuguacuacgugaacaagcaggaggggcagagccucuacgugaagggcgagccgaucaucaacuucuacgacccccuggucuuccccagcgacgaguucgacgcguccaucagccaggugaacgagaagaucaaccagucccuggccuucauccgcaagagcgacgagcuccugcacaacgugaacgucgggaaguccaccaccaacaucaugaucaccaccaucaucaucgugaucaucgugauccugcuccugcugaucgccgucggccucuuccuguacugcaaggcccggugaggacuagucccuguucccagagcccacuuuuuuuucuuuuuuugaaauaaaauagccugucuuucagaucuaaaaaaaaaaaaaaaaaaaaaaaaaaaaaaaaaaaaaaaaaaaaaaaaaaaaaaaaaaaaaaaaugcaucccccccccccccccccccccccccccccccaaaggcucuuuucagagccaccagaauu

SEQ ID NO: 18018 - RNA, 1840 nt, Artificial Sequence
  mRNA product Design a-2 comprising derived and/or modified sequence from HRSV(Memphis-37)__AIY60640.1__F-del_DSCav1_mut6 (opt2)
gggagaguccgcucagccagguugcagaagcggcuuagcguguguccuaaucuucucucugcguguagguaggccugugccgcaaacaagcuuaccauggagcuccccauccucaagaccaacgccaucaccaccauccucgccgccgucacccucugcuucgccuccucccagaacaucaccgaggaguucuaccaguccaccugcuccgccgucuccaagggcuaccucggcgcccuccgcaccggcugguacaccuccgucaucaccaucgagcucuccaacaucaaggagaacaagugcaacggcaccgacgccaaggucaagcucaucaagcaggagcucgacaaguacaagaacgccgucaccgaccuccagaugcucaugugcuccacccccgccgccggcuccggcuccgccaucgccuccggcaucgccgucugcaagguccuccaccucgagggcgaggucaacaagaucaagaacgcccuccucuccaccaacaaggccgucgucucccucuccaacggcgucuccguccucaccuucaagguccucgaccucaagaacuacaucgacaagcagcuccuccccauccucaacaagcaguccugcuccauccccaaccccgagaccgucauggaguuccagcagaagaacaaccgccuccucgagaucacccgcgaguucuccgucaacgccggcgucaccacccccgucuccaccuacaugcucaccaacuccgagcuccucucccucaucaacgacaugcccaucaccaacgaccagaagaagcucauguccaacaacguccagaucguccgccagcaguccuacuccaucaugugcaucaucaaggaggagguccucgccuacgucguccagcucccccucuacggcgucaucgacacccccugcuggaagcuccacaccuccccccucugcaccaccaacaccaaggagggcuccaacaucugccucacccgcaccgaccgcggcugguacugcgacaacgccggcuccgucuccuucuucccccaggccgagaccugcaaggucugcuccaaccgcgucuucugcgacaccaugaacucccucacccuccccuccgaggucaaccucugcaacaucgacaucuucaaccccaaguacgacugcaagaucaugaccuccaagaccgacgucuccuccuccgucaucaccucccucggcgccaucgucuccugcuacggcaagaccaagugcaccgccuccaacaagaacaagggcaucaucaagaccuucuccaacggcugcgacuacgucuccaacaagggcgucgacaccgucuccgucggcaacacccucuacuacgucaacaagcaggagggccagucccucuacgucaagggcgagcccaucaucaacuucuacgacccccucgucuuccccuccgacgaguucgacgccuccaucucccaggucaacgagaagaucaaccagucccucgccuucauccgcaaguccgacgagcuccuccacaacgucaacgucggcaaguccaccaccaacaucaugaucaccaccaucaucaucgucaucaucgucauccuccuccuccucaucgccgucggccucuuccucuacugcaaggcccgcugaggacuagucccuguucccagagcccacuuuuuuuucuuuuuuugaaauaaaauagccugucuuucagaucuaaaaaaaaaaaaaaaaaaaaaaaaaaaaaaaaaaaaaaaaaaaaaaaaaaaaaaaaaaaaaaaaugcaucccccccccccccccccccccccccccccccaaaggcucuuuucagagccaccagaauu

SEQ ID NO: 18019 - RNA, 1840 nt, Artificial Sequence
  mRNA product Design a-2 comprising derived and/or modified sequence from HRSV(Memphis-37)__AIY60640.1__F-del_DSCav1_mut6 (opt3)
gggagaguccgcucagccagguugcagaagcggcuuagcguguguccuaaucuucucucugcguguagguaggccugugccgcaaacaagcuuaccauggagcugcccauccucaagaccaacgccauuacaacuauacuugcugcagugacgcugugcuucgccagcucccagaauaucaccgaagaguuuuaccaaucuacauguucagcggucaguaaaggcuauuugggggcuuuaagaacuggaugguacaccagcguuauuacaaucgaacuguccaacauuaaggagaauaaaugcaacgguaccgacgccaaggugaaacuaaucaagcaggaacucgauaaguauaaaaaugcaguaacugaccugcagaugcuuauguguucuacuccugccgcuggcucggggucagcaauagccagcggaaucgcugugugcaagguccugcacuuggagggcgaggugaacaaaauuaagaaugcccuccugaguaccaacaaagcgguugugucccugucuaauggugucagcgugcucacguucaagguauuagaucugaagaacuacaucgacaaacagcuuuugccaauucugaauaagcaauccuguucaaucccgaaccccgaaacuguuauggaguuucagcagaaaaauaacaggcuacucgaaauaacccgggaguucagugugaaugcaggggucacaacuccugugagcaccuauaugcugacaaacucugagcuucuguccuugauuaacgauaugccaaucaccaaugaccagaagaaacucaugucaaacaaugugcaaauuguccgccagcagagcuacaguaucaugugcaucauuaaggaagagguucuggccuaugugguacaguuaccccuguacggagugauagauacgccuuguuggaaacuccauacuucuccacuuugcacaaccaacacuaaggaaggcuccaauaucugucugacacgaaccgaccguggcugguacugcgauaacgcugggagcgucucguuuuucccccaagccgagacguguaaggugugcucuaauagaguuuucugcgacaccaugaacuccuugacacuaccuucagaagugaaucuguguaacauugauaucuucaauccaaaauaugacugcaagauaaugacaaguaaaaccgaugucagcuccucugugauuacaagccucggagcaaucguaucauguuacgguaagacuaaaugcaccgcuaguaacaagaauaagggcaucauuaaaacauuuuccaacgggugugacuauguuagcaauaagggaguggacaccgucucugugggcaacacucuguacuaugucaacaaacaggagggucagucacuuuacgugaagggggagccgaucauuaauuucuaugauccccugguuuuuccuagugacgaauuugaugccagcauaucccaagugaacgagaaaaucaaucagucuuuggcguuuauuaggaagucggacgaacuccugcacaacguaaaugucggaaagagcacgacaaacaucaugaucaccacuauuauaaucgugauuaucguuauuuuacugcuacucaucgccgugggccuguuccuuuacugcaaagcacggugaggacuagucccuguucccagagcccacuuuuuuuucuuuuuuugaaauaaaauagccugucuuucagaucuaaaaaaaaaaaaaaaaaaaaaaaaaaaaaaaaaaaaaaaaaaaaaaaaaaaaaaaaaaaaaaaaugcaucccccccccccccccccccccccccccccccaaaggcucuuuucagagccaccagaauu

SEQ ID NO: 18020 - RNA, 1840 nt, Artificial Sequence
  mRNA product Design a-2 comprising derived and/or modified sequence from HRSV(Memphis-37)__AIY60640.1__F-del_DSCav1_mut6 (opt4)
gggagaguccgcucagccagguugcagaagcggcuuagcguguguccuaaucuucucucugcguguagguaggccugugccgcaaacaagcuuaccauggagcugcccauccugaagaccaacgccaucaccaccauccuggccgccgugacccugugcuucgccagcagccagaacaucaccgaggaguucuaccagagcaccugcagcgccgugagcaagggcuaccugggcgcccugagaaccggcugguacaccagcgugaucaccaucgagcugagcaacaucaaggagaacaagugcaacggcaccgacgccaaggugaagcugaucaagcaggagcuggacaaguacaagaacgccgugaccgaccugcagaugcugaugugcagcacccccgccgccggcagcggcagcgccaucgccagcggcaucgccgugugcaaggugcugcaccuggagggcgaggugaacaagaucaagaacgcccugcugagcaccaacaaggccguggugagccugagcaacggcgugagcgugcugaccuucaaggugcuggaccugaagaacuacaucgacaagcagcugcugcccauccugaacaagcagagcugcagcauccccaaccccgagaccgugauggaguuccagcagaagaacaacagacugcuggagaucaccagagaguucagcgugaacgccggcgugaccacccccgugagcaccuacaugcugaccaacagcgagcugcugagccugaucaacgacaugcccaucaccaacgaccagaagaagcugaugagcaacaacgugcagaucgugagacagcagagcuacagcaucaugugcaucaucaaggaggaggugcuggccuacguggugcagcugccccuguacggcgugaucgacacccccugcuggaagcugcacaccagcccccugugcaccaccaacaccaaggagggcagcaacaucugccugaccagaaccgacagaggcugguacugcgacaacgccggcagcgugagcuucuucccccaggccgagaccugcaaggugugcagcaacagaguguucugcgacaccaugaacagccugacccugcccagcgaggugaaccugugcaacaucgacaucuucaaccccaaguacgacugcaagaucaugaccagcaagaccgacgugagcagcagcgugaucaccagccugggcgccaucgugagcugcuacggcaagaccaagugcaccgccagcaacaagaacaagggcaucaucaagaccuucagcaacggcugcgacuacgugagcaacaagggcguggacaccgugagcgugggcaacacccuguacuacgugaacaagcaggagggccagagccuguacgugaagggcgagcccaucaucaacuucuacgacccccugguguuccccagcgacgaguucgacgccagcaucagccaggugaacgagaagaucaaccagagccuggccuucaucagaaagagcgacgagcugcugcacaacgugaacgugggcaagagcaccaccaacaucaugaucaccaccaucaucaucgugaucaucgugauccugcugcugcugaucgccgugggccuguuccuguacugcaaggccagaugaggacuagucccuguucccagagcccacuuuuuuuucuuuuuuugaaauaaaauagccugucuuucagaucuaaaaaaaaaaaaaaaaaaaaaaaaaaaaaaaaaaaaaaaaaaaaaaaaaaaaaaaaaaaaaaaaugcaucccccccccccccccccccccccccccccccaaaggcucuuuucagagccaccagaauu

SEQ ID NO: 18021 - RNA, 1840 nt, Artificial Sequence
  mRNA product Design a-2 comprising derived and/or modified sequence from HRSV(Memphis-37)__AIY60640.1__F-del_DSCav1_mut6 (opt5)
gggagaguccgcucagccagguugcagaagcggcuuagcguguguccuaaucuucucucugcguguagguaggccugugccgcaaacaagcuuaccauggagcugcccauccucaagaccaacgccauuacaacgauccuggcugccgugacccuuugcuucgcgagcucccagaauauuacagaagaguuuuaccaaucuaccuguagcgcugucuccaaaggcuaucugggggcccucagaacaggaugguacaccucuguuaucacaauugaacugagcaacaucaaggagaauaaaugcaacggcaccgacgccaaggugaaacuuaucaagcaggaacuggauaaguauaaaaaugcugugacggaccuccagaugcugauguguuccaccccugccgcugggucuggaagcgccauugcguccggcaucgccgucugcaaggugcugcaccucgagggggagguuaacaaaauuaagaaugcucugcuuagcacaaacaaagccguggucucucuguccaauggagugagcguucucaccuucaaggugcuggaucuuaagaacuacaucgacaaacagcugcucccgauucugaauaagcaaucuuguuccauccccaacccugaaacagucauggaguuucagcagaaaaauaaccggcugcucgaaauuacccgcgaguucagcgugaaugcuggcgugacgacacccgucucuaccuauaugcugacaaacuccgagcuucugagccucaucaacgauaugccuaucaccaaugaccagaagaaacugauguccaacaauguucaaauugugagacagcagucuuacagcaucaugugcauuaucaaggaagaggugcuugccuaugucgugcagcugccccucuacggcguuauugauaccccuuguuggaaacugcauacauccccgcugugcacgaccaacacaaaggaagggagcaauaucugucucacccggacagaccgcggaugguacugcgauaacgcgggcucuguguccuuuuucccccaagccgagaccuguaaggucugcagcaauagaguguuuugcgacacgaugaacucucugacacuuccuagcgaaguuaaucuguguaacaucgauauuuucaaucccaaauaugacugcaagaucaugaccuccaaaaccgaugugucuagcuccgucauuacaagccucggggcuaucgugucuuguuacggaaagaccaaaugcacagccuccaacaagaauaagggcauuaucaaaacguuuagcaacgggugugacuaugucucuaauaagggaguggacaccguuuccgugggcaacacacuguacuaugucaacaaacaggagggccagagccuuuacgugaagggggagccuaucauuaauuucuaugauccccugguuuuuccguccgacgaauuugaugcuucuaucagccaagugaacgagaaaauuaaucagucccucgccuucauccggaagucugacgaacugcugcacaacgucaaugugggaaagagcaccacaaacauuaugaucaccacgauuaucaucgugauuaucguuauucuccugcuucugaucgccgucggccucuuccuguacugcaaagcucgcugaggacuagucccuguucccagagcccacuuuuuuuucuuuuuuugaaauaaaauagccugucuuucagaucuaaaaaaaaaaaaaaaaaaaaaaaaaaaaaaaaaaaaaaaaaaaaaaaaaaaaaaaaaaaaaaaaugcaucccccccccccccccccccccccccccccccaaaggcucuuuucagagccaccagaauu

SEQ ID NO: 18022 - RNA, 1840 nt, Artificial Sequence
  mRNA product Design a-2 comprising derived and/or modified sequence from HRSV(Memphis-37)__AIY60640.1__F-del_DSCav1_mut6 (opt6)
gggagaguccgcucagccagguugcagaagcggcuuagcguguguccuaaucuucucucugcguguagguaggccugugccgcaaacaagcuuaccauggaacuaccuauacuaaaaaccaacgccauaacaacaauacuagccgcaguuacacucugcuuugcauccucacaaaacaucacagaggaauuuuaccaaucuacuugcuccgcaguaucaaaaggauaccuaggagcacuccguacaggaugguacacaucagucauaacaauugaauuaucuaacaucaaagaaaacaaauguaaugguacagacgccaaaguaaaauuaauaaaacaagaacuagacaaauacaaaaacgccguaacagaccuacaaaugcuaaugugcucaacccccgccgcaggaucuggaucagcaauugccucaggcauagcaguaugcaaaguccuacaccuagaaggagaagucaacaaaauaaaaaacgcucuccucucaaccaauaaagcaguaguaucccucucaaacggaguaucaguacuaacauucaaaguacuagaccucaaaaauuauauagacaagcaacuacucccaauauuaaauaaacaauccugcucaauacccaauccagaaacagucauggaauuucaacaaaaaaacaaccgacucuuagaaauaacaagagaauuuucagucaaugccggcgucacaaccccaguaucaacauacaugcuaacaaacucagaacuacuaucacuaaucaacgauaugcccauaaccaacgaccaaaaaaaacuaaugucaaacaauguacaaauuguaagacaacagucuuauucaauaaugugcauaauaaaagaagaagucuuagcauauguaguacaacuaccacuauacggaguaauagacacaccauguuggaaauuacacacauccccacuauguaccaccaacacaaaagaaggaucuaacauaugccuaaccagaacagaccgaggcugguauugcgacaaugcaggaucaguauccuucuuuccacaagcagaaacaugcaaagucugcucuaacagaguauucugcgauacuaugaacucacuuaccuuaccaucagaaguaaaucuauguaauaucgacauauucaaucccaaauaugauugcaaaauaaugaccucaaaaacagauguaucaucaucagucauaacaucacuaggagcaauagucagcugcuaugggaaaacaaaaugcacagcuuccaacaaaaacaaaggaaucauaaaaacauucucaaaugguugugacuacguauccaacaaaggaguagauacaguaucuguaggcaacacauuauacuauguaaauaaacaagaaggacaaagccuauacgucaaaggagaacccaucauaaauuucuaugacccauuaguuuucccaucugacgaauuugacgcuuccaucucccaaguaaaugaaaaaaucaaccaaagccucgcauucauucgcaaaucugacgaauuacuccacaacguaaacguaggaaaauccacaacaaacauuaugaucaccaccauaauaaucguaauaauagucauauuacuacuccucauagcaguaggacuauuccuauacuguaaagcuagauaaggacuagucccuguucccagagcccacuuuuuuuucuuuuuuugaaauaaaauagccugucuuucagaucuaaaaaaaaaaaaaaaaaaaaaaaaaaaaaaaaaaaaaaaaaaaaaaaaaaaaaaaaaaaaaaaaugcaucccccccccccccccccccccccccccccccaaaggcucuuuucagagccaccagaauu

SEQ ID NO: 18023 - RNA, 1840 nt, Artificial Sequence
  mRNA product Design a-2 comprising derived and/or modified sequence from HRSV(Memphis-37)__AIY60640.1__F-del_DSCav1_mut6 (opt11)
gggagaguccgcucagccagguugcagaagcggcuuagcguguguccuaaucuucucucugcguguagguaggccugugccgcaaacaagcuuaccauggaauuaccaauccucaaaacuaacgccaucaccaccauccucgcugccgucacccucugcuucgccuccagccaaaacaucacagaagaguucuaccaaagcacaugcuccgcugucuccaaaggcuaccuuggcgcccuccgcaccggcugguacaccucaguaauuaccauugaacuaagcaacaucaaagaaaauaaaugcaacggcaccgacgccaaaguuaaacucauaaaacaggaacucgacaaauacaaaaacgccguaacagaccuccaaaugcucaugugcuccacccccgccgccggcucaggcuccgccaucgcaagcggaauagcaguuugcaaaguccuccaccuagaaggcgaggucaacaagauuaaaaacgcacuucucucaaccaacaaggccgucguaucacucucaaacggcgucuccguccucaccuucaaaguucuggaccucaaaaacuacaucgauaaacaacuacucccaauacuuaacaaacaaucaugcuccaucccaaaccccgaaaccgucauggaguuccaacagaaaaacaaccgccuacuggaaaucacacgcgaguucagcguaaacgcuggcgucacuacacccgucuccaccuacaugcucaccaauucugaacuccuaucacucauaaacgacaugcccauuaccaacgaccaaaagaaacuaaugucaaacaacguccaaaucguaagacaacaaucguauuccaucaugugcauaauuaaagaagaaguucucgccuacgugguccaacuaccccucuacggagucauagacacuccuuguuggaaacuccacaccucuccccucugcacuaccaacacaaaagaaggcuccaacaucugccucacccgaaccgacagaggcugguacugcgacaacgccggcuccgucuccuucuucccccaagccgaaaccugcaaagucugcuccaaccgcguuuucugcgacaccaugaacucccucacacuccccuccgaagucaaccuauguaacauagacauauucaacccaaaauacgacugcaaaaucaugacauccaaaaccgacgugucuuccucggucaucaccucccucggcgccaucgucucaugcuacggcaaaacuaaaugcaccgcauccaacaaaaacaaaggcauaaucaaaacauucuccaacggcugcgacuacguuucuaacaaaggcgucgauaccgucuccgucggaaacacccucuacuacguaaacaagcaagaaggccagucccuauacguaaaaggagaaccaauuaucaacuucuacgacccccuagucuuccccuccgacgaguucgacgccuccauaucccaagucaacgagaaaaucaaccaaucccuagccuucauccgcaaaucagacgaacuccuccacaacgucaacgucggaaaauccacaacuaacaucaugaucaccaccaucauuaucgucaucauaguuauacuccuccuccucauagccgucggccucuuccuauacugcaaagcucgcuaaggacuagucccuguucccagagcccacuuuuuuuucuuuuuuugaaauaaaauagccugucuuucagaucuaaaaaaaaaaaaaaaaaaaaaaaaaaaaaaaaaaaaaaaaaaaaaaaaaaaaaaaaaaaaaaaaugcaucccccccccccccccccccccccccccccccaaaggcucuuuucagagccaccagaauu

SEQ ID NO: 18024 - RNA, 1918 nt, Artificial Sequence
  mRNA product Design a-3 comprising derived and/or modified sequence from HRSV(Memphis-37)__AIY60640.1__F-del_DSCav1_mut6 (opt1)
gggagagggcgcuuggcuugcaaggacccugagcugcggcauugaagcacacccaacccaacucgacugaagucagccucacugaaccggaucugagaaucuucucucucugggcuugccagggcucuccgaaccuagcuagcauccucuucaauuccaacuagaaagcuuaccauggagcugcccauccucaagaccaacgccaucaccacgauccuggccgcggugacccugugcuucgccagcucccagaacaucaccgaggaguucuaccagagcacgugcuccgccgucagcaagggcuaccucggcgcccugcgcaccgggugguacaccagcgugaucaccaucgagcuguccaacaucaaggagaacaagugcaacggcaccgacgccaaggugaagcucaucaagcaggagcuggacaaguacaagaacgcggucacggaccugcagaugcugaugugcagcaccccggccgccggcuccgggagcgcgaucgccuccggcaucgccgucugcaaggugcugcaccucgagggcgaggugaacaagaucaagaacgcccugcuguccaccaacaaggccgucgugagccucuccaacggggugagcguccugaccuucaaggugcuggaccucaagaacuacaucgacaagcagcugcugcccauccugaacaagcagagcugcuccauccccaaccccgagaccgucauggaguuccagcagaagaacaaccgccuccuggagaucacgcgggaguucagcgugaacgcgggcgugaccacccccgucuccaccuacaugcugacgaacagcgagcuccugucccugaucaacgacaugccgaucaccaacgaccagaagaagcucaugagcaacaacgugcagaucgugcgccagcaguccuacagcaucaugugcaucaucaaggaggagguccuggccuacguggugcagcugccccucuacggggucaucgacacccccugcuggaagcugcacaccagcccccugugcacgaccaacaccaaggagggcuccaacaucugccucacccggacggaccgcgggugguacugcgacaacgccggcagcguguccuucuucccgcaggccgagaccugcaaggucugcagcaaccggguguucugcgacaccaugaacucccugacccugcccagcgaggugaaccucugcaacaucgacaucuucaaccccaaguacgacugcaagaucaugacguccaagaccgacgucagcuccagcgugaucaccucccugggcgccaucgugagcugcuacgggaagaccaagugcacggcgagcaacaagaacaagggcaucaucaagaccuucuccaacgggugcgacuacgucagcaacaagggcguggacaccguguccgucggcaacacccuguacuacgugaacaagcaggagggccagagccucuacgugaagggggagcccaucaucaacuucuacgacccgcuggucuuccccuccgacgaguucgacgccagcaucucccaggugaacgagaagaucaaccagagccuggccuucauccggaaguccgacgagcuccugcacaacgugaacgucggcaagagcaccacgaacaucaugaucaccaccaucaucaucgugaucaucgugauccugcugcuccugaucgccgucgggcuguuccucuacugcaaggcccgcugaggacuagucccuguucccagagcccacuuuuuuuucuuuuuuugaaauaaaauagccugucuuucagaucuaaaaaaaaaaaaaaaaaaaaaaaaaaaaaaaaaaaaaaaaaaaaaaaaaaaaaaaaaaaaaaaaugcaucccccccccccccccccccccccccccccccaaaggcucuuuucagagccaccagaauu

SEQ ID NO: 18025 - RNA, 1918 nt, Artificial Sequence
  mRNA product Design a-3 comprising derived and/or modified sequence from HRSV(Memphis-37)__AIY60640.1__F-del_DSCav1_mut6 (opt1)
gggagagggcgcuuggcuugcaaggacccugagcugcggcauugaagcacacccaacccaacucgacugaagucagccucacugaaccggaucugagaaucuucucucucugggcuugccagggcucuccgaaccuagcuagcauccucuucaauuccaacuagaaagcuuaccauggagcugcccauccucaagaccaacgccaucaccacgauccuggccgcggugacccugugcuucgccagcucccagaacaucaccgaggaguucuaccagagcacgugcuccgccgucagcaagggcuaccucggggcccugcgcaccggcugguacaccuccgugaucaccaucgagcugagcaacaucaaggagaacaagugcaacgggaccgacgccaaggugaagcucaucaagcaggagcuggacaaguacaagaacgcggucacggaccugcagaugcucaugugcuccaccccggccgccggcagcggguccgccaucgcgagcggcaucgccgugugcaaggugcugcaccuggagggcgaggucaacaagaucaagaacgcccuccuguccaccaacaaggccguggugagccuguccaacggggucagcgugcucaccuucaaggugcuggaccugaagaacuacaucgacaagcagcuccugcccauccugaacaagcaguccugcagcauccccaaccccgagacggucauggaguuccagcagaagaacaaccggcuccuggagaucacccgcgaguucuccgugaacgccggcgugaccaccccggucagcacguacaugcugaccaacuccgagcuccugagccugaucaacgacaugcccaucaccaacgaccagaagaagcucaugagcaacaacgugcagaucgugcggcagcaguccuacagcaucaugugcaucaucaaggaggagguccuggcguacguggugcagcugccccucuacggggucaucgacacccccugcuggaagcugcacacguccccgcugugcaccaccaacaccaaggagggcagcaacaucugccucacgcgcaccgaccgggggugguacugcgacaacgccggcuccgugagcuucuucccccaggccgagaccugcaaggugugcuccaaccgcgucuucugcgacaccaugaacagccugacgcugcccuccgaggugaaccucugcaacaucgacaucuucaaccccaaguacgacugcaagaucaugaccagcaagaccgacgucuccagcuccgugaucaccagccugggcgccaucguguccugcuacgggaagacgaagugcaccgccagcaacaagaacaagggcaucaucaagaccuucuccaacgggugcgacuacgucagcaacaagggcguggacaccguguccgucggcaacacgcuguacuacgugaacaagcaggaggggcagagccucuacgugaagggcgagccgaucaucaacuucuacgacccccuggucuuccccagcgacgaguucgacgcguccaucagccaggugaacgagaagaucaaccagucccuggccuucauccgcaagagcgacgagcuccugcacaacgugaacgucgggaaguccaccaccaacaucaugaucaccaccaucaucaucgugaucaucgugauccugcuccugcugaucgccgucggccucuuccuguacugcaaggcccggugaggacuagucccuguucccagagcccacuuuuuuuucuuuuuuugaaauaaaauagccugucuuucagaucuaaaaaaaaaaaaaaaaaaaaaaaaaaaaaaaaaaaaaaaaaaaaaaaaaaaaaaaaaaaaaaaaugcaucccccccccccccccccccccccccccccccaaaggcucuuuucagagccaccagaauu

SEQ ID NO: 18026 - RNA, 1918 nt, Artificial Sequence
  mRNA product Design a-3 comprising derived and/or modified sequence from HRSV(Memphis-37)__AIY60640.1__F-del_DSCav1_mut6 (opt2)
gggagagggcgcuuggcuugcaaggacccugagcugcggcauugaagcacacccaacccaacucgacugaagucagccucacugaaccggaucugagaaucuucucucucugggcuugccagggcucuccgaaccuagcuagcauccucuucaauuccaacuagaaagcuuaccauggagcuccccauccucaagaccaacgccaucaccaccauccucgccgccgucacccucugcuucgccuccucccagaacaucaccgaggaguucuaccaguccaccugcuccgccgucuccaagggcuaccucggcgcccuccgcaccggcugguacaccuccgucaucaccaucgagcucuccaacaucaaggagaacaagugcaacggcaccgacgccaaggucaagcucaucaagcaggagcucgacaaguacaagaacgccgucaccgaccuccagaugcucaugugcuccacccccgccgccggcuccggcuccgccaucgccuccggcaucgccgucugcaagguccuccaccucgagggcgaggucaacaagaucaagaacgcccuccucuccaccaacaaggccgucgucucccucuccaacggcgucuccguccucaccuucaagguccucgaccucaagaacuacaucgacaagcagcuccuccccauccucaacaagcaguccugcuccauccccaaccccgagaccgucauggaguuccagcagaagaacaaccgccuccucgagaucacccgcgaguucuccgucaacgccggcgucaccacccccgucuccaccuacaugcucaccaacuccgagcuccucucccucaucaacgacaugcccaucaccaacgaccagaagaagcucauguccaacaacguccagaucguccgccagcaguccuacuccaucaugugcaucaucaaggaggagguccucgccuacgucguccagcucccccucuacggcgucaucgacacccccugcuggaagcuccacaccuccccccucugcaccaccaacaccaaggagggcuccaacaucugccucacccgcaccgaccgcggcugguacugcgacaacgccggcuccgucuccuucuucccccaggccgagaccugcaaggucugcuccaaccgcgucuucugcgacaccaugaacucccucacccuccccuccgaggucaaccucugcaacaucgacaucuucaaccccaaguacgacugcaagaucaugaccuccaagaccgacgucuccuccuccgucaucaccucccucggcgccaucgucuccugcuacggcaagaccaagugcaccgccuccaacaagaacaagggcaucaucaagaccuucuccaacggcugcgacuacgucuccaacaagggcgucgacaccgucuccgucggcaacacccucuacuacgucaacaagcaggagggccagucccucuacgucaagggcgagcccaucaucaacuucuacgacccccucgucuuccccuccgacgaguucgacgccuccaucucccaggucaacgagaagaucaaccagucccucgccuucauccgcaaguccgacgagcuccuccacaacgucaacgucggcaaguccaccaccaacaucaugaucaccaccaucaucaucgucaucaucgucauccuccuccuccucaucgccgucggccucuuccucuacugcaaggcccgcugaggacuagucccuguucccagagcccacuuuuuuuucuuuuuuugaaauaaaauagccugucuuucagaucuaaaaaaaaaaaaaaaaaaaaaaaaaaaaaaaaaaaaaaaaaaaaaaaaaaaaaaaaaaaaaaaaugcaucccccccccccccccccccccccccccccccaaaggcucuuuucagagccaccagaauu

SEQ ID NO: 18027 - RNA, 1918 nt, Artificial Sequence
  mRNA product Design a-3 comprising derived and/or modified sequence from HRSV(Memphis-37)__AIY60640.1__F-del_DSCav1_mut6 (opt3)
gggagagggcgcuuggcuugcaaggacccugagcugcggcauugaagcacacccaacccaacucgacugaagucagccucacugaaccggaucugagaaucuucucucucugggcuugccagggcucuccgaaccuagcuagcauccucuucaauuccaacuagaaagcuuaccauggagcugcccauccucaagaccaacgccauuacaacuauacuugcugcagugacgcugugcuucgccagcucccagaauaucaccgaagaguuuuaccaaucuacauguucagcggucaguaaaggcuauuugggggcuuuaagaacuggaugguacaccagcguuauuacaaucgaacuguccaacauuaaggagaauaaaugcaacgguaccgacgccaaggugaaacuaaucaagcaggaacucgauaaguauaaaaaugcaguaacugaccugcagaugcuuauguguucuacuccugccgcuggcucggggucagcaauagccagcggaaucgcugugugcaagguccugcacuuggagggcgaggugaacaaaauuaagaaugcccuccugaguaccaacaaagcgguugugucccugucuaauggugucagcgugcucacguucaagguauuagaucugaagaacuacaucgacaaacagcuuuugccaauucugaauaagcaauccuguucaaucccgaaccccgaaacuguuauggaguuucagcagaaaaauaacaggcuacucgaaauaacccgggaguucagugugaaugcaggggucacaacuccugugagcaccuauaugcugacaaacucugagcuucuguccuugauuaacgauaugccaaucaccaaugaccagaagaaacucaugucaaacaaugugcaaauuguccgccagcagagcuacaguaucaugugcaucauuaaggaagagguucuggccuaugugguacaguuaccccuguacggagugauagauacgccuuguuggaaacuccauacuucuccacuuugcacaaccaacacuaaggaaggcuccaauaucugucugacacgaaccgaccguggcugguacugcgauaacgcugggagcgucucguuuuucccccaagccgagacguguaaggugugcucuaauagaguuuucugcgacaccaugaacuccuugacacuaccuucagaagugaaucuguguaacauugauaucuucaauccaaaauaugacugcaagauaaugacaaguaaaaccgaugucagcuccucugugauuacaagccucggagcaaucguaucauguuacgguaagacuaaaugcaccgcuaguaacaagaauaagggcaucauuaaaacauuuuccaacgggugugacuauguuagcaauaagggaguggacaccgucucugugggcaacacucuguacuaugucaacaaacaggagggucagucacuuuacgugaagggggagccgaucauuaauuucuaugauccccugguuuuuccuagugacgaauuugaugccagcauaucccaagugaacgagaaaaucaaucagucuuuggcguuuauuaggaagucggacgaacuccugcacaacguaaaugucggaaagagcacgacaaacaucaugaucaccacuauuauaaucgugauuaucguuauuuuacugcuacucaucgccgugggccuguuccuuuacugcaaagcacggugaggacuagucccuguucccagagcccacuuuuuuuucuuuuuuugaaauaaaauagccugucuuucagaucuaaaaaaaaaaaaaaaaaaaaaaaaaaaaaaaaaaaaaaaaaaaaaaaaaaaaaaaaaaaaaaaaugcaucccccccccccccccccccccccccccccccaaaggcucuuuucagagccaccagaauu

SEQ ID NO: 18028 - RNA, 1918 nt, Artificial Sequence
  mRNA product Design a-3 comprising derived and/or modified sequence from HRSV(Memphis-37)__AIY60640.1__F-del_DSCav1_mut6 (opt4)
gggagagggcgcuuggcuugcaaggacccugagcugcggcauugaagcacacccaacccaacucgacugaagucagccucacugaaccggaucugagaaucuucucucucugggcuugccagggcucuccgaaccuagcuagcauccucuucaauuccaacuagaaagcuuaccauggagcugcccauccugaagaccaacgccaucaccaccauccuggccgccgugacccugugcuucgccagcagccagaacaucaccgaggaguucuaccagagcaccugcagcgccgugagcaagggcuaccugggcgcccugagaaccggcugguacaccagcgugaucaccaucgagcugagcaacaucaaggagaacaagugcaacggcaccgacgccaaggugaagcugaucaagcaggagcuggacaaguacaagaacgccgugaccgaccugcagaugcugaugugcagcacccccgccgccggcagcggcagcgccaucgccagcggcaucgccgugugcaaggugcugcaccuggagggcgaggugaacaagaucaagaacgcccugcugagcaccaacaaggccguggugagccugagcaacggcgugagcgugcugaccuucaaggugcuggaccugaagaacuacaucgacaagcagcugcugcccauccugaacaagcagagcugcagcauccccaaccccgagaccgugauggaguuccagcagaagaacaacagacugcuggagaucaccagagaguucagcgugaacgccggcgugaccacccccgugagcaccuacaugcugaccaacagcgagcugcugagccugaucaacgacaugcccaucaccaacgaccagaagaagcugaugagcaacaacgugcagaucgugagacagcagagcuacagcaucaugugcaucaucaaggaggaggugcuggccuacguggugcagcugccccuguacggcgugaucgacacccccugcuggaagcugcacaccagcccccugugcaccaccaacaccaaggagggcagcaacaucugccugaccagaaccgacagaggcugguacugcgacaacgccggcagcgugagcuucuucccccaggccgagaccugcaaggugugcagcaacagaguguucugcgacaccaugaacagccugacccugcccagcgaggugaaccugugcaacaucgacaucuucaaccccaaguacgacugcaagaucaugaccagcaagaccgacgugagcagcagcgugaucaccagccugggcgccaucgugagcugcuacggcaagaccaagugcaccgccagcaacaagaacaagggcaucaucaagaccuucagcaacggcugcgacuacgugagcaacaagggcguggacaccgugagcgugggcaacacccuguacuacgugaacaagcaggagggccagagccuguacgugaagggcgagcccaucaucaacuucuacgacccccugguguuccccagcgacgaguucgacgccagcaucagccaggugaacgagaagaucaaccagagccuggccuucaucagaaagagcgacgagcugcugcacaacgugaacgugggcaagagcaccaccaacaucaugaucaccaccaucaucaucgugaucaucgugauccugcugcugcugaucgccgugggccuguuccuguacugcaaggccagaugaggacuagucccuguucccagagcccacuuuuuuuucuuuuuuugaaauaaaauagccugucuuucagaucuaaaaaaaaaaaaaaaaaaaaaaaaaaaaaaaaaaaaaaaaaaaaaaaaaaaaaaaaaaaaaaaaugcaucccccccccccccccccccccccccccccccaaaggcucuuuucagagccaccagaauu

SEQ ID NO: 18029 - RNA, 1918 nt, Artificial Sequence
  mRNA product Design a-3 comprising derived and/or modified sequence from HRSV(Memphis-37)__AIY60640.1__F-del_DSCav1_mut6 (opt5)
gggagagggcgcuuggcuugcaaggacccugagcugcggcauugaagcacacccaacccaacucgacugaagucagccucacugaaccggaucugagaaucuucucucucugggcuugccagggcucuccgaaccuagcuagcauccucuucaauuccaacuagaaagcuuaccauggagcugcccauccucaagaccaacgccauuacaacgauccuggcugccgugacccuuugcuucgcgagcucccagaauauuacagaagaguuuuaccaaucuaccuguagcgcugucuccaaaggcuaucugggggcccucagaacaggaugguacaccucuguuaucacaauugaacugagcaacaucaaggagaauaaaugcaacggcaccgacgccaaggugaaacuuaucaagcaggaacuggauaaguauaaaaaugcugugacggaccuccagaugcugauguguuccaccccugccgcugggucuggaagcgccauugcguccggcaucgccgucugcaaggugcugcaccucgagggggagguuaacaaaauuaagaaugcucugcuuagcacaaacaaagccguggucucucuguccaauggagugagcguucucaccuucaaggugcuggaucuuaagaacuacaucgacaaacagcugcucccgauucugaauaagcaaucuuguuccauccccaacccugaaacagucauggaguuucagcagaaaaauaaccggcugcucgaaauuacccgcgaguucagcgugaaugcuggcgugacgacacccgucucuaccuauaugcugacaaacuccgagcuucugagccucaucaacgauaugccuaucaccaaugaccagaagaaacugauguccaacaauguucaaauugugagacagcagucuuacagcaucaugugcauuaucaaggaagaggugcuugccuaugucgugcagcugccccucuacggcguuauugauaccccuuguuggaaacugcauacauccccgcugugcacgaccaacacaaaggaagggagcaauaucugucucacccggacagaccgcggaugguacugcgauaacgcgggcucuguguccuuuuucccccaagccgagaccuguaaggucugcagcaauagaguguuuugcgacacgaugaacucucugacacuuccuagcgaaguuaaucuguguaacaucgauauuuucaaucccaaauaugacugcaagaucaugaccuccaaaaccgaugugucuagcuccgucauuacaagccucggggcuaucgugucuuguuacggaaagaccaaaugcacagccuccaacaagaauaagggcauuaucaaaacguuuagcaacgggugugacuaugucucuaauaagggaguggacaccguuuccgugggcaacacacuguacuaugucaacaaacaggagggccagagccuuuacgugaagggggagccuaucauuaauuucuaugauccccugguuuuuccguccgacgaauuugaugcuucuaucagccaagugaacgagaaaauuaaucagucccucgccuucauccggaagucugacgaacugcugcacaacgucaaugugggaaagagcaccacaaacauuaugaucaccacgauuaucaucgugauuaucguuauucuccugcuucugaucgccgucggccucuuccuguacugcaaagcucgcugaggacuagucccuguucccagagcccacuuuuuuuucuuuuuuugaaauaaaauagccugucuuucagaucuaaaaaaaaaaaaaaaaaaaaaaaaaaaaaaaaaaaaaaaaaaaaaaaaaaaaaaaaaaaaaaaaugcaucccccccccccccccccccccccccccccccaaaggcucuuuucagagccaccagaauu

SEQ ID NO: 18030 - RNA, 1918 nt, Artificial Sequence
  mRNA product Design a-3 comprising derived and/or modified sequence from HRSV(Memphis-37)__AIY60640.1__F-del_DSCav1_mut6 (opt6)
gggagagggcgcuuggcuugcaaggacccugagcugcggcauugaagcacacccaacccaacucgacugaagucagccucacugaaccggaucugagaaucuucucucucugggcuugccagggcucuccgaaccuagcuagcauccucuucaauuccaacuagaaagcuuaccauggaacuaccuauacuaaaaaccaacgccauaacaacaauacuagccgcaguuacacucugcuuugcauccucacaaaacaucacagaggaauuuuaccaaucuacuugcuccgcaguaucaaaaggauaccuaggagcacuccguacaggaugguacacaucagucauaacaauugaauuaucuaacaucaaagaaaacaaauguaaugguacagacgccaaaguaaaauuaauaaaacaagaacuagacaaauacaaaaacgccguaacagaccuacaaaugcuaaugugcucaacccccgccgcaggaucuggaucagcaauugccucaggcauagcaguaugcaaaguccuacaccuagaaggagaagucaacaaaauaaaaaacgcucuccucucaaccaauaaagcaguaguaucccucucaaacggaguaucaguacuaacauucaaaguacuagaccucaaaaauuauauagacaagcaacuacucccaauauuaaauaaacaauccugcucaauacccaauccagaaacagucauggaauuucaacaaaaaaacaaccgacucuuagaaauaacaagagaauuuucagucaaugccggcgucacaaccccaguaucaacauacaugcuaacaaacucagaacuacuaucacuaaucaacgauaugcccauaaccaacgaccaaaaaaaacuaaugucaaacaauguacaaauuguaagacaacagucuuauucaauaaugugcauaauaaaagaagaagucuuagcauauguaguacaacuaccacuauacggaguaauagacacaccauguuggaaauuacacacauccccacuauguaccaccaacacaaaagaaggaucuaacauaugccuaaccagaacagaccgaggcugguauugcgacaaugcaggaucaguauccuucuuuccacaagcagaaacaugcaaagucugcucuaacagaguauucugcgauacuaugaacucacuuaccuuaccaucagaaguaaaucuauguaauaucgacauauucaaucccaaauaugauugcaaaauaaugaccucaaaaacagauguaucaucaucagucauaacaucacuaggagcaauagucagcugcuaugggaaaacaaaaugcacagcuuccaacaaaaacaaaggaaucauaaaaacauucucaaaugguugugacuacguauccaacaaaggaguagauacaguaucuguaggcaacacauuauacuauguaaauaaacaagaaggacaaagccuauacgucaaaggagaacccaucauaaauuucuaugacccauuaguuuucccaucugacgaauuugacgcuuccaucucccaaguaaaugaaaaaaucaaccaaagccucgcauucauucgcaaaucugacgaauuacuccacaacguaaacguaggaaaauccacaacaaacauuaugaucaccaccauaauaaucguaauaauagucauauuacuacuccucauagcaguaggacuauuccuauacuguaaagcuagauaaggacuagucccuguucccagagcccacuuuuuuuucuuuuuuugaaauaaaauagccugucuuucagaucuaaaaaaaaaaaaaaaaaaaaaaaaaaaaaaaaaaaaaaaaaaaaaaaaaaaaaaaaaaaaaaaaugcaucccccccccccccccccccccccccccccccaaaggcucuuuucagagccaccagaauu

SEQ ID NO: 18031 - RNA, 1918 nt, Artificial Sequence
  mRNA product Design a-3 comprising derived and/or modified sequence from HRSV(Memphis-37)__AIY60640.1__F-del_DSCav1_mut6 (opt11)
gggagagggcgcuuggcuugcaaggacccugagcugcggcauugaagcacacccaacccaacucgacugaagucagccucacugaaccggaucugagaaucuucucucucugggcuugccagggcucuccgaaccuagcuagcauccucuucaauuccaacuagaaagcuuaccauggaauuaccaauccucaaaacuaacgccaucaccaccauccucgcugccgucacccucugcuucgccuccagccaaaacaucacagaagaguucuaccaaagcacaugcuccgcugucuccaaaggcuaccuuggcgcccuccgcaccggcugguacaccucaguaauuaccauugaacuaagcaacaucaaagaaaauaaaugcaacggcaccgacgccaaaguuaaacucauaaaacaggaacucgacaaauacaaaaacgccguaacagaccuccaaaugcucaugugcuccacccccgccgccggcucaggcuccgccaucgcaagcggaauagcaguuugcaaaguccuccaccuagaaggcgaggucaacaagauuaaaaacgcacuucucucaaccaacaaggccgucguaucacucucaaacggcgucuccguccucaccuucaaaguucuggaccucaaaaacuacaucgauaaacaacuacucccaauacuuaacaaacaaucaugcuccaucccaaaccccgaaaccgucauggaguuccaacagaaaaacaaccgccuacuggaaaucacacgcgaguucagcguaaacgcuggcgucacuacacccgucuccaccuacaugcucaccaauucugaacuccuaucacucauaaacgacaugcccauuaccaacgaccaaaagaaacuaaugucaaacaacguccaaaucguaagacaacaaucguauuccaucaugugcauaauuaaagaagaaguucucgccuacgugguccaacuaccccucuacggagucauagacacuccuuguuggaaacuccacaccucuccccucugcacuaccaacacaaaagaaggcuccaacaucugccucacccgaaccgacagaggcugguacugcgacaacgccggcuccgucuccuucuucccccaagccgaaaccugcaaagucugcuccaaccgcguuuucugcgacaccaugaacucccucacacuccccuccgaagucaaccuauguaacauagacauauucaacccaaaauacgacugcaaaaucaugacauccaaaaccgacgugucuuccucggucaucaccucccucggcgccaucgucucaugcuacggcaaaacuaaaugcaccgcauccaacaaaaacaaaggcauaaucaaaacauucuccaacggcugcgacuacguuucuaacaaaggcgucgauaccgucuccgucggaaacacccucuacuacguaaacaagcaagaaggccagucccuauacguaaaaggagaaccaauuaucaacuucuacgacccccuagucuuccccuccgacgaguucgacgccuccauaucccaagucaacgagaaaaucaaccaaucccuagccuucauccgcaaaucagacgaacuccuccacaacgucaacgucggaaaauccacaacuaacaucaugaucaccaccaucauuaucgucaucauaguuauacuccuccuccucauagccgucggccucuuccuauacugcaaagcucgcuaaggacuagucccuguucccagagcccacuuuuuuuucuuuuuuugaaauaaaauagccugucuuucagaucuaaaaaaaaaaaaaaaaaaaaaaaaaaaaaaaaaaaaaaaaaaaaaaaaaaaaaaaaaaaaaaaaugcaucccccccccccccccccccccccccccccccaaaggcucuuuucagagccaccagaauu

SEQ ID NO: 18032 - RNA, 1867 nt, Artificial Sequence
  mRNA product Design a-4 comprising derived and/or modified sequence from HRSV(Memphis-37)__AIY60640.1__F-del_DSCav1_mut6 (opt1)
gggagacuccugucgggcggaaguaggaggaguagaguuuaaaaacaguacucuuuuuccgguucgggacguaguugaagcaacgacaagccggauaaccgcucuugagacaggaagcuuaccauggagcugcccauccucaagaccaacgccaucaccacgauccuggccgcggugacccugugcuucgccagcucccagaacaucaccgaggaguucuaccagagcacgugcuccgccgucagcaagggcuaccucggcgcccugcgcaccgggugguacaccagcgugaucaccaucgagcuguccaacaucaaggagaacaagugcaacggcaccgacgccaaggugaagcucaucaagcaggagcuggacaaguacaagaacgcggucacggaccugcagaugcugaugugcagcaccccggccgccggcuccgggagcgcgaucgccuccggcaucgccgucugcaaggugcugcaccucgagggcgaggugaacaagaucaagaacgcccugcuguccaccaacaaggccgucgugagccucuccaacggggugagcguccugaccuucaaggugcuggaccucaagaacuacaucgacaagcagcugcugcccauccugaacaagcagagcugcuccauccccaaccccgagaccgucauggaguuccagcagaagaacaaccgccuccuggagaucacgcgggaguucagcgugaacgcgggcgugaccacccccgucuccaccuacaugcugacgaacagcgagcuccugucccugaucaacgacaugccgaucaccaacgaccagaagaagcucaugagcaacaacgugcagaucgugcgccagcaguccuacagcaucaugugcaucaucaaggaggagguccuggccuacguggugcagcugccccucuacggggucaucgacacccccugcuggaagcugcacaccagcccccugugcacgaccaacaccaaggagggcuccaacaucugccucacccggacggaccgcgggugguacugcgacaacgccggcagcguguccuucuucccgcaggccgagaccugcaaggucugcagcaaccggguguucugcgacaccaugaacucccugacccugcccagcgaggugaaccucugcaacaucgacaucuucaaccccaaguacgacugcaagaucaugacguccaagaccgacgucagcuccagcgugaucaccucccugggcgccaucgugagcugcuacgggaagaccaagugcacggcgagcaacaagaacaagggcaucaucaagaccuucuccaacgggugcgacuacgucagcaacaagggcguggacaccguguccgucggcaacacccuguacuacgugaacaagcaggagggccagagccucuacgugaagggggagcccaucaucaacuucuacgacccgcuggucuuccccuccgacgaguucgacgccagcaucucccaggugaacgagaagaucaaccagagccuggccuucauccggaaguccgacgagcuccugcacaacgugaacgucggcaagagcaccacgaacaucaugaucaccaccaucaucaucgugaucaucgugauccugcugcuccugaucgccgucgggcuguuccucuacugcaaggcccgcugaggacuagucccuguucccagagcccacuuuuuuuucuuuuuuugaaauaaaauagccugucuuucagaucuaaaaaaaaaaaaaaaaaaaaaaaaaaaaaaaaaaaaaaaaaaaaaaaaaaaaaaaaaaaaaaaaugcaucccccccccccccccccccccccccccccccaaaggcucuuuucagagccaccagaauu

SEQ ID NO: 18033 - RNA, 1867 nt, Artificial Sequence
  mRNA product Design a-4 comprising derived and/or modified sequence from HRSV(Memphis-37)__AIY60640.1__F-del_DSCav1_mut6 (opt1)
gggagacuccugucgggcggaaguaggaggaguagaguuuaaaaacaguacucuuuuuccgguucgggacguaguugaagcaacgacaagccggauaaccgcucuugagacaggaagcuuaccauggagcugcccauccucaagaccaacgccaucaccacgauccuggccgcggugacccugugcuucgccagcucccagaacaucaccgaggaguucuaccagagcacgugcuccgccgucagcaagggcuaccucggggcccugcgcaccggcugguacaccuccgugaucaccaucgagcugagcaacaucaaggagaacaagugcaacgggaccgacgccaaggugaagcucaucaagcaggagcuggacaaguacaagaacgcggucacggaccugcagaugcucaugugcuccaccccggccgccggcagcggguccgccaucgcgagcggcaucgccgugugcaaggugcugcaccuggagggcgaggucaacaagaucaagaacgcccuccuguccaccaacaaggccguggugagccuguccaacggggucagcgugcucaccuucaaggugcuggaccugaagaacuacaucgacaagcagcuccugcccauccugaacaagcaguccugcagcauccccaaccccgagacggucauggaguuccagcagaagaacaaccggcuccuggagaucacccgcgaguucuccgugaacgccggcgugaccaccccggucagcacguacaugcugaccaacuccgagcuccugagccugaucaacgacaugcccaucaccaacgaccagaagaagcucaugagcaacaacgugcagaucgugcggcagcaguccuacagcaucaugugcaucaucaaggaggagguccuggcguacguggugcagcugccccucuacggggucaucgacacccccugcuggaagcugcacacguccccgcugugcaccaccaacaccaaggagggcagcaacaucugccucacgcgcaccgaccgggggugguacugcgacaacgccggcuccgugagcuucuucccccaggccgagaccugcaaggugugcuccaaccgcgucuucugcgacaccaugaacagccugacgcugcccuccgaggugaaccucugcaacaucgacaucuucaaccccaaguacgacugcaagaucaugaccagcaagaccgacgucuccagcuccgugaucaccagccugggcgccaucguguccugcuacgggaagacgaagugcaccgccagcaacaagaacaagggcaucaucaagaccuucuccaacgggugcgacuacgucagcaacaagggcguggacaccguguccgucggcaacacgcuguacuacgugaacaagcaggaggggcagagccucuacgugaagggcgagccgaucaucaacuucuacgacccccuggucuuccccagcgacgaguucgacgcguccaucagccaggugaacgagaagaucaaccagucccuggccuucauccgcaagagcgacgagcuccugcacaacgugaacgucgggaaguccaccaccaacaucaugaucaccaccaucaucaucgugaucaucgugauccugcuccugcugaucgccgucggccucuuccuguacugcaaggcccggugaggacuagucccuguucccagagcccacuuuuuuuucuuuuuuugaaauaaaauagccugucuuucagaucuaaaaaaaaaaaaaaaaaaaaaaaaaaaaaaaaaaaaaaaaaaaaaaaaaaaaaaaaaaaaaaaaugcaucccccccccccccccccccccccccccccccaaaggcucuuuucagagccaccagaauu

SEQ ID NO: 18034 - RNA, 1867 nt, Artificial Sequence
  mRNA product Design a-4 comprising derived and/or modified sequence from HRSV(Memphis-37)__AIY60640.1__F-del_DSCav1_mut6 (opt2)
gggagacuccugucgggcggaaguaggaggaguagaguuuaaaaacaguacucuuuuuccgguucgggacguaguugaagcaacgacaagccggauaaccgcucuugagacaggaagcuuaccauggagcuccccauccucaagaccaacgccaucaccaccauccucgccgccgucacccucugcuucgccuccucccagaacaucaccgaggaguucuaccaguccaccugcuccgccgucuccaagggcuaccucggcgcccuccgcaccggcugguacaccuccgucaucaccaucgagcucuccaacaucaaggagaacaagugcaacggcaccgacgccaaggucaagcucaucaagcaggagcucgacaaguacaagaacgccgucaccgaccuccagaugcucaugugcuccacccccgccgccggcuccggcuccgccaucgccuccggcaucgccgucugcaagguccuccaccucgagggcgaggucaacaagaucaagaacgcccuccucuccaccaacaaggccgucgucucccucuccaacggcgucuccguccucaccuucaagguccucgaccucaagaacuacaucgacaagcagcuccuccccauccucaacaagcaguccugcuccauccccaaccccgagaccgucauggaguuccagcagaagaacaaccgccuccucgagaucacccgcgaguucuccgucaacgccggcgucaccacccccgucuccaccuacaugcucaccaacuccgagcuccucucccucaucaacgacaugcccaucaccaacgaccagaagaagcucauguccaacaacguccagaucguccgccagcaguccuacuccaucaugugcaucaucaaggaggagguccucgccuacgucguccagcucccccucuacggcgucaucgacacccccugcuggaagcuccacaccuccccccucugcaccaccaacaccaaggagggcuccaacaucugccucacccgcaccgaccgcggcugguacugcgacaacgccggcuccgucuccuucuucccccaggccgagaccugcaaggucugcuccaaccgcgucuucugcgacaccaugaacucccucacccuccccuccgaggucaaccucugcaacaucgacaucuucaaccccaaguacgacugcaagaucaugaccuccaagaccgacgucuccuccuccgucaucaccucccucggcgccaucgucuccugcuacggcaagaccaagugcaccgccuccaacaagaacaagggcaucaucaagaccuucuccaacggcugcgacuacgucuccaacaagggcgucgacaccgucuccgucggcaacacccucuacuacgucaacaagcaggagggccagucccucuacgucaagggcgagcccaucaucaacuucuacgacccccucgucuuccccuccgacgaguucgacgccuccaucucccaggucaacgagaagaucaaccagucccucgccuucauccgcaaguccgacgagcuccuccacaacgucaacgucggcaaguccaccaccaacaucaugaucaccaccaucaucaucgucaucaucgucauccuccuccuccucaucgccgucggccucuuccucuacugcaaggcccgcugaggacuagucccuguucccagagcccacuuuuuuuucuuuuuuugaaauaaaauagccugucuuucagaucuaaaaaaaaaaaaaaaaaaaaaaaaaaaaaaaaaaaaaaaaaaaaaaaaaaaaaaaaaaaaaaaaugcaucccccccccccccccccccccccccccccccaaaggcucuuuucagagccaccagaauu

SEQ ID NO: 18035 - RNA, 1867 nt, Artificial Sequence
  mRNA product Design a-4 comprising derived and/or modified sequence from HRSV(Memphis-37)__AIY60640.1__F-del_DSCav1_mut6 (opt3)
gggagacuccugucgggcggaaguaggaggaguagaguuuaaaaacaguacucuuuuuccgguucgggacguaguugaagcaacgacaagccggauaaccgcucuugagacaggaagcuuaccauggagcugcccauccucaagaccaacgccauuacaacuauacuugcugcagugacgcugugcuucgccagcucccagaauaucaccgaagaguuuuaccaaucuacauguucagcggucaguaaaggcuauuugggggcuuuaagaacuggaugguacaccagcguuauuacaaucgaacuguccaacauuaaggagaauaaaugcaacgguaccgacgccaaggugaaacuaaucaagcaggaacucgauaaguauaaaaaugcaguaacugaccugcagaugcuuauguguucuacuccugccgcuggcucggggucagcaauagccagcggaaucgcugugugcaagguccugcacuuggagggcgaggugaacaaaauuaagaaugcccuccugaguaccaacaaagcgguugugucccugucuaauggugucagcgugcucacguucaagguauuagaucugaagaacuacaucgacaaacagcuuuugccaauucugaauaagcaauccuguucaaucccgaaccccgaaacuguuauggaguuucagcagaaaaauaacaggcuacucgaaauaacccgggaguucagugugaaugcaggggucacaacuccugugagcaccuauaugcugacaaacucugagcuucuguccuugauuaacgauaugccaaucaccaaugaccagaagaaacucaugucaaacaaugugcaaauuguccgccagcagagcuacaguaucaugugcaucauuaaggaagagguucuggccuaugugguacaguuaccccuguacggagugauagauacgccuuguuggaaacuccauacuucuccacuuugcacaaccaacacuaaggaaggcuccaauaucugucugacacgaaccgaccguggcugguacugcgauaacgcugggagcgucucguuuuucccccaagccgagacguguaaggugugcucuaauagaguuuucugcgacaccaugaacuccuugacacuaccuucagaagugaaucuguguaacauugauaucuucaauccaaaauaugacugcaagauaaugacaaguaaaaccgaugucagcuccucugugauuacaagccucggagcaaucguaucauguuacgguaagacuaaaugcaccgcuaguaacaagaauaagggcaucauuaaaacauuuuccaacgggugugacuauguuagcaauaagggaguggacaccgucucugugggcaacacucuguacuaugucaacaaacaggagggucagucacuuuacgugaagggggagccgaucauuaauuucuaugauccccugguuuuuccuagugacgaauuugaugccagcauaucccaagugaacgagaaaaucaaucagucuuuggcguuuauuaggaagucggacgaacuccugcacaacguaaaugucggaaagagcacgacaaacaucaugaucaccacuauuauaaucgugauuaucguuauuuuacugcuacucaucgccgugggccuguuccuuuacugcaaagcacggugaggacuagucccuguucccagagcccacuuuuuuuucuuuuuuugaaauaaaauagccugucuuucagaucuaaaaaaaaaaaaaaaaaaaaaaaaaaaaaaaaaaaaaaaaaaaaaaaaaaaaaaaaaaaaaaaaugcaucccccccccccccccccccccccccccccccaaaggcucuuuucagagccaccagaauu

SEQ ID NO: 18036 - RNA, 1867 nt, Artificial Sequence
  mRNA product Design a-4 comprising derived and/or modified sequence from HRSV(Memphis-37)__AIY60640.1__F-del_DSCav1_mut6 (opt4)
gggagacuccugucgggcggaaguaggaggaguagaguuuaaaaacaguacucuuuuuccgguucgggacguaguugaagcaacgacaagccggauaaccgcucuugagacaggaagcuuaccauggagcugcccauccugaagaccaacgccaucaccaccauccuggccgccgugacccugugcuucgccagcagccagaacaucaccgaggaguucuaccagagcaccugcagcgccgugagcaagggcuaccugggcgcccugagaaccggcugguacaccagcgugaucaccaucgagcugagcaacaucaaggagaacaagugcaacggcaccgacgccaaggugaagcugaucaagcaggagcuggacaaguacaagaacgccgugaccgaccugcagaugcugaugugcagcacccccgccgccggcagcggcagcgccaucgccagcggcaucgccgugugcaaggugcugcaccuggagggcgaggugaacaagaucaagaacgcccugcugagcaccaacaaggccguggugagccugagcaacggcgugagcgugcugaccuucaaggugcuggaccugaagaacuacaucgacaagcagcugcugcccauccugaacaagcagagcugcagcauccccaaccccgagaccgugauggaguuccagcagaagaacaacagacugcuggagaucaccagagaguucagcgugaacgccggcgugaccacccccgugagcaccuacaugcugaccaacagcgagcugcugagccugaucaacgacaugcccaucaccaacgaccagaagaagcugaugagcaacaacgugcagaucgugagacagcagagcuacagcaucaugugcaucaucaaggaggaggugcuggccuacguggugcagcugccccuguacggcgugaucgacacccccugcuggaagcugcacaccagcccccugugcaccaccaacaccaaggagggcagcaacaucugccugaccagaaccgacagaggcugguacugcgacaacgccggcagcgugagcuucuucccccaggccgagaccugcaaggugugcagcaacagaguguucugcgacaccaugaacagccugacccugcccagcgaggugaaccugugcaacaucgacaucuucaaccccaaguacgacugcaagaucaugaccagcaagaccgacgugagcagcagcgugaucaccagccugggcgccaucgugagcugcuacggcaagaccaagugcaccgccagcaacaagaacaagggcaucaucaagaccuucagcaacggcugcgacuacgugagcaacaagggcguggacaccgugagcgugggcaacacccuguacuacgugaacaagcaggagggccagagccuguacgugaagggcgagcccaucaucaacuucuacgacccccugguguuccccagcgacgaguucgacgccagcaucagccaggugaacgagaagaucaaccagagccuggccuucaucagaaagagcgacgagcugcugcacaacgugaacgugggcaagagcaccaccaacaucaugaucaccaccaucaucaucgugaucaucgugauccugcugcugcugaucgccgugggccuguuccuguacugcaaggccagaugaggacuagucccuguucccagagcccacuuuuuuuucuuuuuuugaaauaaaauagccugucuuucagaucuaaaaaaaaaaaaaaaaaaaaaaaaaaaaaaaaaaaaaaaaaaaaaaaaaaaaaaaaaaaaaaaaugcaucccccccccccccccccccccccccccccccaaaggcucuuuucagagccaccagaauu

SEQ ID NO: 18037 - RNA, 1867 nt, Artificial Sequence
  mRNA product Design a-4 comprising derived and/or modified sequence from HRSV(Memphis-37)__AIY60640.1__F-del_DSCav1_mut6 (opt5)
gggagacuccugucgggcggaaguaggaggaguagaguuuaaaaacaguacucuuuuuccgguucgggacguaguugaagcaacgacaagccggauaaccgcucuugagacaggaagcuuaccauggagcugcccauccucaagaccaacgccauuacaacgauccuggcugccgugacccuuugcuucgcgagcucccagaauauuacagaagaguuuuaccaaucuaccuguagcgcugucuccaaaggcuaucugggggcccucagaacaggaugguacaccucuguuaucacaauugaacugagcaacaucaaggagaauaaaugcaacggcaccgacgccaaggugaaacuuaucaagcaggaacuggauaaguauaaaaaugcugugacggaccuccagaugcugauguguuccaccccugccgcugggucuggaagcgccauugcguccggcaucgccgucugcaaggugcugcaccucgagggggagguuaacaaaauuaagaaugcucugcuuagcacaaacaaagccguggucucucuguccaauggagugagcguucucaccuucaaggugcuggaucuuaagaacuacaucgacaaacagcugcucccgauucugaauaagcaaucuuguuccauccccaacccugaaacagucauggaguuucagcagaaaaauaaccggcugcucgaaauuacccgcgaguucagcgugaaugcuggcgugacgacacccgucucuaccuauaugcugacaaacuccgagcuucugagccucaucaacgauaugccuaucaccaaugaccagaagaaacugauguccaacaauguucaaauugugagacagcagucuuacagcaucaugugcauuaucaaggaagaggugcuugccuaugucgugcagcugccccucuacggcguuauugauaccccuuguuggaaacugcauacauccccgcugugcacgaccaacacaaaggaagggagcaauaucugucucacccggacagaccgcggaugguacugcgauaacgcgggcucuguguccuuuuucccccaagccgagaccuguaaggucugcagcaauagaguguuuugcgacacgaugaacucucugacacuuccuagcgaaguuaaucuguguaacaucgauauuuucaaucccaaauaugacugcaagaucaugaccuccaaaaccgaugugucuagcuccgucauuacaagccucggggcuaucgugucuuguuacggaaagaccaaaugcacagccuccaacaagaauaagggcauuaucaaaacguuuagcaacgggugugacuaugucucuaauaagggaguggacaccguuuccgugggcaacacacuguacuaugucaacaaacaggagggccagagccuuuacgugaagggggagccuaucauuaauuucuaugauccccugguuuuuccguccgacgaauuugaugcuucuaucagccaagugaacgagaaaauuaaucagucccucgccuucauccggaagucugacgaacugcugcacaacgucaaugugggaaagagcaccacaaacauuaugaucaccacgauuaucaucgugauuaucguuauucuccugcuucugaucgccgucggccucuuccuguacugcaaagcucgcugaggacuagucccuguucccagagcccacuuuuuuuucuuuuuuugaaauaaaauagccugucuuucagaucuaaaaaaaaaaaaaaaaaaaaaaaaaaaaaaaaaaaaaaaaaaaaaaaaaaaaaaaaaaaaaaaaugcaucccccccccccccccccccccccccccccccaaaggcucuuuucagagccaccagaauu

SEQ ID NO: 18038 - RNA, 1867 nt, Artificial Sequence
  mRNA product Design a-4 comprising derived and/or modified sequence from HRSV(Memphis-37)__AIY60640.1__F-del_DSCav1_mut6 (opt6)
gggagacuccugucgggcggaaguaggaggaguagaguuuaaaaacaguacucuuuuuccgguucgggacguaguugaagcaacgacaagccggauaaccgcucuugagacaggaagcuuaccauggaacuaccuauacuaaaaaccaacgccauaacaacaauacuagccgcaguuacacucugcuuugcauccucacaaaacaucacagaggaauuuuaccaaucuacuugcuccgcaguaucaaaaggauaccuaggagcacuccguacaggaugguacacaucagucauaacaauugaauuaucuaacaucaaagaaaacaaauguaaugguacagacgccaaaguaaaauuaauaaaacaagaacuagacaaauacaaaaacgccguaacagaccuacaaaugcuaaugugcucaacccccgccgcaggaucuggaucagcaauugccucaggcauagcaguaugcaaaguccuacaccuagaaggagaagucaacaaaauaaaaaacgcucuccucucaaccaauaaagcaguaguaucccucucaaacggaguaucaguacuaacauucaaaguacuagaccucaaaaauuauauagacaagcaacuacucccaauauuaaauaaacaauccugcucaauacccaauccagaaacagucauggaauuucaacaaaaaaacaaccgacucuuagaaauaacaagagaauuuucagucaaugccggcgucacaaccccaguaucaacauacaugcuaacaaacucagaacuacuaucacuaaucaacgauaugcccauaaccaacgaccaaaaaaaacuaaugucaaacaauguacaaauuguaagacaacagucuuauucaauaaugugcauaauaaaagaagaagucuuagcauauguaguacaacuaccacuauacggaguaauagacacaccauguuggaaauuacacacauccccacuauguaccaccaacacaaaagaaggaucuaacauaugccuaaccagaacagaccgaggcugguauugcgacaaugcaggaucaguauccuucuuuccacaagcagaaacaugcaaagucugcucuaacagaguauucugcgauacuaugaacucacuuaccuuaccaucagaaguaaaucuauguaauaucgacauauucaaucccaaauaugauugcaaaauaaugaccucaaaaacagauguaucaucaucagucauaacaucacuaggagcaauagucagcugcuaugggaaaacaaaaugcacagcuuccaacaaaaacaaaggaaucauaaaaacauucucaaaugguugugacuacguauccaacaaaggaguagauacaguaucuguaggcaacacauuauacuauguaaauaaacaagaaggacaaagccuauacgucaaaggagaacccaucauaaauuucuaugacccauuaguuuucccaucugacgaauuugacgcuuccaucucccaaguaaaugaaaaaaucaaccaaagccucgcauucauucgcaaaucugacgaauuacuccacaacguaaacguaggaaaauccacaacaaacauuaugaucaccaccauaauaaucguaauaauagucauauuacuacuccucauagcaguaggacuauuccuauacuguaaagcuagauaaggacuagucccuguucccagagcccacuuuuuuuucuuuuuuugaaauaaaauagccugucuuucagaucuaaaaaaaaaaaaaaaaaaaaaaaaaaaaaaaaaaaaaaaaaaaaaaaaaaaaaaaaaaaaaaaaugcaucccccccccccccccccccccccccccccccaaaggcucuuuucagagccaccagaauu

SEQ ID NO: 18039 - RNA, 1867 nt, Artificial Sequence
  mRNA product Design a-4 comprising derived and/or modified sequence from HRSV(Memphis-37)__AIY60640.1__F-del_DSCav1_mut6 (opt11)
gggagacuccugucgggcggaaguaggaggaguagaguuuaaaaacaguacucuuuuuccgguucgggacguaguugaagcaacgacaagccggauaaccgcucuugagacaggaagcuuaccauggaauuaccaauccucaaaacuaacgccaucaccaccauccucgcugccgucacccucugcuucgccuccagccaaaacaucacagaagaguucuaccaaagcacaugcuccgcugucuccaaaggcuaccuuggcgcccuccgcaccggcugguacaccucaguaauuaccauugaacuaagcaacaucaaagaaaauaaaugcaacggcaccgacgccaaaguuaaacucauaaaacaggaacucgacaaauacaaaaacgccguaacagaccuccaaaugcucaugugcuccacccccgccgccggcucaggcuccgccaucgcaagcggaauagcaguuugcaaaguccuccaccuagaaggcgaggucaacaagauuaaaaacgcacuucucucaaccaacaaggccgucguaucacucucaaacggcgucuccguccucaccuucaaaguucuggaccucaaaaacuacaucgauaaacaacuacucccaauacuuaacaaacaaucaugcuccaucccaaaccccgaaaccgucauggaguuccaacagaaaaacaaccgccuacuggaaaucacacgcgaguucagcguaaacgcuggcgucacuacacccgucuccaccuacaugcucaccaauucugaacuccuaucacucauaaacgacaugcccauuaccaacgaccaaaagaaacuaaugucaaacaacguccaaaucguaagacaacaaucguauuccaucaugugcauaauuaaagaagaaguucucgccuacgugguccaacuaccccucuacggagucauagacacuccuuguuggaaacuccacaccucuccccucugcacuaccaacacaaaagaaggcuccaacaucugccucacccgaaccgacagaggcugguacugcgacaacgccggcuccgucuccuucuucccccaagccgaaaccugcaaagucugcuccaaccgcguuuucugcgacaccaugaacucccucacacuccccuccgaagucaaccuauguaacauagacauauucaacccaaaauacgacugcaaaaucaugacauccaaaaccgacgugucuuccucggucaucaccucccucggcgccaucgucucaugcuacggcaaaacuaaaugcaccgcauccaacaaaaacaaaggcauaaucaaaacauucuccaacggcugcgacuacguuucuaacaaaggcgucgauaccgucuccgucggaaacacccucuacuacguaaacaagcaagaaggccagucccuauacguaaaaggagaaccaauuaucaacuucuacgacccccuagucuuccccuccgacgaguucgacgccuccauaucccaagucaacgagaaaaucaaccaaucccuagccuucauccgcaaaucagacgaacuccuccacaacgucaacgucggaaaauccacaacuaacaucaugaucaccaccaucauuaucgucaucauaguuauacuccuccuccucauagccgucggccucuuccuauacugcaaagcucgcuaaggacuagucccuguucccagagcccacuuuuuuuucuuuuuuugaaauaaaauagccugucuuucagaucuaaaaaaaaaaaaaaaaaaaaaaaaaaaaaaaaaaaaaaaaaaaaaaaaaaaaaaaaaaaaaaaaugcaucccccccccccccccccccccccccccccccaaaggcucuuuucagagccaccagaauu

SEQ ID NO: 18040 - RNA, 1813 nt, Artificial Sequence
  mRNA product Design a-5 comprising derived and/or modified sequence from HRSV(Memphis-37)__AIY60640.1__F-del_DSCav1_mut6 (opt1)
gggagacuuucccauucuguagcagaauuugguguugccuguggucuuggucccgcggagaagcuuaccauggagcugcccauccucaagaccaacgccaucaccacgauccuggccgcggugacccugugcuucgccagcucccagaacaucaccgaggaguucuaccagagcacgugcuccgccgucagcaagggcuaccucggcgcccugcgcaccgggugguacaccagcgugaucaccaucgagcuguccaacaucaaggagaacaagugcaacggcaccgacgccaaggugaagcucaucaagcaggagcuggacaaguacaagaacgcggucacggaccugcagaugcugaugugcagcaccccggccgccggcuccgggagcgcgaucgccuccggcaucgccgucugcaaggugcugcaccucgagggcgaggugaacaagaucaagaacgcccugcuguccaccaacaaggccgucgugagccucuccaacggggugagcguccugaccuucaaggugcuggaccucaagaacuacaucgacaagcagcugcugcccauccugaacaagcagagcugcuccauccccaaccccgagaccgucauggaguuccagcagaagaacaaccgccuccuggagaucacgcgggaguucagcgugaacgcgggcgugaccacccccgucuccaccuacaugcugacgaacagcgagcuccugucccugaucaacgacaugccgaucaccaacgaccagaagaagcucaugagcaacaacgugcagaucgugcgccagcaguccuacagcaucaugugcaucaucaaggaggagguccuggccuacguggugcagcugccccucuacggggucaucgacacccccugcuggaagcugcacaccagcccccugugcacgaccaacaccaaggagggcuccaacaucugccucacccggacggaccgcgggugguacugcgacaacgccggcagcguguccuucuucccgcaggccgagaccugcaaggucugcagcaaccggguguucugcgacaccaugaacucccugacccugcccagcgaggugaaccucugcaacaucgacaucuucaaccccaaguacgacugcaagaucaugacguccaagaccgacgucagcuccagcgugaucaccucccugggcgccaucgugagcugcuacgggaagaccaagugcacggcgagcaacaagaacaagggcaucaucaagaccuucuccaacgggugcgacuacgucagcaacaagggcguggacaccguguccgucggcaacacccuguacuacgugaacaagcaggagggccagagccucuacgugaagggggagcccaucaucaacuucuacgacccgcuggucuuccccuccgacgaguucgacgccagcaucucccaggugaacgagaagaucaaccagagccuggccuucauccggaaguccgacgagcuccugcacaacgugaacgucggcaagagcaccacgaacaucaugaucaccaccaucaucaucgugaucaucgugauccugcugcuccugaucgccgucgggcuguuccucuacugcaaggcccgcugaggacuagucccuguucccagagcccacuuuuuuuucuuuuuuugaaauaaaauagccugucuuucagaucuaaaaaaaaaaaaaaaaaaaaaaaaaaaaaaaaaaaaaaaaaaaaaaaaaaaaaaaaaaaaaaaaugcaucccccccccccccccccccccccccccccccaaaggcucuuuucagagccaccagaauu

SEQ ID NO: 18041 - RNA, 1813 nt, Artificial Sequence
  mRNA product Design a-5 comprising derived and/or modified sequence from HRSV(Memphis-37)__AIY60640.1__F-del_DSCav1_mut6 (opt1)
gggagacuuucccauucuguagcagaauuugguguugccuguggucuuggucccgcggagaagcuuaccauggagcugcccauccucaagaccaacgccaucaccacgauccuggccgcggugacccugugcuucgccagcucccagaacaucaccgaggaguucuaccagagcacgugcuccgccgucagcaagggcuaccucggggcccugcgcaccggcugguacaccuccgugaucaccaucgagcugagcaacaucaaggagaacaagugcaacgggaccgacgccaaggugaagcucaucaagcaggagcuggacaaguacaagaacgcggucacggaccugcagaugcucaugugcuccaccccggccgccggcagcggguccgccaucgcgagcggcaucgccgugugcaaggugcugcaccuggagggcgaggucaacaagaucaagaacgcccuccuguccaccaacaaggccguggugagccuguccaacggggucagcgugcucaccuucaaggugcuggaccugaagaacuacaucgacaagcagcuccugcccauccugaacaagcaguccugcagcauccccaaccccgagacggucauggaguuccagcagaagaacaaccggcuccuggagaucacccgcgaguucuccgugaacgccggcgugaccaccccggucagcacguacaugcugaccaacuccgagcuccugagccugaucaacgacaugcccaucaccaacgaccagaagaagcucaugagcaacaacgugcagaucgugcggcagcaguccuacagcaucaugugcaucaucaaggaggagguccuggcguacguggugcagcugccccucuacggggucaucgacacccccugcuggaagcugcacacguccccgcugugcaccaccaacaccaaggagggcagcaacaucugccucacgcgcaccgaccgggggugguacugcgacaacgccggcuccgugagcuucuucccccaggccgagaccugcaaggugugcuccaaccgcgucuucugcgacaccaugaacagccugacgcugcccuccgaggugaaccucugcaacaucgacaucuucaaccccaaguacgacugcaagaucaugaccagcaagaccgacgucuccagcuccgugaucaccagccugggcgccaucguguccugcuacgggaagacgaagugcaccgccagcaacaagaacaagggcaucaucaagaccuucuccaacgggugcgacuacgucagcaacaagggcguggacaccguguccgucggcaacacgcuguacuacgugaacaagcaggaggggcagagccucuacgugaagggcgagccgaucaucaacuucuacgacccccuggucuuccccagcgacgaguucgacgcguccaucagccaggugaacgagaagaucaaccagucccuggccuucauccgcaagagcgacgagcuccugcacaacgugaacgucgggaaguccaccaccaacaucaugaucaccaccaucaucaucgugaucaucgugauccugcuccugcugaucgccgucggccucuuccuguacugcaaggcccggugaggacuagucccuguucccagagcccacuuuuuuuucuuuuuuugaaauaaaauagccugucuuucagaucuaaaaaaaaaaaaaaaaaaaaaaaaaaaaaaaaaaaaaaaaaaaaaaaaaaaaaaaaaaaaaaaaugcaucccccccccccccccccccccccccccccccaaaggcucuuuucagagccaccagaauu

SEQ ID NO: 18042 - RNA, 1813 nt, Artificial Sequence
  mRNA product Design a-5 comprising derived and/or modified sequence from HRSV(Memphis-37)__AIY60640.1__F-del_DSCav1_mut6 (opt2)
gggagacuuucccauucuguagcagaauuugguguugccuguggucuuggucccgcggagaagcuuaccauggagcuccccauccucaagaccaacgccaucaccaccauccucgccgccgucacccucugcuucgccuccucccagaacaucaccgaggaguucuaccaguccaccugcuccgccgucuccaagggcuaccucggcgcccuccgcaccggcugguacaccuccgucaucaccaucgagcucuccaacaucaaggagaacaagugcaacggcaccgacgccaaggucaagcucaucaagcaggagcucgacaaguacaagaacgccgucaccgaccuccagaugcucaugugcuccacccccgccgccggcuccggcuccgccaucgccuccggcaucgccgucugcaagguccuccaccucgagggcgaggucaacaagaucaagaacgcccuccucuccaccaacaaggccgucgucucccucuccaacggcgucuccguccucaccuucaagguccucgaccucaagaacuacaucgacaagcagcuccuccccauccucaacaagcaguccugcuccauccccaaccccgagaccgucauggaguuccagcagaagaacaaccgccuccucgagaucacccgcgaguucuccgucaacgccggcgucaccacccccgucuccaccuacaugcucaccaacuccgagcuccucucccucaucaacgacaugcccaucaccaacgaccagaagaagcucauguccaacaacguccagaucguccgccagcaguccuacuccaucaugugcaucaucaaggaggagguccucgccuacgucguccagcucccccucuacggcgucaucgacacccccugcuggaagcuccacaccuccccccucugcaccaccaacaccaaggagggcuccaacaucugccucacccgcaccgaccgcggcugguacugcgacaacgccggcuccgucuccuucuucccccaggccgagaccugcaaggucugcuccaaccgcgucuucugcgacaccaugaacucccucacccuccccuccgaggucaaccucugcaacaucgacaucuucaaccccaaguacgacugcaagaucaugaccuccaagaccgacgucuccuccuccgucaucaccucccucggcgccaucgucuccugcuacggcaagaccaagugcaccgccuccaacaagaacaagggcaucaucaagaccuucuccaacggcugcgacuacgucuccaacaagggcgucgacaccgucuccgucggcaacacccucuacuacgucaacaagcaggagggccagucccucuacgucaagggcgagcccaucaucaacuucuacgacccccucgucuuccccuccgacgaguucgacgccuccaucucccaggucaacgagaagaucaaccagucccucgccuucauccgcaaguccgacgagcuccuccacaacgucaacgucggcaaguccaccaccaacaucaugaucaccaccaucaucaucgucaucaucgucauccuccuccuccucaucgccgucggccucuuccucuacugcaaggcccgcugaggacuagucccuguucccagagcccacuuuuuuuucuuuuuuugaaauaaaauagccugucuuucagaucuaaaaaaaaaaaaaaaaaaaaaaaaaaaaaaaaaaaaaaaaaaaaaaaaaaaaaaaaaaaaaaaaugcaucccccccccccccccccccccccccccccccaaaggcucuuuucagagccaccagaauu

SEQ ID NO: 18043 - RNA, 1813 nt, Artificial Sequence
  mRNA product Design a-5 comprising derived and/or modified sequence from HRSV(Memphis-37)__AIY60640.1__F-del_DSCav1_mut6 (opt3)
gggagacuuucccauucuguagcagaauuugguguugccuguggucuuggucccgcggagaagcuuaccauggagcugcccauccucaagaccaacgccauuacaacuauacuugcugcagugacgcugugcuucgccagcucccagaauaucaccgaagaguuuuaccaaucuacauguucagcggucaguaaaggcuauuugggggcuuuaagaacuggaugguacaccagcguuauuacaaucgaacuguccaacauuaaggagaauaaaugcaacgguaccgacgccaaggugaaacuaaucaagcaggaacucgauaaguauaaaaaugcaguaacugaccugcagaugcuuauguguucuacuccugccgcuggcucggggucagcaauagccagcggaaucgcugugugcaagguccugcacuuggagggcgaggugaacaaaauuaagaaugcccuccugaguaccaacaaagcgguugugucccugucuaauggugucagcgugcucacguucaagguauuagaucugaagaacuacaucgacaaacagcuuuugccaauucugaauaagcaauccuguucaaucccgaaccccgaaacuguuauggaguuucagcagaaaaauaacaggcuacucgaaauaacccgggaguucagugugaaugcaggggucacaacuccugugagcaccuauaugcugacaaacucugagcuucuguccuugauuaacgauaugccaaucaccaaugaccagaagaaacucaugucaaacaaugugcaaauuguccgccagcagagcuacaguaucaugugcaucauuaaggaagagguucuggccuaugugguacaguuaccccuguacggagugauagauacgccuuguuggaaacuccauacuucuccacuuugcacaaccaacacuaaggaaggcuccaauaucugucugacacgaaccgaccguggcugguacugcgauaacgcugggagcgucucguuuuucccccaagccgagacguguaaggugugcucuaauagaguuuucugcgacaccaugaacuccuugacacuaccuucagaagugaaucuguguaacauugauaucuucaauccaaaauaugacugcaagauaaugacaaguaaaaccgaugucagcuccucugugauuacaagccucggagcaaucguaucauguuacgguaagacuaaaugcaccgcuaguaacaagaauaagggcaucauuaaaacauuuuccaacgggugugacuauguuagcaauaagggaguggacaccgucucugugggcaacacucuguacuaugucaacaaacaggagggucagucacuuuacgugaagggggagccgaucauuaauuucuaugauccccugguuuuuccuagugacgaauuugaugccagcauaucccaagugaacgagaaaaucaaucagucuuuggcguuuauuaggaagucggacgaacuccugcacaacguaaaugucggaaagagcacgacaaacaucaugaucaccacuauuauaaucgugauuaucguuauuuuacugcuacucaucgccgugggccuguuccuuuacugcaaagcacggugaggacuagucccuguucccagagcccacuuuuuuuucuuuuuuugaaauaaaauagccugucuuucagaucuaaaaaaaaaaaaaaaaaaaaaaaaaaaaaaaaaaaaaaaaaaaaaaaaaaaaaaaaaaaaaaaaugcaucccccccccccccccccccccccccccccccaaaggcucuuuucagagccaccagaauu

SEQ ID NO: 18044 - RNA, 1813 nt, Artificial Sequence
  mRNA product Design a-5 comprising derived and/or modified sequence from HRSV(Memphis-37)__AIY60640.1__F-del_DSCav1_mut6 (opt4)
gggagacuuucccauucuguagcagaauuugguguugccuguggucuuggucccgcggagaagcuuaccauggagcugcccauccugaagaccaacgccaucaccaccauccuggccgccgugacccugugcuucgccagcagccagaacaucaccgaggaguucuaccagagcaccugcagcgccgugagcaagggcuaccugggcgcccugagaaccggcugguacaccagcgugaucaccaucgagcugagcaacaucaaggagaacaagugcaacggcaccgacgccaaggugaagcugaucaagcaggagcuggacaaguacaagaacgccgugaccgaccugcagaugcugaugugcagcacccccgccgccggcagcggcagcgccaucgccagcggcaucgccgugugcaaggugcugcaccuggagggcgaggugaacaagaucaagaacgcccugcugagcaccaacaaggccguggugagccugagcaacggcgugagcgugcugaccuucaaggugcuggaccugaagaacuacaucgacaagcagcugcugcccauccugaacaagcagagcugcagcauccccaaccccgagaccgugauggaguuccagcagaagaacaacagacugcuggagaucaccagagaguucagcgugaacgccggcgugaccacccccgugagcaccuacaugcugaccaacagcgagcugcugagccugaucaacgacaugcccaucaccaacgaccagaagaagcugaugagcaacaacgugcagaucgugagacagcagagcuacagcaucaugugcaucaucaaggaggaggugcuggccuacguggugcagcugccccuguacggcgugaucgacacccccugcuggaagcugcacaccagcccccugugcaccaccaacaccaaggagggcagcaacaucugccugaccagaaccgacagaggcugguacugcgacaacgccggcagcgugagcuucuucccccaggccgagaccugcaaggugugcagcaacagaguguucugcgacaccaugaacagccugacccugcccagcgaggugaaccugugcaacaucgacaucuucaaccccaaguacgacugcaagaucaugaccagcaagaccgacgugagcagcagcgugaucaccagccugggcgccaucgugagcugcuacggcaagaccaagugcaccgccagcaacaagaacaagggcaucaucaagaccuucagcaacggcugcgacuacgugagcaacaagggcguggacaccgugagcgugggcaacacccuguacuacgugaacaagcaggagggccagagccuguacgugaagggcgagcccaucaucaacuucuacgacccccugguguuccccagcgacgaguucgacgccagcaucagccaggugaacgagaagaucaaccagagccuggccuucaucagaaagagcgacgagcugcugcacaacgugaacgugggcaagagcaccaccaacaucaugaucaccaccaucaucaucgugaucaucgugauccugcugcugcugaucgccgugggccuguuccuguacugcaaggccagaugaggacuagucccuguucccagagcccacuuuuuuuucuuuuuuugaaauaaaauagccugucuuucagaucuaaaaaaaaaaaaaaaaaaaaaaaaaaaaaaaaaaaaaaaaaaaaaaaaaaaaaaaaaaaaaaaaugcaucccccccccccccccccccccccccccccccaaaggcucuuuucagagccaccagaauu

SEQ ID NO: 18045 - RNA, 1813 nt, Artificial Sequence
  mRNA product Design a-5 comprising derived and/or modified sequence from HRSV(Memphis-37)__AIY60640.1__F-del_DSCav1_mut6 (opt5)
gggagacuuucccauucuguagcagaauuugguguugccuguggucuuggucccgcggagaagcuuaccauggagcugcccauccucaagaccaacgccauuacaacgauccuggcugccgugacccuuugcuucgcgagcucccagaauauuacagaagaguuuuaccaaucuaccuguagcgcugucuccaaaggcuaucugggggcccucagaacaggaugguacaccucuguuaucacaauugaacugagcaacaucaaggagaauaaaugcaacggcaccgacgccaaggugaaacuuaucaagcaggaacuggauaaguauaaaaaugcugugacggaccuccagaugcugauguguuccaccccugccgcugggucuggaagcgccauugcguccggcaucgccgucugcaaggugcugcaccucgagggggagguuaacaaaauuaagaaugcucugcuuagcacaaacaaagccguggucucucuguccaauggagugagcguucucaccuucaaggugcuggaucuuaagaacuacaucgacaaacagcugcucccgauucugaauaagcaaucuuguuccauccccaacccugaaacagucauggaguuucagcagaaaaauaaccggcugcucgaaauuacccgcgaguucagcgugaaugcuggcgugacgacacccgucucuaccuauaugcugacaaacuccgagcuucugagccucaucaacgauaugccuaucaccaaugaccagaagaaacugauguccaacaauguucaaauugugagacagcagucuuacagcaucaugugcauuaucaaggaagaggugcuugccuaugucgugcagcugccccucuacggcguuauugauaccccuuguuggaaacugcauacauccccgcugugcacgaccaacacaaaggaagggagcaauaucugucucacccggacagaccgcggaugguacugcgauaacgcgggcucuguguccuuuuucccccaagccgagaccuguaaggucugcagcaauagaguguuuugcgacacgaugaacucucugacacuuccuagcgaaguuaaucuguguaacaucgauauuuucaaucccaaauaugacugcaagaucaugaccuccaaaaccgaugugucuagcuccgucauuacaagccucggggcuaucgugucuuguuacggaaagaccaaaugcacagccuccaacaagaauaagggcauuaucaaaacguuuagcaacgggugugacuaugucucuaauaagggaguggacaccguuuccgugggcaacacacuguacuaugucaacaaacaggagggccagagccuuuacgugaagggggagccuaucauuaauuucuaugauccccugguuuuuccguccgacgaauuugaugcuucuaucagccaagugaacgagaaaauuaaucagucccucgccuucauccggaagucugacgaacugcugcacaacgucaaugugggaaagagcaccacaaacauuaugaucaccacgauuaucaucgugauuaucguuauucuccugcuucugaucgccgucggccucuuccuguacugcaaagcucgcugaggacuagucccuguucccagagcccacuuuuuuuucuuuuuuugaaauaaaauagccugucuuucagaucuaaaaaaaaaaaaaaaaaaaaaaaaaaaaaaaaaaaaaaaaaaaaaaaaaaaaaaaaaaaaaaaaugcaucccccccccccccccccccccccccccccccaaaggcucuuuucagagccaccagaauu

SEQ ID NO: 18046 - RNA, 1813 nt, Artificial Sequence
  mRNA product Design a-5 comprising derived and/or modified sequence from HRSV(Memphis-37)__AIY60640.1__F-del_DSCav1_mut6 (opt6)
gggagacuuucccauucuguagcagaauuugguguugccuguggucuuggucccgcggagaagcuuaccauggaacuaccuauacuaaaaaccaacgccauaacaacaauacuagccgcaguuacacucugcuuugcauccucacaaaacaucacagaggaauuuuaccaaucuacuugcuccgcaguaucaaaaggauaccuaggagcacuccguacaggaugguacacaucagucauaacaauugaauuaucuaacaucaaagaaaacaaauguaaugguacagacgccaaaguaaaauuaauaaaacaagaacuagacaaauacaaaaacgccguaacagaccuacaaaugcuaaugugcucaacccccgccgcaggaucuggaucagcaauugccucaggcauagcaguaugcaaaguccuacaccuagaaggagaagucaacaaaauaaaaaacgcucuccucucaaccaauaaagcaguaguaucccucucaaacggaguaucaguacuaacauucaaaguacuagaccucaaaaauuauauagacaagcaacuacucccaauauuaaauaaacaauccugcucaauacccaauccagaaacagucauggaauuucaacaaaaaaacaaccgacucuuagaaauaacaagagaauuuucagucaaugccggcgucacaaccccaguaucaacauacaugcuaacaaacucagaacuacuaucacuaaucaacgauaugcccauaaccaacgaccaaaaaaaacuaaugucaaacaauguacaaauuguaagacaacagucuuauucaauaaugugcauaauaaaagaagaagucuuagcauauguaguacaacuaccacuauacggaguaauagacacaccauguuggaaauuacacacauccccacuauguaccaccaacacaaaagaaggaucuaacauaugccuaaccagaacagaccgaggcugguauugcgacaaugcaggaucaguauccuucuuuccacaagcagaaacaugcaaagucugcucuaacagaguauucugcgauacuaugaacucacuuaccuuaccaucagaaguaaaucuauguaauaucgacauauucaaucccaaauaugauugcaaaauaaugaccucaaaaacagauguaucaucaucagucauaacaucacuaggagcaauagucagcugcuaugggaaaacaaaaugcacagcuuccaacaaaaacaaaggaaucauaaaaacauucucaaaugguugugacuacguauccaacaaaggaguagauacaguaucuguaggcaacacauuauacuauguaaauaaacaagaaggacaaagccuauacgucaaaggagaacccaucauaaauuucuaugacccauuaguuuucccaucugacgaauuugacgcuuccaucucccaaguaaaugaaaaaaucaaccaaagccucgcauucauucgcaaaucugacgaauuacuccacaacguaaacguaggaaaauccacaacaaacauuaugaucaccaccauaauaaucguaauaauagucauauuacuacuccucauagcaguaggacuauuccuauacuguaaagcuagauaaggacuagucccuguucccagagcccacuuuuuuuucuuuuuuugaaauaaaauagccugucuuucagaucuaaaaaaaaaaaaaaaaaaaaaaaaaaaaaaaaaaaaaaaaaaaaaaaaaaaaaaaaaaaaaaaaugcaucccccccccccccccccccccccccccccccaaaggcucuuuucagagccaccagaauu

SEQ ID NO: 18047 - RNA, 1813 nt, Artificial Sequence
  mRNA product Design a-5 comprising derived and/or modified sequence from HRSV(Memphis-37)__AIY60640.1__F-del_DSCav1_mut6 (opt11)
gggagacuuucccauucuguagcagaauuugguguugccuguggucuuggucccgcggagaagcuuaccauggaauuaccaauccucaaaacuaacgccaucaccaccauccucgcugccgucacccucugcuucgccuccagccaaaacaucacagaagaguucuaccaaagcacaugcuccgcugucuccaaaggcuaccuuggcgcccuccgcaccggcugguacaccucaguaauuaccauugaacuaagcaacaucaaagaaaauaaaugcaacggcaccgacgccaaaguuaaacucauaaaacaggaacucgacaaauacaaaaacgccguaacagaccuccaaaugcucaugugcuccacccccgccgccggcucaggcuccgccaucgcaagcggaauagcaguuugcaaaguccuccaccuagaaggcgaggucaacaagauuaaaaacgcacuucucucaaccaacaaggccgucguaucacucucaaacggcgucuccguccucaccuucaaaguucuggaccucaaaaacuacaucgauaaacaacuacucccaauacuuaacaaacaaucaugcuccaucccaaaccccgaaaccgucauggaguuccaacagaaaaacaaccgccuacuggaaaucacacgcgaguucagcguaaacgcuggcgucacuacacccgucuccaccuacaugcucaccaauucugaacuccuaucacucauaaacgacaugcccauuaccaacgaccaaaagaaacuaaugucaaacaacguccaaaucguaagacaacaaucguauuccaucaugugcauaauuaaagaagaaguucucgccuacgugguccaacuaccccucuacggagucauagacacuccuuguuggaaacuccacaccucuccccucugcacuaccaacacaaaagaaggcuccaacaucugccucacccgaaccgacagaggcugguacugcgacaacgccggcuccgucuccuucuucccccaagccgaaaccugcaaagucugcuccaaccgcguuuucugcgacaccaugaacucccucacacuccccuccgaagucaaccuauguaacauagacauauucaacccaaaauacgacugcaaaaucaugacauccaaaaccgacgugucuuccucggucaucaccucccucggcgccaucgucucaugcuacggcaaaacuaaaugcaccgcauccaacaaaaacaaaggcauaaucaaaacauucuccaacggcugcgacuacguuucuaacaaaggcgucgauaccgucuccgucggaaacacccucuacuacguaaacaagcaagaaggccagucccuauacguaaaaggagaaccaauuaucaacuucuacgacccccuagucuuccccuccgacgaguucgacgccuccauaucccaagucaacgagaaaaucaaccaaucccuagccuucauccgcaaaucagacgaacuccuccacaacgucaacgucggaaaauccacaacuaacaucaugaucaccaccaucauuaucgucaucauaguuauacuccuccuccucauagccgucggccucuuccuauacugcaaagcucgcuaaggacuagucccuguucccagagcccacuuuuuuuucuuuuuuugaaauaaaauagccugucuuucagaucuaaaaaaaaaaaaaaaaaaaaaaaaaaaaaaaaaaaaaaaaaaaaaaaaaaaaaaaaaaaaaaaaugcaucccccccccccccccccccccccccccccccaaaggcucuuuucagagccaccagaauu

SEQ ID NO: 18048 - RNA, 1994 nt, Artificial Sequence
  mRNA product Design b-1 comprising derived and/or modified sequence from HRSV(Memphis-37)__AIY60640.1__F-del_DSCav1_mut6 (opt1)
gggagacggagacggccugcaggaccugcucucucagcccucagccgaggccuacgccgagccgagugcgcagccgacgaccgggaggagccgcagccuucaacucugagguacugugauccgcgcugcccgccgggccgccccaguccgcugcugcggcaccuccuucccucgcgcccucuucgcucgccagcgccuucccugugagccugcgucaccgcggccgccaagcuuaccauggagcugcccauccucaagaccaacgccaucaccacgauccuggccgcggugacccugugcuucgccagcucccagaacaucaccgaggaguucuaccagagcacgugcuccgccgucagcaagggcuaccucggcgcccugcgcaccgggugguacaccagcgugaucaccaucgagcuguccaacaucaaggagaacaagugcaacggcaccgacgccaaggugaagcucaucaagcaggagcuggacaaguacaagaacgcggucacggaccugcagaugcugaugugcagcaccccggccgccggcuccgggagcgcgaucgccuccggcaucgccgucugcaaggugcugcaccucgagggcgaggugaacaagaucaagaacgcccugcuguccaccaacaaggccgucgugagccucuccaacggggugagcguccugaccuucaaggugcuggaccucaagaacuacaucgacaagcagcugcugcccauccugaacaagcagagcugcuccauccccaaccccgagaccgucauggaguuccagcagaagaacaaccgccuccuggagaucacgcgggaguucagcgugaacgcgggcgugaccacccccgucuccaccuacaugcugacgaacagcgagcuccugucccugaucaacgacaugccgaucaccaacgaccagaagaagcucaugagcaacaacgugcagaucgugcgccagcaguccuacagcaucaugugcaucaucaaggaggagguccuggccuacguggugcagcugccccucuacggggucaucgacacccccugcuggaagcugcacaccagcccccugugcacgaccaacaccaaggagggcuccaacaucugccucacccggacggaccgcgggugguacugcgacaacgccggcagcguguccuucuucccgcaggccgagaccugcaaggucugcagcaaccggguguucugcgacaccaugaacucccugacccugcccagcgaggugaaccucugcaacaucgacaucuucaaccccaaguacgacugcaagaucaugacguccaagaccgacgucagcuccagcgugaucaccucccugggcgccaucgugagcugcuacgggaagaccaagugcacggcgagcaacaagaacaagggcaucaucaagaccuucuccaacgggugcgacuacgucagcaacaagggcguggacaccguguccgucggcaacacccuguacuacgugaacaagcaggagggccagagccucuacgugaagggggagcccaucaucaacuucuacgacccgcuggucuuccccuccgacgaguucgacgccagcaucucccaggugaacgagaagaucaaccagagccuggccuucauccggaaguccgacgagcuccugcacaacgugaacgucggcaagagcaccacgaacaucaugaucaccaccaucaucaucgugaucaucgugauccugcugcuccugaucgccgucgggcuguuccucuacugcaaggcccgcugaggacuaguguccaccugucccuccugggcugcuggauugucucguuuuccugccaaauaaacaggaucagcgcuuuacagaucuaaaaaaaaaaaaaaaaaaaaaaaaaaaaaaaaaaaaaaaaaaaaaaaaaaaaaaaaaaaaaaaaugcaucccccccccccccccccccccccccccccccaaaggcucuuuucagagccaccagaauu

SEQ ID NO: 18049 - RNA, 1994 nt, Artificial Sequence
  mRNA product Design b-1 comprising derived and/or modified sequence from HRSV(Memphis-37)__AIY60640.1__F-del_DSCav1_mut6 (opt1)
gggagacggagacggccugcaggaccugcucucucagcccucagccgaggccuacgccgagccgagugcgcagccgacgaccgggaggagccgcagccuucaacucugagguacugugauccgcgcugcccgccgggccgccccaguccgcugcugcggcaccuccuucccucgcgcccucuucgcucgccagcgccuucccugugagccugcgucaccgcggccgccaagcuuaccauggagcugcccauccucaagaccaacgccaucaccacgauccuggccgcggugacccugugcuucgccagcucccagaacaucaccgaggaguucuaccagagcacgugcuccgccgucagcaagggcuaccucggggcccugcgcaccggcugguacaccuccgugaucaccaucgagcugagcaacaucaaggagaacaagugcaacgggaccgacgccaaggugaagcucaucaagcaggagcuggacaaguacaagaacgcggucacggaccugcagaugcucaugugcuccaccccggccgccggcagcggguccgccaucgcgagcggcaucgccgugugcaaggugcugcaccuggagggcgaggucaacaagaucaagaacgcccuccuguccaccaacaaggccguggugagccuguccaacggggucagcgugcucaccuucaaggugcuggaccugaagaacuacaucgacaagcagcuccugcccauccugaacaagcaguccugcagcauccccaaccccgagacggucauggaguuccagcagaagaacaaccggcuccuggagaucacccgcgaguucuccgugaacgccggcgugaccaccccggucagcacguacaugcugaccaacuccgagcuccugagccugaucaacgacaugcccaucaccaacgaccagaagaagcucaugagcaacaacgugcagaucgugcggcagcaguccuacagcaucaugugcaucaucaaggaggagguccuggcguacguggugcagcugccccucuacggggucaucgacacccccugcuggaagcugcacacguccccgcugugcaccaccaacaccaaggagggcagcaacaucugccucacgcgcaccgaccgggggugguacugcgacaacgccggcuccgugagcuucuucccccaggccgagaccugcaaggugugcuccaaccgcgucuucugcgacaccaugaacagccugacgcugcccuccgaggugaaccucugcaacaucgacaucuucaaccccaaguacgacugcaagaucaugaccagcaagaccgacgucuccagcuccgugaucaccagccugggcgccaucguguccugcuacgggaagacgaagugcaccgccagcaacaagaacaagggcaucaucaagaccuucuccaacgggugcgacuacgucagcaacaagggcguggacaccguguccgucggcaacacgcuguacuacgugaacaagcaggaggggcagagccucuacgugaagggcgagccgaucaucaacuucuacgacccccuggucuuccccagcgacgaguucgacgcguccaucagccaggugaacgagaagaucaaccagucccuggccuucauccgcaagagcgacgagcuccugcacaacgugaacgucgggaaguccaccaccaacaucaugaucaccaccaucaucaucgugaucaucgugauccugcuccugcugaucgccgucggccucuuccuguacugcaaggcccggugaggacuaguguccaccugucccuccugggcugcuggauugucucguuuuccugccaaauaaacaggaucagcgcuuuacagaucuaaaaaaaaaaaaaaaaaaaaaaaaaaaaaaaaaaaaaaaaaaaaaaaaaaaaaaaaaaaaaaaaugcaucccccccccccccccccccccccccccccccaaaggcucuuuucagagccaccagaauu

SEQ ID NO: 18050 - RNA, 1994 nt, Artificial Sequence
  mRNA product Design b-1 comprising derived and/or modified sequence from HRSV(Memphis-37)__AIY60640.1__F-del_DSCav1_mut6 (opt2)
gggagacggagacggccugcaggaccugcucucucagcccucagccgaggccuacgccgagccgagugcgcagccgacgaccgggaggagccgcagccuucaacucugagguacugugauccgcgcugcccgccgggccgccccaguccgcugcugcggcaccuccuucccucgcgcccucuucgcucgccagcgccuucccugugagccugcgucaccgcggccgccaagcuuaccauggagcuccccauccucaagaccaacgccaucaccaccauccucgccgccgucacccucugcuucgccuccucccagaacaucaccgaggaguucuaccaguccaccugcuccgccgucuccaagggcuaccucggcgcccuccgcaccggcugguacaccuccgucaucaccaucgagcucuccaacaucaaggagaacaagugcaacggcaccgacgccaaggucaagcucaucaagcaggagcucgacaaguacaagaacgccgucaccgaccuccagaugcucaugugcuccacccccgccgccggcuccggcuccgccaucgccuccggcaucgccgucugcaagguccuccaccucgagggcgaggucaacaagaucaagaacgcccuccucuccaccaacaaggccgucgucucccucuccaacggcgucuccguccucaccuucaagguccucgaccucaagaacuacaucgacaagcagcuccuccccauccucaacaagcaguccugcuccauccccaaccccgagaccgucauggaguuccagcagaagaacaaccgccuccucgagaucacccgcgaguucuccgucaacgccggcgucaccacccccgucuccaccuacaugcucaccaacuccgagcuccucucccucaucaacgacaugcccaucaccaacgaccagaagaagcucauguccaacaacguccagaucguccgccagcaguccuacuccaucaugugcaucaucaaggaggagguccucgccuacgucguccagcucccccucuacggcgucaucgacacccccugcuggaagcuccacaccuccccccucugcaccaccaacaccaaggagggcuccaacaucugccucacccgcaccgaccgcggcugguacugcgacaacgccggcuccgucuccuucuucccccaggccgagaccugcaaggucugcuccaaccgcgucuucugcgacaccaugaacucccucacccuccccuccgaggucaaccucugcaacaucgacaucuucaaccccaaguacgacugcaagaucaugaccuccaagaccgacgucuccuccuccgucaucaccucccucggcgccaucgucuccugcuacggcaagaccaagugcaccgccuccaacaagaacaagggcaucaucaagaccuucuccaacggcugcgacuacgucuccaacaagggcgucgacaccgucuccgucggcaacacccucuacuacgucaacaagcaggagggccagucccucuacgucaagggcgagcccaucaucaacuucuacgacccccucgucuuccccuccgacgaguucgacgccuccaucucccaggucaacgagaagaucaaccagucccucgccuucauccgcaaguccgacgagcuccuccacaacgucaacgucggcaaguccaccaccaacaucaugaucaccaccaucaucaucgucaucaucgucauccuccuccuccucaucgccgucggccucuuccucuacugcaaggcccgcugaggacuaguguccaccugucccuccugggcugcuggauugucucguuuuccugccaaauaaacaggaucagcgcuuuacagaucuaaaaaaaaaaaaaaaaaaaaaaaaaaaaaaaaaaaaaaaaaaaaaaaaaaaaaaaaaaaaaaaaugcaucccccccccccccccccccccccccccccccaaaggcucuuuucagagccaccagaauu

SEQ ID NO: 18051 - RNA, 1994 nt, Artificial Sequence
  mRNA product Design b-1 comprising derived and/or modified sequence from HRSV(Memphis-37)__AIY60640.1__F-del_DSCav1_mut6 (opt3)
gggagacggagacggccugcaggaccugcucucucagcccucagccgaggccuacgccgagccgagugcgcagccgacgaccgggaggagccgcagccuucaacucugagguacugugauccgcgcugcccgccgggccgccccaguccgcugcugcggcaccuccuucccucgcgcccucuucgcucgccagcgccuucccugugagccugcgucaccgcggccgccaagcuuaccauggagcugcccauccucaagaccaacgccauuacaacuauacuugcugcagugacgcugugcuucgccagcucccagaauaucaccgaagaguuuuaccaaucuacauguucagcggucaguaaaggcuauuugggggcuuuaagaacuggaugguacaccagcguuauuacaaucgaacuguccaacauuaaggagaauaaaugcaacgguaccgacgccaaggugaaacuaaucaagcaggaacucgauaaguauaaaaaugcaguaacugaccugcagaugcuuauguguucuacuccugccgcuggcucggggucagcaauagccagcggaaucgcugugugcaagguccugcacuuggagggcgaggugaacaaaauuaagaaugcccuccugaguaccaacaaagcgguugugucccugucuaauggugucagcgugcucacguucaagguauuagaucugaagaacuacaucgacaaacagcuuuugccaauucugaauaagcaauccuguucaaucccgaaccccgaaacuguuauggaguuucagcagaaaaauaacaggcuacucgaaauaacccgggaguucagugugaaugcaggggucacaacuccugugagcaccuauaugcugacaaacucugagcuucuguccuugauuaacgauaugccaaucaccaaugaccagaagaaacucaugucaaacaaugugcaaauuguccgccagcagagcuacaguaucaugugcaucauuaaggaagagguucuggccuaugugguacaguuaccccuguacggagugauagauacgccuuguuggaaacuccauacuucuccacuuugcacaaccaacacuaaggaaggcuccaauaucugucugacacgaaccgaccguggcugguacugcgauaacgcugggagcgucucguuuuucccccaagccgagacguguaaggugugcucuaauagaguuuucugcgacaccaugaacuccuugacacuaccuucagaagugaaucuguguaacauugauaucuucaauccaaaauaugacugcaagauaaugacaaguaaaaccgaugucagcuccucugugauuacaagccucggagcaaucguaucauguuacgguaagacuaaaugcaccgcuaguaacaagaauaagggcaucauuaaaacauuuuccaacgggugugacuauguuagcaauaagggaguggacaccgucucugugggcaacacucuguacuaugucaacaaacaggagggucagucacuuuacgugaagggggagccgaucauuaauuucuaugauccccugguuuuuccuagugacgaauuugaugccagcauaucccaagugaacgagaaaaucaaucagucuuuggcguuuauuaggaagucggacgaacuccugcacaacguaaaugucggaaagagcacgacaaacaucaugaucaccacuauuauaaucgugauuaucguuauuuuacugcuacucaucgccgugggccuguuccuuuacugcaaagcacggugaggacuaguguccaccugucccuccugggcugcuggauugucucguuuuccugccaaauaaacaggaucagcgcuuuacagaucuaaaaaaaaaaaaaaaaaaaaaaaaaaaaaaaaaaaaaaaaaaaaaaaaaaaaaaaaaaaaaaaaugcaucccccccccccccccccccccccccccccccaaaggcucuuuucagagccaccagaauu

SEQ ID NO: 18052 - RNA, 1994 nt, Artificial Sequence
  mRNA product Design b-1 comprising derived and/or modified sequence from HRSV(Memphis-37)__AIY60640.1__F-del_DSCav1_mut6 (opt4)
gggagacggagacggccugcaggaccugcucucucagcccucagccgaggccuacgccgagccgagugcgcagccgacgaccgggaggagccgcagccuucaacucugagguacugugauccgcgcugcccgccgggccgccccaguccgcugcugcggcaccuccuucccucgcgcccucuucgcucgccagcgccuucccugugagccugcgucaccgcggccgccaagcuuaccauggagcugcccauccugaagaccaacgccaucaccaccauccuggccgccgugacccugugcuucgccagcagccagaacaucaccgaggaguucuaccagagcaccugcagcgccgugagcaagggcuaccugggcgcccugagaaccggcugguacaccagcgugaucaccaucgagcugagcaacaucaaggagaacaagugcaacggcaccgacgccaaggugaagcugaucaagcaggagcuggacaaguacaagaacgccgugaccgaccugcagaugcugaugugcagcacccccgccgccggcagcggcagcgccaucgccagcggcaucgccgugugcaaggugcugcaccuggagggcgaggugaacaagaucaagaacgcccugcugagcaccaacaaggccguggugagccugagcaacggcgugagcgugcugaccuucaaggugcuggaccugaagaacuacaucgacaagcagcugcugcccauccugaacaagcagagcugcagcauccccaaccccgagaccgugauggaguuccagcagaagaacaacagacugcuggagaucaccagagaguucagcgugaacgccggcgugaccacccccgugagcaccuacaugcugaccaacagcgagcugcugagccugaucaacgacaugcccaucaccaacgaccagaagaagcugaugagcaacaacgugcagaucgugagacagcagagcuacagcaucaugugcaucaucaaggaggaggugcuggccuacguggugcagcugccccuguacggcgugaucgacacccccugcuggaagcugcacaccagcccccugugcaccaccaacaccaaggagggcagcaacaucugccugaccagaaccgacagaggcugguacugcgacaacgccggcagcgugagcuucuucccccaggccgagaccugcaaggugugcagcaacagaguguucugcgacaccaugaacagccugacccugcccagcgaggugaaccugugcaacaucgacaucuucaaccccaaguacgacugcaagaucaugaccagcaagaccgacgugagcagcagcgugaucaccagccugggcgccaucgugagcugcuacggcaagaccaagugcaccgccagcaacaagaacaagggcaucaucaagaccuucagcaacggcugcgacuacgugagcaacaagggcguggacaccgugagcgugggcaacacccuguacuacgugaacaagcaggagggccagagccuguacgugaagggcgagcccaucaucaacuucuacgacccccugguguuccccagcgacgaguucgacgccagcaucagccaggugaacgagaagaucaaccagagccuggccuucaucagaaagagcgacgagcugcugcacaacgugaacgugggcaagagcaccaccaacaucaugaucaccaccaucaucaucgugaucaucgugauccugcugcugcugaucgccgugggccuguuccuguacugcaaggccagaugaggacuaguguccaccugucccuccugggcugcuggauugucucguuuuccugccaaauaaacaggaucagcgcuuuacagaucuaaaaaaaaaaaaaaaaaaaaaaaaaaaaaaaaaaaaaaaaaaaaaaaaaaaaaaaaaaaaaaaaugcaucccccccccccccccccccccccccccccccaaaggcucuuuucagagccaccagaauu

SEQ ID NO: 18053 - RNA, 1994 nt, Artificial Sequence
  mRNA product Design b-1 comprising derived and/or modified sequence from HRSV(Memphis-37)__AIY60640.1__F-del_DSCav1_mut6 (opt5)
gggagacggagacggccugcaggaccugcucucucagcccucagccgaggccuacgccgagccgagugcgcagccgacgaccgggaggagccgcagccuucaacucugagguacugugauccgcgcugcccgccgggccgccccaguccgcugcugcggcaccuccuucccucgcgcccucuucgcucgccagcgccuucccugugagccugcgucaccgcggccgccaagcuuaccauggagcugcccauccucaagaccaacgccauuacaacgauccuggcugccgugacccuuugcuucgcgagcucccagaauauuacagaagaguuuuaccaaucuaccuguagcgcugucuccaaaggcuaucugggggcccucagaacaggaugguacaccucuguuaucacaauugaacugagcaacaucaaggagaauaaaugcaacggcaccgacgccaaggugaaacuuaucaagcaggaacuggauaaguauaaaaaugcugugacggaccuccagaugcugauguguuccaccccugccgcugggucuggaagcgccauugcguccggcaucgccgucugcaaggugcugcaccucgagggggagguuaacaaaauuaagaaugcucugcuuagcacaaacaaagccguggucucucuguccaauggagugagcguucucaccuucaaggugcuggaucuuaagaacuacaucgacaaacagcugcucccgauucugaauaagcaaucuuguuccauccccaacccugaaacagucauggaguuucagcagaaaaauaaccggcugcucgaaauuacccgcgaguucagcgugaaugcuggcgugacgacacccgucucuaccuauaugcugacaaacuccgagcuucugagccucaucaacgauaugccuaucaccaaugaccagaagaaacugauguccaacaauguucaaauugugagacagcagucuuacagcaucaugugcauuaucaaggaagaggugcuugccuaugucgugcagcugccccucuacggcguuauugauaccccuuguuggaaacugcauacauccccgcugugcacgaccaacacaaaggaagggagcaauaucugucucacccggacagaccgcggaugguacugcgauaacgcgggcucuguguccuuuuucccccaagccgagaccuguaaggucugcagcaauagaguguuuugcgacacgaugaacucucugacacuuccuagcgaaguuaaucuguguaacaucgauauuuucaaucccaaauaugacugcaagaucaugaccuccaaaaccgaugugucuagcuccgucauuacaagccucggggcuaucgugucuuguuacggaaagaccaaaugcacagccuccaacaagaauaagggcauuaucaaaacguuuagcaacgggugugacuaugucucuaauaagggaguggacaccguuuccgugggcaacacacuguacuaugucaacaaacaggagggccagagccuuuacgugaagggggagccuaucauuaauuucuaugauccccugguuuuuccguccgacgaauuugaugcuucuaucagccaagugaacgagaaaauuaaucagucccucgccuucauccggaagucugacgaacugcugcacaacgucaaugugggaaagagcaccacaaacauuaugaucaccacgauuaucaucgugauuaucguuauucuccugcuucugaucgccgucggccucuuccuguacugcaaagcucgcugaggacuaguguccaccugucccuccugggcugcuggauugucucguuuuccugccaaauaaacaggaucagcgcuuuacagaucuaaaaaaaaaaaaaaaaaaaaaaaaaaaaaaaaaaaaaaaaaaaaaaaaaaaaaaaaaaaaaaaaugcaucccccccccccccccccccccccccccccccaaaggcucuuuucagagccaccagaauu

SEQ ID NO: 18054 - RNA, 1994 nt, Artificial Sequence
  mRNA product Design b-1 comprising derived and/or modified sequence from HRSV(Memphis-37)__AIY60640.1__F-del_DSCav1_mut6 (opt6)
gggagacggagacggccugcaggaccugcucucucagcccucagccgaggccuacgccgagccgagugcgcagccgacgaccgggaggagccgcagccuucaacucugagguacugugauccgcgcugcccgccgggccgccccaguccgcugcugcggcaccuccuucccucgcgcccucuucgcucgccagcgccuucccugugagccugcgucaccgcggccgccaagcuuaccauggaacuaccuauacuaaaaaccaacgccauaacaacaauacuagccgcaguuacacucugcuuugcauccucacaaaacaucacagaggaauuuuaccaaucuacuugcuccgcaguaucaaaaggauaccuaggagcacuccguacaggaugguacacaucagucauaacaauugaauuaucuaacaucaaagaaaacaaauguaaugguacagacgccaaaguaaaauuaauaaaacaagaacuagacaaauacaaaaacgccguaacagaccuacaaaugcuaaugugcucaacccccgccgcaggaucuggaucagcaauugccucaggcauagcaguaugcaaaguccuacaccuagaaggagaagucaacaaaauaaaaaacgcucuccucucaaccaauaaagcaguaguaucccucucaaacggaguaucaguacuaacauucaaaguacuagaccucaaaaauuauauagacaagcaacuacucccaauauuaaauaaacaauccugcucaauacccaauccagaaacagucauggaauuucaacaaaaaaacaaccgacucuuagaaauaacaagagaauuuucagucaaugccggcgucacaaccccaguaucaacauacaugcuaacaaacucagaacuacuaucacuaaucaacgauaugcccauaaccaacgaccaaaaaaaacuaaugucaaacaauguacaaauuguaagacaacagucuuauucaauaaugugcauaauaaaagaagaagucuuagcauauguaguacaacuaccacuauacggaguaauagacacaccauguuggaaauuacacacauccccacuauguaccaccaacacaaaagaaggaucuaacauaugccuaaccagaacagaccgaggcugguauugcgacaaugcaggaucaguauccuucuuuccacaagcagaaacaugcaaagucugcucuaacagaguauucugcgauacuaugaacucacuuaccuuaccaucagaaguaaaucuauguaauaucgacauauucaaucccaaauaugauugcaaaauaaugaccucaaaaacagauguaucaucaucagucauaacaucacuaggagcaauagucagcugcuaugggaaaacaaaaugcacagcuuccaacaaaaacaaaggaaucauaaaaacauucucaaaugguugugacuacguauccaacaaaggaguagauacaguaucuguaggcaacacauuauacuauguaaauaaacaagaaggacaaagccuauacgucaaaggagaacccaucauaaauuucuaugacccauuaguuuucccaucugacgaauuugacgcuuccaucucccaaguaaaugaaaaaaucaaccaaagccucgcauucauucgcaaaucugacgaauuacuccacaacguaaacguaggaaaauccacaacaaacauuaugaucaccaccauaauaaucguaauaauagucauauuacuacuccucauagcaguaggacuauuccuauacuguaaagcuagauaaggacuaguguccaccugucccuccugggcugcuggauugucucguuuuccugccaaauaaacaggaucagcgcuuuacagaucuaaaaaaaaaaaaaaaaaaaaaaaaaaaaaaaaaaaaaaaaaaaaaaaaaaaaaaaaaaaaaaaaugcaucccccccccccccccccccccccccccccccaaaggcucuuuucagagccaccagaauu

SEQ ID NO: 18055 - RNA, 1994 nt, Artificial Sequence
  mRNA product Design b-1 comprising derived and/or modified sequence from HRSV(Memphis-37)__AIY60640.1__F-del_DSCav1_mut6 (opt11)
gggagacggagacggccugcaggaccugcucucucagcccucagccgaggccuacgccgagccgagugcgcagccgacgaccgggaggagccgcagccuucaacucugagguacugugauccgcgcugcccgccgggccgccccaguccgcugcugcggcaccuccuucccucgcgcccucuucgcucgccagcgccuucccugugagccugcgucaccgcggccgccaagcuuaccauggaauuaccaauccucaaaacuaacgccaucaccaccauccucgcugccgucacccucugcuucgccuccagccaaaacaucacagaagaguucuaccaaagcacaugcuccgcugucuccaaaggcuaccuuggcgcccuccgcaccggcugguacaccucaguaauuaccauugaacuaagcaacaucaaagaaaauaaaugcaacggcaccgacgccaaaguuaaacucauaaaacaggaacucgacaaauacaaaaacgccguaacagaccuccaaaugcucaugugcuccacccccgccgccggcucaggcuccgccaucgcaagcggaauagcaguuugcaaaguccuccaccuagaaggcgaggucaacaagauuaaaaacgcacuucucucaaccaacaaggccgucguaucacucucaaacggcgucuccguccucaccuucaaaguucuggaccucaaaaacuacaucgauaaacaacuacucccaauacuuaacaaacaaucaugcuccaucccaaaccccgaaaccgucauggaguuccaacagaaaaacaaccgccuacuggaaaucacacgcgaguucagcguaaacgcuggcgucacuacacccgucuccaccuacaugcucaccaauucugaacuccuaucacucauaaacgacaugcccauuaccaacgaccaaaagaaacuaaugucaaacaacguccaaaucguaagacaacaaucguauuccaucaugugcauaauuaaagaagaaguucucgccuacgugguccaacuaccccucuacggagucauagacacuccuuguuggaaacuccacaccucuccccucugcacuaccaacacaaaagaaggcuccaacaucugccucacccgaaccgacagaggcugguacugcgacaacgccggcuccgucuccuucuucccccaagccgaaaccugcaaagucugcuccaaccgcguuuucugcgacaccaugaacucccucacacuccccuccgaagucaaccuauguaacauagacauauucaacccaaaauacgacugcaaaaucaugacauccaaaaccgacgugucuuccucggucaucaccucccucggcgccaucgucucaugcuacggcaaaacuaaaugcaccgcauccaacaaaaacaaaggcauaaucaaaacauucuccaacggcugcgacuacguuucuaacaaaggcgucgauaccgucuccgucggaaacacccucuacuacguaaacaagcaagaaggccagucccuauacguaaaaggagaaccaauuaucaacuucuacgacccccuagucuuccccuccgacgaguucgacgccuccauaucccaagucaacgagaaaaucaaccaaucccuagccuucauccgcaaaucagacgaacuccuccacaacgucaacgucggaaaauccacaacuaacaucaugaucaccaccaucauuaucgucaucauaguuauacuccuccuccucauagccgucggccucuuccuauacugcaaagcucgcuaaggacuaguguccaccugucccuccugggcugcuggauugucucguuuuccugccaaauaaacaggaucagcgcuuuacagaucuaaaaaaaaaaaaaaaaaaaaaaaaaaaaaaaaaaaaaaaaaaaaaaaaaaaaaaaaaaaaaaaaugcaucccccccccccccccccccccccccccccccaaaggcucuuuucagagccaccagaauu

SEQ ID NO: 18056 - RNA, 1814 nt, Artificial Sequence
  mRNA product Design b-2 comprising derived and/or modified sequence from HRSV(Memphis-37)__AIY60640.1__F-del_DSCav1_mut6 (opt1)
gggagagccucugcuggaguccggggaguggcguuggcugcuagagcgaagcuuaccauggagcugcccauccucaagaccaacgccaucaccacgauccuggccgcggugacccugugcuucgccagcucccagaacaucaccgaggaguucuaccagagcacgugcuccgccgucagcaagggcuaccucggcgcccugcgcaccgggugguacaccagcgugaucaccaucgagcuguccaacaucaaggagaacaagugcaacggcaccgacgccaaggugaagcucaucaagcaggagcuggacaaguacaagaacgcggucacggaccugcagaugcugaugugcagcaccccggccgccggcuccgggagcgcgaucgccuccggcaucgccgucugcaaggugcugcaccucgagggcgaggugaacaagaucaagaacgcccugcuguccaccaacaaggccgucgugagccucuccaacggggugagcguccugaccuucaaggugcuggaccucaagaacuacaucgacaagcagcugcugcccauccugaacaagcagagcugcuccauccccaaccccgagaccgucauggaguuccagcagaagaacaaccgccuccuggagaucacgcgggaguucagcgugaacgcgggcgugaccacccccgucuccaccuacaugcugacgaacagcgagcuccugucccugaucaacgacaugccgaucaccaacgaccagaagaagcucaugagcaacaacgugcagaucgugcgccagcaguccuacagcaucaugugcaucaucaaggaggagguccuggccuacguggugcagcugccccucuacggggucaucgacacccccugcuggaagcugcacaccagcccccugugcacgaccaacaccaaggagggcuccaacaucugccucacccggacggaccgcgggugguacugcgacaacgccggcagcguguccuucuucccgcaggccgagaccugcaaggucugcagcaaccggguguucugcgacaccaugaacucccugacccugcccagcgaggugaaccucugcaacaucgacaucuucaaccccaaguacgacugcaagaucaugacguccaagaccgacgucagcuccagcgugaucaccucccugggcgccaucgugagcugcuacgggaagaccaagugcacggcgagcaacaagaacaagggcaucaucaagaccuucuccaacgggugcgacuacgucagcaacaagggcguggacaccguguccgucggcaacacccuguacuacgugaacaagcaggagggccagagccucuacgugaagggggagcccaucaucaacuucuacgacccgcuggucuuccccuccgacgaguucgacgccagcaucucccaggugaacgagaagaucaaccagagccuggccuucauccggaaguccgacgagcuccugcacaacgugaacgucggcaagagcaccacgaacaucaugaucaccaccaucaucaucgugaucaucgugauccugcugcuccugaucgccgucgggcuguuccucuacugcaaggcccgcugaggacuaguguccaccugucccuccugggcugcuggauugucucguuuuccugccaaauaaacaggaucagcgcuuuacagaucuaaaaaaaaaaaaaaaaaaaaaaaaaaaaaaaaaaaaaaaaaaaaaaaaaaaaaaaaaaaaaaaaugcaucccccccccccccccccccccccccccccccaaaggcucuuuucagagccaccagaauu

SEQ ID NO: 18057 - RNA, 1814 nt, Artificial Sequence
  mRNA product Design b-2 comprising derived and/or modified sequence from HRSV(Memphis-37)__AIY60640.1__F-del_DSCav1_mut6 (opt1)
gggagagccucugcuggaguccggggaguggcguuggcugcuagagcgaagcuuaccauggagcugcccauccucaagaccaacgccaucaccacgauccuggccgcggugacccugugcuucgccagcucccagaacaucaccgaggaguucuaccagagcacgugcuccgccgucagcaagggcuaccucggggcccugcgcaccggcugguacaccuccgugaucaccaucgagcugagcaacaucaaggagaacaagugcaacgggaccgacgccaaggugaagcucaucaagcaggagcuggacaaguacaagaacgcggucacggaccugcagaugcucaugugcuccaccccggccgccggcagcggguccgccaucgcgagcggcaucgccgugugcaaggugcugcaccuggagggcgaggucaacaagaucaagaacgcccuccuguccaccaacaaggccguggugagccuguccaacggggucagcgugcucaccuucaaggugcuggaccugaagaacuacaucgacaagcagcuccugcccauccugaacaagcaguccugcagcauccccaaccccgagacggucauggaguuccagcagaagaacaaccggcuccuggagaucacccgcgaguucuccgugaacgccggcgugaccaccccggucagcacguacaugcugaccaacuccgagcuccugagccugaucaacgacaugcccaucaccaacgaccagaagaagcucaugagcaacaacgugcagaucgugcggcagcaguccuacagcaucaugugcaucaucaaggaggagguccuggcguacguggugcagcugccccucuacggggucaucgacacccccugcuggaagcugcacacguccccgcugugcaccaccaacaccaaggagggcagcaacaucugccucacgcgcaccgaccgggggugguacugcgacaacgccggcuccgugagcuucuucccccaggccgagaccugcaaggugugcuccaaccgcgucuucugcgacaccaugaacagccugacgcugcccuccgaggugaaccucugcaacaucgacaucuucaaccccaaguacgacugcaagaucaugaccagcaagaccgacgucuccagcuccgugaucaccagccugggcgccaucguguccugcuacgggaagacgaagugcaccgccagcaacaagaacaagggcaucaucaagaccuucuccaacgggugcgacuacgucagcaacaagggcguggacaccguguccgucggcaacacgcuguacuacgugaacaagcaggaggggcagagccucuacgugaagggcgagccgaucaucaacuucuacgacccccuggucuuccccagcgacgaguucgacgcguccaucagccaggugaacgagaagaucaaccagucccuggccuucauccgcaagagcgacgagcuccugcacaacgugaacgucgggaaguccaccaccaacaucaugaucaccaccaucaucaucgugaucaucgugauccugcuccugcugaucgccgucggccucuuccuguacugcaaggcccggugaggacuaguguccaccugucccuccugggcugcuggauugucucguuuuccugccaaauaaacaggaucagcgcuuuacagaucuaaaaaaaaaaaaaaaaaaaaaaaaaaaaaaaaaaaaaaaaaaaaaaaaaaaaaaaaaaaaaaaaugcaucccccccccccccccccccccccccccccccaaaggcucuuuucagagccaccagaauu

SEQ ID NO: 18058 - RNA, 1814 nt, Artificial Sequence
  mRNA product Design b-2 comprising derived and/or modified sequence from HRSV(Memphis-37)__AIY60640.1__F-del_DSCav1_mut6 (opt2)
gggagagccucugcuggaguccggggaguggcguuggcugcuagagcgaagcuuaccauggagcuccccauccucaagaccaacgccaucaccaccauccucgccgccgucacccucugcuucgccuccucccagaacaucaccgaggaguucuaccaguccaccugcuccgccgucuccaagggcuaccucggcgcccuccgcaccggcugguacaccuccgucaucaccaucgagcucuccaacaucaaggagaacaagugcaacggcaccgacgccaaggucaagcucaucaagcaggagcucgacaaguacaagaacgccgucaccgaccuccagaugcucaugugcuccacccccgccgccggcuccggcuccgccaucgccuccggcaucgccgucugcaagguccuccaccucgagggcgaggucaacaagaucaagaacgcccuccucuccaccaacaaggccgucgucucccucuccaacggcgucuccguccucaccuucaagguccucgaccucaagaacuacaucgacaagcagcuccuccccauccucaacaagcaguccugcuccauccccaaccccgagaccgucauggaguuccagcagaagaacaaccgccuccucgagaucacccgcgaguucuccgucaacgccggcgucaccacccccgucuccaccuacaugcucaccaacuccgagcuccucucccucaucaacgacaugcccaucaccaacgaccagaagaagcucauguccaacaacguccagaucguccgccagcaguccuacuccaucaugugcaucaucaaggaggagguccucgccuacgucguccagcucccccucuacggcgucaucgacacccccugcuggaagcuccacaccuccccccucugcaccaccaacaccaaggagggcuccaacaucugccucacccgcaccgaccgcggcugguacugcgacaacgccggcuccgucuccuucuucccccaggccgagaccugcaaggucugcuccaaccgcgucuucugcgacaccaugaacucccucacccuccccuccgaggucaaccucugcaacaucgacaucuucaaccccaaguacgacugcaagaucaugaccuccaagaccgacgucuccuccuccgucaucaccucccucggcgccaucgucuccugcuacggcaagaccaagugcaccgccuccaacaagaacaagggcaucaucaagaccuucuccaacggcugcgacuacgucuccaacaagggcgucgacaccgucuccgucggcaacacccucuacuacgucaacaagcaggagggccagucccucuacgucaagggcgagcccaucaucaacuucuacgacccccucgucuuccccuccgacgaguucgacgccuccaucucccaggucaacgagaagaucaaccagucccucgccuucauccgcaaguccgacgagcuccuccacaacgucaacgucggcaaguccaccaccaacaucaugaucaccaccaucaucaucgucaucaucgucauccuccuccuccucaucgccgucggccucuuccucuacugcaaggcccgcugaggacuaguguccaccugucccuccugggcugcuggauugucucguuuuccugccaaauaaacaggaucagcgcuuuacagaucuaaaaaaaaaaaaaaaaaaaaaaaaaaaaaaaaaaaaaaaaaaaaaaaaaaaaaaaaaaaaaaaaugcaucccccccccccccccccccccccccccccccaaaggcucuuuucagagccaccagaauu

SEQ ID NO: 18059 - RNA, 1814 nt, Artificial Sequence
  mRNA product Design b-2 comprising derived and/or modified sequence from HRSV(Memphis-37)__AIY60640.1__F-del_DSCav1_mut6 (opt3)
gggagagccucugcuggaguccggggaguggcguuggcugcuagagcgaagcuuaccauggagcugcccauccucaagaccaacgccauuacaacuauacuugcugcagugacgcugugcuucgccagcucccagaauaucaccgaagaguuuuaccaaucuacauguucagcggucaguaaaggcuauuugggggcuuuaagaacuggaugguacaccagcguuauuacaaucgaacuguccaacauuaaggagaauaaaugcaacgguaccgacgccaaggugaaacuaaucaagcaggaacucgauaaguauaaaaaugcaguaacugaccugcagaugcuuauguguucuacuccugccgcuggcucggggucagcaauagccagcggaaucgcugugugcaagguccugcacuuggagggcgaggugaacaaaauuaagaaugcccuccugaguaccaacaaagcgguugugucccugucuaauggugucagcgugcucacguucaagguauuagaucugaagaacuacaucgacaaacagcuuuugccaauucugaauaagcaauccuguucaaucccgaaccccgaaacuguuauggaguuucagcagaaaaauaacaggcuacucgaaauaacccgggaguucagugugaaugcaggggucacaacuccugugagcaccuauaugcugacaaacucugagcuucuguccuugauuaacgauaugccaaucaccaaugaccagaagaaacucaugucaaacaaugugcaaauuguccgccagcagagcuacaguaucaugugcaucauuaaggaagagguucuggccuaugugguacaguuaccccuguacggagugauagauacgccuuguuggaaacuccauacuucuccacuuugcacaaccaacacuaaggaaggcuccaauaucugucugacacgaaccgaccguggcugguacugcgauaacgcugggagcgucucguuuuucccccaagccgagacguguaaggugugcucuaauagaguuuucugcgacaccaugaacuccuugacacuaccuucagaagugaaucuguguaacauugauaucuucaauccaaaauaugacugcaagauaaugacaaguaaaaccgaugucagcuccucugugauuacaagccucggagcaaucguaucauguuacgguaagacuaaaugcaccgcuaguaacaagaauaagggcaucauuaaaacauuuuccaacgggugugacuauguuagcaauaagggaguggacaccgucucugugggcaacacucuguacuaugucaacaaacaggagggucagucacuuuacgugaagggggagccgaucauuaauuucuaugauccccugguuuuuccuagugacgaauuugaugccagcauaucccaagugaacgagaaaaucaaucagucuuuggcguuuauuaggaagucggacgaacuccugcacaacguaaaugucggaaagagcacgacaaacaucaugaucaccacuauuauaaucgugauuaucguuauuuuacugcuacucaucgccgugggccuguuccuuuacugcaaagcacggugaggacuaguguccaccugucccuccugggcugcuggauugucucguuuuccugccaaauaaacaggaucagcgcuuuacagaucuaaaaaaaaaaaaaaaaaaaaaaaaaaaaaaaaaaaaaaaaaaaaaaaaaaaaaaaaaaaaaaaaugcaucccccccccccccccccccccccccccccccaaaggcucuuuucagagccaccagaauu

SEQ ID NO: 18060 - RNA, 1814 nt, Artificial Sequence
  mRNA product Design b-2 comprising derived and/or modified sequence from HRSV(Memphis-37)__AIY60640.1__F-del_DSCav1_mut6 (opt4)
gggagagccucugcuggaguccggggaguggcguuggcugcuagagcgaagcuuaccauggagcugcccauccugaagaccaacgccaucaccaccauccuggccgccgugacccugugcuucgccagcagccagaacaucaccgaggaguucuaccagagcaccugcagcgccgugagcaagggcuaccugggcgcccugagaaccggcugguacaccagcgugaucaccaucgagcugagcaacaucaaggagaacaagugcaacggcaccgacgccaaggugaagcugaucaagcaggagcuggacaaguacaagaacgccgugaccgaccugcagaugcugaugugcagcacccccgccgccggcagcggcagcgccaucgccagcggcaucgccgugugcaaggugcugcaccuggagggcgaggugaacaagaucaagaacgcccugcugagcaccaacaaggccguggugagccugagcaacggcgugagcgugcugaccuucaaggugcuggaccugaagaacuacaucgacaagcagcugcugcccauccugaacaagcagagcugcagcauccccaaccccgagaccgugauggaguuccagcagaagaacaacagacugcuggagaucaccagagaguucagcgugaacgccggcgugaccacccccgugagcaccuacaugcugaccaacagcgagcugcugagccugaucaacgacaugcccaucaccaacgaccagaagaagcugaugagcaacaacgugcagaucgugagacagcagagcuacagcaucaugugcaucaucaaggaggaggugcuggccuacguggugcagcugccccuguacggcgugaucgacacccccugcuggaagcugcacaccagcccccugugcaccaccaacaccaaggagggcagcaacaucugccugaccagaaccgacagaggcugguacugcgacaacgccggcagcgugagcuucuucccccaggccgagaccugcaaggugugcagcaacagaguguucugcgacaccaugaacagccugacccugcccagcgaggugaaccugugcaacaucgacaucuucaaccccaaguacgacugcaagaucaugaccagcaagaccgacgugagcagcagcgugaucaccagccugggcgccaucgugagcugcuacggcaagaccaagugcaccgccagcaacaagaacaagggcaucaucaagaccuucagcaacggcugcgacuacgugagcaacaagggcguggacaccgugagcgugggcaacacccuguacuacgugaacaagcaggagggccagagccuguacgugaagggcgagcccaucaucaacuucuacgacccccugguguuccccagcgacgaguucgacgccagcaucagccaggugaacgagaagaucaaccagagccuggccuucaucagaaagagcgacgagcugcugcacaacgugaacgugggcaagagcaccaccaacaucaugaucaccaccaucaucaucgugaucaucgugauccugcugcugcugaucgccgugggccuguuccuguacugcaaggccagaugaggacuaguguccaccugucccuccugggcugcuggauugucucguuuuccugccaaauaaacaggaucagcgcuuuacagaucuaaaaaaaaaaaaaaaaaaaaaaaaaaaaaaaaaaaaaaaaaaaaaaaaaaaaaaaaaaaaaaaaugcaucccccccccccccccccccccccccccccccaaaggcucuuuucagagccaccagaauu

SEQ ID NO: 18061 - RNA, 1814 nt, Artificial Sequence
  mRNA product Design b-2 comprising derived and/or modified sequence from HRSV(Memphis-37)__AIY60640.1__F-del_DSCav1_mut6 (opt5)
gggagagccucugcuggaguccggggaguggcguuggcugcuagagcgaagcuuaccauggagcugcccauccucaagaccaacgccauuacaacgauccuggcugccgugacccuuugcuucgcgagcucccagaauauuacagaagaguuuuaccaaucuaccuguagcgcugucuccaaaggcuaucugggggcccucagaacaggaugguacaccucuguuaucacaauugaacugagcaacaucaaggagaauaaaugcaacggcaccgacgccaaggugaaacuuaucaagcaggaacuggauaaguauaaaaaugcugugacggaccuccagaugcugauguguuccaccccugccgcugggucuggaagcgccauugcguccggcaucgccgucugcaaggugcugcaccucgagggggagguuaacaaaauuaagaaugcucugcuuagcacaaacaaagccguggucucucuguccaauggagugagcguucucaccuucaaggugcuggaucuuaagaacuacaucgacaaacagcugcucccgauucugaauaagcaaucuuguuccauccccaacccugaaacagucauggaguuucagcagaaaaauaaccggcugcucgaaauuacccgcgaguucagcgugaaugcuggcgugacgacacccgucucuaccuauaugcugacaaacuccgagcuucugagccucaucaacgauaugccuaucaccaaugaccagaagaaacugauguccaacaauguucaaauugugagacagcagucuuacagcaucaugugcauuaucaaggaagaggugcuugccuaugucgugcagcugccccucuacggcguuauugauaccccuuguuggaaacugcauacauccccgcugugcacgaccaacacaaaggaagggagcaauaucugucucacccggacagaccgcggaugguacugcgauaacgcgggcucuguguccuuuuucccccaagccgagaccuguaaggucugcagcaauagaguguuuugcgacacgaugaacucucugacacuuccuagcgaaguuaaucuguguaacaucgauauuuucaaucccaaauaugacugcaagaucaugaccuccaaaaccgaugugucuagcuccgucauuacaagccucggggcuaucgugucuuguuacggaaagaccaaaugcacagccuccaacaagaauaagggcauuaucaaaacguuuagcaacgggugugacuaugucucuaauaagggaguggacaccguuuccgugggcaacacacuguacuaugucaacaaacaggagggccagagccuuuacgugaagggggagccuaucauuaauuucuaugauccccugguuuuuccguccgacgaauuugaugcuucuaucagccaagugaacgagaaaauuaaucagucccucgccuucauccggaagucugacgaacugcugcacaacgucaaugugggaaagagcaccacaaacauuaugaucaccacgauuaucaucgugauuaucguuauucuccugcuucugaucgccgucggccucuuccuguacugcaaagcucgcugaggacuaguguccaccugucccuccugggcugcuggauugucucguuuuccugccaaauaaacaggaucagcgcuuuacagaucuaaaaaaaaaaaaaaaaaaaaaaaaaaaaaaaaaaaaaaaaaaaaaaaaaaaaaaaaaaaaaaaaugcaucccccccccccccccccccccccccccccccaaaggcucuuuucagagccaccagaauu

SEQ ID NO: 18062 - RNA, 1814 nt, Artificial Sequence
  mRNA product Design b-2 comprising derived and/or modified sequence from HRSV(Memphis-37)__AIY60640.1__F-del_DSCav1_mut6 (opt6)
gggagagccucugcuggaguccggggaguggcguuggcugcuagagcgaagcuuaccauggaacuaccuauacuaaaaaccaacgccauaacaacaauacuagccgcaguuacacucugcuuugcauccucacaaaacaucacagaggaauuuuaccaaucuacuugcuccgcaguaucaaaaggauaccuaggagcacuccguacaggaugguacacaucagucauaacaauugaauuaucuaacaucaaagaaaacaaauguaaugguacagacgccaaaguaaaauuaauaaaacaagaacuagacaaauacaaaaacgccguaacagaccuacaaaugcuaaugugcucaacccccgccgcaggaucuggaucagcaauugccucaggcauagcaguaugcaaaguccuacaccuagaaggagaagucaacaaaauaaaaaacgcucuccucucaaccaauaaagcaguaguaucccucucaaacggaguaucaguacuaacauucaaaguacuagaccucaaaaauuauauagacaagcaacuacucccaauauuaaauaaacaauccugcucaauacccaauccagaaacagucauggaauuucaacaaaaaaacaaccgacucuuagaaauaacaagagaauuuucagucaaugccggcgucacaaccccaguaucaacauacaugcuaacaaacucagaacuacuaucacuaaucaacgauaugcccauaaccaacgaccaaaaaaaacuaaugucaaacaauguacaaauuguaagacaacagucuuauucaauaaugugcauaauaaaagaagaagucuuagcauauguaguacaacuaccacuauacggaguaauagacacaccauguuggaaauuacacacauccccacuauguaccaccaacacaaaagaaggaucuaacauaugccuaaccagaacagaccgaggcugguauugcgacaaugcaggaucaguauccuucuuuccacaagcagaaacaugcaaagucugcucuaacagaguauucugcgauacuaugaacucacuuaccuuaccaucagaaguaaaucuauguaauaucgacauauucaaucccaaauaugauugcaaaauaaugaccucaaaaacagauguaucaucaucagucauaacaucacuaggagcaauagucagcugcuaugggaaaacaaaaugcacagcuuccaacaaaaacaaaggaaucauaaaaacauucucaaaugguugugacuacguauccaacaaaggaguagauacaguaucuguaggcaacacauuauacuauguaaauaaacaagaaggacaaagccuauacgucaaaggagaacccaucauaaauuucuaugacccauuaguuuucccaucugacgaauuugacgcuuccaucucccaaguaaaugaaaaaaucaaccaaagccucgcauucauucgcaaaucugacgaauuacuccacaacguaaacguaggaaaauccacaacaaacauuaugaucaccaccauaauaaucguaauaauagucauauuacuacuccucauagcaguaggacuauuccuauacuguaaagcuagauaaggacuaguguccaccugucccuccugggcugcuggauugucucguuuuccugccaaauaaacaggaucagcgcuuuacagaucuaaaaaaaaaaaaaaaaaaaaaaaaaaaaaaaaaaaaaaaaaaaaaaaaaaaaaaaaaaaaaaaaugcaucccccccccccccccccccccccccccccccaaaggcucuuuucagagccaccagaauu

SEQ ID NO: 18063 - RNA, 1814 nt, Artificial Sequence
  mRNA product Design b-2 comprising derived and/or modified sequence from HRSV(Memphis-37)__AIY60640.1__F-del_DSCav1_mut6 (opt11)
gggagagccucugcuggaguccggggaguggcguuggcugcuagagcgaagcuuaccauggaauuaccaauccucaaaacuaacgccaucaccaccauccucgcugccgucacccucugcuucgccuccagccaaaacaucacagaagaguucuaccaaagcacaugcuccgcugucuccaaaggcuaccuuggcgcccuccgcaccggcugguacaccucaguaauuaccauugaacuaagcaacaucaaagaaaauaaaugcaacggcaccgacgccaaaguuaaacucauaaaacaggaacucgacaaauacaaaaacgccguaacagaccuccaaaugcucaugugcuccacccccgccgccggcucaggcuccgccaucgcaagcggaauagcaguuugcaaaguccuccaccuagaaggcgaggucaacaagauuaaaaacgcacuucucucaaccaacaaggccgucguaucacucucaaacggcgucuccguccucaccuucaaaguucuggaccucaaaaacuacaucgauaaacaacuacucccaauacuuaacaaacaaucaugcuccaucccaaaccccgaaaccgucauggaguuccaacagaaaaacaaccgccuacuggaaaucacacgcgaguucagcguaaacgcuggcgucacuacacccgucuccaccuacaugcucaccaauucugaacuccuaucacucauaaacgacaugcccauuaccaacgaccaaaagaaacuaaugucaaacaacguccaaaucguaagacaacaaucguauuccaucaugugcauaauuaaagaagaaguucucgccuacgugguccaacuaccccucuacggagucauagacacuccuuguuggaaacuccacaccucuccccucugcacuaccaacacaaaagaaggcuccaacaucugccucacccgaaccgacagaggcugguacugcgacaacgccggcuccgucuccuucuucccccaagccgaaaccugcaaagucugcuccaaccgcguuuucugcgacaccaugaacucccucacacuccccuccgaagucaaccuauguaacauagacauauucaacccaaaauacgacugcaaaaucaugacauccaaaaccgacgugucuuccucggucaucaccucccucggcgccaucgucucaugcuacggcaaaacuaaaugcaccgcauccaacaaaaacaaaggcauaaucaaaacauucuccaacggcugcgacuacguuucuaacaaaggcgucgauaccgucuccgucggaaacacccucuacuacguaaacaagcaagaaggccagucccuauacguaaaaggagaaccaauuaucaacuucuacgacccccuagucuuccccuccgacgaguucgacgccuccauaucccaagucaacgagaaaaucaaccaaucccuagccuucauccgcaaaucagacgaacuccuccacaacgucaacgucggaaaauccacaacuaacaucaugaucaccaccaucauuaucgucaucauaguuauacuccuccuccucauagccgucggccucuuccuauacugcaaagcucgcuaaggacuaguguccaccugucccuccugggcugcuggauugucucguuuuccugccaaauaaacaggaucagcgcuuuacagaucuaaaaaaaaaaaaaaaaaaaaaaaaaaaaaaaaaaaaaaaaaaaaaaaaaaaaaaaaaaaaaaaaugcaucccccccccccccccccccccccccccccccaaaggcucuuuucagagccaccagaauu

SEQ ID NO: 18064 - RNA, 1834 nt, Artificial Sequence
  mRNA product Design b-3 comprising derived and/or modified sequence from HRSV(Memphis-37)__AIY60640.1__F-del_DSCav1_mut6 (opt1)
gggagagucccgcagucggcguccagcggcucugcuuguucgugugugugucguugcaggccuuauucaagcuuaccauggagcugcccauccucaagaccaacgccaucaccacgauccuggccgcggugacccugugcuucgccagcucccagaacaucaccgaggaguucuaccagagcacgugcuccgccgucagcaagggcuaccucggcgcccugcgcaccgggugguacaccagcgugaucaccaucgagcuguccaacaucaaggagaacaagugcaacggcaccgacgccaaggugaagcucaucaagcaggagcuggacaaguacaagaacgcggucacggaccugcagaugcugaugugcagcaccccggccgccggcuccgggagcgcgaucgccuccggcaucgccgucugcaaggugcugcaccucgagggcgaggugaacaagaucaagaacgcccugcuguccaccaacaaggccgucgugagccucuccaacggggugagcguccugaccuucaaggugcuggaccucaagaacuacaucgacaagcagcugcugcccauccugaacaagcagagcugcuccauccccaaccccgagaccgucauggaguuccagcagaagaacaaccgccuccuggagaucacgcgggaguucagcgugaacgcgggcgugaccacccccgucuccaccuacaugcugacgaacagcgagcuccugucccugaucaacgacaugccgaucaccaacgaccagaagaagcucaugagcaacaacgugcagaucgugcgccagcaguccuacagcaucaugugcaucaucaaggaggagguccuggccuacguggugcagcugccccucuacggggucaucgacacccccugcuggaagcugcacaccagcccccugugcacgaccaacaccaaggagggcuccaacaucugccucacccggacggaccgcgggugguacugcgacaacgccggcagcguguccuucuucccgcaggccgagaccugcaaggucugcagcaaccggguguucugcgacaccaugaacucccugacccugcccagcgaggugaaccucugcaacaucgacaucuucaaccccaaguacgacugcaagaucaugacguccaagaccgacgucagcuccagcgugaucaccucccugggcgccaucgugagcugcuacgggaagaccaagugcacggcgagcaacaagaacaagggcaucaucaagaccuucuccaacgggugcgacuacgucagcaacaagggcguggacaccguguccgucggcaacacccuguacuacgugaacaagcaggagggccagagccucuacgugaagggggagcccaucaucaacuucuacgacccgcuggucuuccccuccgacgaguucgacgccagcaucucccaggugaacgagaagaucaaccagagccuggccuucauccggaaguccgacgagcuccugcacaacgugaacgucggcaagagcaccacgaacaucaugaucaccaccaucaucaucgugaucaucgugauccugcugcuccugaucgccgucgggcuguuccucuacugcaaggcccgcugaggacuaguguccaccugucccuccugggcugcuggauugucucguuuuccugccaaauaaacaggaucagcgcuuuacagaucuaaaaaaaaaaaaaaaaaaaaaaaaaaaaaaaaaaaaaaaaaaaaaaaaaaaaaaaaaaaaaaaaugcaucccccccccccccccccccccccccccccccaaaggcucuuuucagagccaccagaauu

SEQ ID NO: 18065 - RNA, 1834 nt, Artificial Sequence
  mRNA product Design b-3 comprising derived and/or modified sequence from HRSV(Memphis-37)__AIY60640.1__F-del_DSCav1_mut6 (opt1)
gggagagucccgcagucggcguccagcggcucugcuuguucgugugugugucguugcaggccuuauucaagcuuaccauggagcugcccauccucaagaccaacgccaucaccacgauccuggccgcggugacccugugcuucgccagcucccagaacaucaccgaggaguucuaccagagcacgugcuccgccgucagcaagggcuaccucggggcccugcgcaccggcugguacaccuccgugaucaccaucgagcugagcaacaucaaggagaacaagugcaacgggaccgacgccaaggugaagcucaucaagcaggagcuggacaaguacaagaacgcggucacggaccugcagaugcucaugugcuccaccccggccgccggcagcggguccgccaucgcgagcggcaucgccgugugcaaggugcugcaccuggagggcgaggucaacaagaucaagaacgcccuccuguccaccaacaaggccguggugagccuguccaacggggucagcgugcucaccuucaaggugcuggaccugaagaacuacaucgacaagcagcuccugcccauccugaacaagcaguccugcagcauccccaaccccgagacggucauggaguuccagcagaagaacaaccggcuccuggagaucacccgcgaguucuccgugaacgccggcgugaccaccccggucagcacguacaugcugaccaacuccgagcuccugagccugaucaacgacaugcccaucaccaacgaccagaagaagcucaugagcaacaacgugcagaucgugcggcagcaguccuacagcaucaugugcaucaucaaggaggagguccuggcguacguggugcagcugccccucuacggggucaucgacacccccugcuggaagcugcacacguccccgcugugcaccaccaacaccaaggagggcagcaacaucugccucacgcgcaccgaccgggggugguacugcgacaacgccggcuccgugagcuucuucccccaggccgagaccugcaaggugugcuccaaccgcgucuucugcgacaccaugaacagccugacgcugcccuccgaggugaaccucugcaacaucgacaucuucaaccccaaguacgacugcaagaucaugaccagcaagaccgacgucuccagcuccgugaucaccagccugggcgccaucguguccugcuacgggaagacgaagugcaccgccagcaacaagaacaagggcaucaucaagaccuucuccaacgggugcgacuacgucagcaacaagggcguggacaccguguccgucggcaacacgcuguacuacgugaacaagcaggaggggcagagccucuacgugaagggcgagccgaucaucaacuucuacgacccccuggucuuccccagcgacgaguucgacgcguccaucagccaggugaacgagaagaucaaccagucccuggccuucauccgcaagagcgacgagcuccugcacaacgugaacgucgggaaguccaccaccaacaucaugaucaccaccaucaucaucgugaucaucgugauccugcuccugcugaucgccgucggccucuuccuguacugcaaggcccggugaggacuaguguccaccugucccuccugggcugcuggauugucucguuuuccugccaaauaaacaggaucagcgcuuuacagaucuaaaaaaaaaaaaaaaaaaaaaaaaaaaaaaaaaaaaaaaaaaaaaaaaaaaaaaaaaaaaaaaaugcaucccccccccccccccccccccccccccccccaaaggcucuuuucagagccaccagaauu

SEQ ID NO: 18066 - RNA, 1834 nt, Artificial Sequence
  mRNA product Design b-3 comprising derived and/or modified sequence from HRSV(Memphis-37)__AIY60640.1__F-del_DSCav1_mut6 (opt2)
gggagagucccgcagucggcguccagcggcucugcuuguucgugugugugucguugcaggccuuauucaagcuuaccauggagcuccccauccucaagaccaacgccaucaccaccauccucgccgccgucacccucugcuucgccuccucccagaacaucaccgaggaguucuaccaguccaccugcuccgccgucuccaagggcuaccucggcgcccuccgcaccggcugguacaccuccgucaucaccaucgagcucuccaacaucaaggagaacaagugcaacggcaccgacgccaaggucaagcucaucaagcaggagcucgacaaguacaagaacgccgucaccgaccuccagaugcucaugugcuccacccccgccgccggcuccggcuccgccaucgccuccggcaucgccgucugcaagguccuccaccucgagggcgaggucaacaagaucaagaacgcccuccucuccaccaacaaggccgucgucucccucuccaacggcgucuccguccucaccuucaagguccucgaccucaagaacuacaucgacaagcagcuccuccccauccucaacaagcaguccugcuccauccccaaccccgagaccgucauggaguuccagcagaagaacaaccgccuccucgagaucacccgcgaguucuccgucaacgccggcgucaccacccccgucuccaccuacaugcucaccaacuccgagcuccucucccucaucaacgacaugcccaucaccaacgaccagaagaagcucauguccaacaacguccagaucguccgccagcaguccuacuccaucaugugcaucaucaaggaggagguccucgccuacgucguccagcucccccucuacggcgucaucgacacccccugcuggaagcuccacaccuccccccucugcaccaccaacaccaaggagggcuccaacaucugccucacccgcaccgaccgcggcugguacugcgacaacgccggcuccgucuccuucuucccccaggccgagaccugcaaggucugcuccaaccgcgucuucugcgacaccaugaacucccucacccuccccuccgaggucaaccucugcaacaucgacaucuucaaccccaaguacgacugcaagaucaugaccuccaagaccgacgucuccuccuccgucaucaccucccucggcgccaucgucuccugcuacggcaagaccaagugcaccgccuccaacaagaacaagggcaucaucaagaccuucuccaacggcugcgacuacgucuccaacaagggcgucgacaccgucuccgucggcaacacccucuacuacgucaacaagcaggagggccagucccucuacgucaagggcgagcccaucaucaacuucuacgacccccucgucuuccccuccgacgaguucgacgccuccaucucccaggucaacgagaagaucaaccagucccucgccuucauccgcaaguccgacgagcuccuccacaacgucaacgucggcaaguccaccaccaacaucaugaucaccaccaucaucaucgucaucaucgucauccuccuccuccucaucgccgucggccucuuccucuacugcaaggcccgcugaggacuaguguccaccugucccuccugggcugcuggauugucucguuuuccugccaaauaaacaggaucagcgcuuuacagaucuaaaaaaaaaaaaaaaaaaaaaaaaaaaaaaaaaaaaaaaaaaaaaaaaaaaaaaaaaaaaaaaaugcaucccccccccccccccccccccccccccccccaaaggcucuuuucagagccaccagaauu

SEQ ID NO: 18067 - RNA, 1834 nt, Artificial Sequence
  mRNA product Design b-3 comprising derived and/or modified sequence from HRSV(Memphis-37)__AIY60640.1__F-del_DSCav1_mut6 (opt3)
gggagagucccgcagucggcguccagcggcucugcuuguucgugugugugucguugcaggccuuauucaagcuuaccauggagcugcccauccucaagaccaacgccauuacaacuauacuugcugcagugacgcugugcuucgccagcucccagaauaucaccgaagaguuuuaccaaucuacauguucagcggucaguaaaggcuauuugggggcuuuaagaacuggaugguacaccagcguuauuacaaucgaacuguccaacauuaaggagaauaaaugcaacgguaccgacgccaaggugaaacuaaucaagcaggaacucgauaaguauaaaaaugcaguaacugaccugcagaugcuuauguguucuacuccugccgcuggcucggggucagcaauagccagcggaaucgcugugugcaagguccugcacuuggagggcgaggugaacaaaauuaagaaugcccuccugaguaccaacaaagcgguugugucccugucuaauggugucagcgugcucacguucaagguauuagaucugaagaacuacaucgacaaacagcuuuugccaauucugaauaagcaauccuguucaaucccgaaccccgaaacuguuauggaguuucagcagaaaaauaacaggcuacucgaaauaacccgggaguucagugugaaugcaggggucacaacuccugugagcaccuauaugcugacaaacucugagcuucuguccuugauuaacgauaugccaaucaccaaugaccagaagaaacucaugucaaacaaugugcaaauuguccgccagcagagcuacaguaucaugugcaucauuaaggaagagguucuggccuaugugguacaguuaccccuguacggagugauagauacgccuuguuggaaacuccauacuucuccacuuugcacaaccaacacuaaggaaggcuccaauaucugucugacacgaaccgaccguggcugguacugcgauaacgcugggagcgucucguuuuucccccaagccgagacguguaaggugugcucuaauagaguuuucugcgacaccaugaacuccuugacacuaccuucagaagugaaucuguguaacauugauaucuucaauccaaaauaugacugcaagauaaugacaaguaaaaccgaugucagcuccucugugauuacaagccucggagcaaucguaucauguuacgguaagacuaaaugcaccgcuaguaacaagaauaagggcaucauuaaaacauuuuccaacgggugugacuauguuagcaauaagggaguggacaccgucucugugggcaacacucuguacuaugucaacaaacaggagggucagucacuuuacgugaagggggagccgaucauuaauuucuaugauccccugguuuuuccuagugacgaauuugaugccagcauaucccaagugaacgagaaaaucaaucagucuuuggcguuuauuaggaagucggacgaacuccugcacaacguaaaugucggaaagagcacgacaaacaucaugaucaccacuauuauaaucgugauuaucguuauuuuacugcuacucaucgccgugggccuguuccuuuacugcaaagcacggugaggacuaguguccaccugucccuccugggcugcuggauugucucguuuuccugccaaauaaacaggaucagcgcuuuacagaucuaaaaaaaaaaaaaaaaaaaaaaaaaaaaaaaaaaaaaaaaaaaaaaaaaaaaaaaaaaaaaaaaugcaucccccccccccccccccccccccccccccccaaaggcucuuuucagagccaccagaauu

SEQ ID NO: 18068 - RNA, 1834 nt, Artificial Sequence
  mRNA product Design b-3 comprising derived and/or modified sequence from HRSV(Memphis-37)__AIY60640.1__F-del_DSCav1_mut6 (opt4)
gggagagucccgcagucggcguccagcggcucugcuuguucgugugugugucguugcaggccuuauucaagcuuaccauggagcugcccauccugaagaccaacgccaucaccaccauccuggccgccgugacccugugcuucgccagcagccagaacaucaccgaggaguucuaccagagcaccugcagcgccgugagcaagggcuaccugggcgcccugagaaccggcugguacaccagcgugaucaccaucgagcugagcaacaucaaggagaacaagugcaacggcaccgacgccaaggugaagcugaucaagcaggagcuggacaaguacaagaacgccgugaccgaccugcagaugcugaugugcagcacccccgccgccggcagcggcagcgccaucgccagcggcaucgccgugugcaaggugcugcaccuggagggcgaggugaacaagaucaagaacgcccugcugagcaccaacaaggccguggugagccugagcaacggcgugagcgugcugaccuucaaggugcuggaccugaagaacuacaucgacaagcagcugcugcccauccugaacaagcagagcugcagcauccccaaccccgagaccgugauggaguuccagcagaagaacaacagacugcuggagaucaccagagaguucagcgugaacgccggcgugaccacccccgugagcaccuacaugcugaccaacagcgagcugcugagccugaucaacgacaugcccaucaccaacgaccagaagaagcugaugagcaacaacgugcagaucgugagacagcagagcuacagcaucaugugcaucaucaaggaggaggugcuggccuacguggugcagcugccccuguacggcgugaucgacacccccugcuggaagcugcacaccagcccccugugcaccaccaacaccaaggagggcagcaacaucugccugaccagaaccgacagaggcugguacugcgacaacgccggcagcgugagcuucuucccccaggccgagaccugcaaggugugcagcaacagaguguucugcgacaccaugaacagccugacccugcccagcgaggugaaccugugcaacaucgacaucuucaaccccaaguacgacugcaagaucaugaccagcaagaccgacgugagcagcagcgugaucaccagccugggcgccaucgugagcugcuacggcaagaccaagugcaccgccagcaacaagaacaagggcaucaucaagaccuucagcaacggcugcgacuacgugagcaacaagggcguggacaccgugagcgugggcaacacccuguacuacgugaacaagcaggagggccagagccuguacgugaagggcgagcccaucaucaacuucuacgacccccugguguuccccagcgacgaguucgacgccagcaucagccaggugaacgagaagaucaaccagagccuggccuucaucagaaagagcgacgagcugcugcacaacgugaacgugggcaagagcaccaccaacaucaugaucaccaccaucaucaucgugaucaucgugauccugcugcugcugaucgccgugggccuguuccuguacugcaaggccagaugaggacuaguguccaccugucccuccugggcugcuggauugucucguuuuccugccaaauaaacaggaucagcgcuuuacagaucuaaaaaaaaaaaaaaaaaaaaaaaaaaaaaaaaaaaaaaaaaaaaaaaaaaaaaaaaaaaaaaaaugcaucccccccccccccccccccccccccccccccaaaggcucuuuucagagccaccagaauu

SEQ ID NO: 18069 - RNA, 1834 nt, Artificial Sequence
  mRNA product Design b-3 comprising derived and/or modified sequence from HRSV(Memphis-37)__AIY60640.1__F-del_DSCav1_mut6 (opt5)
gggagagucccgcagucggcguccagcggcucugcuuguucgugugugugucguugcaggccuuauucaagcuuaccauggagcugcccauccucaagaccaacgccauuacaacgauccuggcugccgugacccuuugcuucgcgagcucccagaauauuacagaagaguuuuaccaaucuaccuguagcgcugucuccaaaggcuaucugggggcccucagaacaggaugguacaccucuguuaucacaauugaacugagcaacaucaaggagaauaaaugcaacggcaccgacgccaaggugaaacuuaucaagcaggaacuggauaaguauaaaaaugcugugacggaccuccagaugcugauguguuccaccccugccgcugggucuggaagcgccauugcguccggcaucgccgucugcaaggugcugcaccucgagggggagguuaacaaaauuaagaaugcucugcuuagcacaaacaaagccguggucucucuguccaauggagugagcguucucaccuucaaggugcuggaucuuaagaacuacaucgacaaacagcugcucccgauucugaauaagcaaucuuguuccauccccaacccugaaacagucauggaguuucagcagaaaaauaaccggcugcucgaaauuacccgcgaguucagcgugaaugcuggcgugacgacacccgucucuaccuauaugcugacaaacuccgagcuucugagccucaucaacgauaugccuaucaccaaugaccagaagaaacugauguccaacaauguucaaauugugagacagcagucuuacagcaucaugugcauuaucaaggaagaggugcuugccuaugucgugcagcugccccucuacggcguuauugauaccccuuguuggaaacugcauacauccccgcugugcacgaccaacacaaaggaagggagcaauaucugucucacccggacagaccgcggaugguacugcgauaacgcgggcucuguguccuuuuucccccaagccgagaccuguaaggucugcagcaauagaguguuuugcgacacgaugaacucucugacacuuccuagcgaaguuaaucuguguaacaucgauauuuucaaucccaaauaugacugcaagaucaugaccuccaaaaccgaugugucuagcuccgucauuacaagccucggggcuaucgugucuuguuacggaaagaccaaaugcacagccuccaacaagaauaagggcauuaucaaaacguuuagcaacgggugugacuaugucucuaauaagggaguggacaccguuuccgugggcaacacacuguacuaugucaacaaacaggagggccagagccuuuacgugaagggggagccuaucauuaauuucuaugauccccugguuuuuccguccgacgaauuugaugcuucuaucagccaagugaacgagaaaauuaaucagucccucgccuucauccggaagucugacgaacugcugcacaacgucaaugugggaaagagcaccacaaacauuaugaucaccacgauuaucaucgugauuaucguuauucuccugcuucugaucgccgucggccucuuccuguacugcaaagcucgcugaggacuaguguccaccugucccuccugggcugcuggauugucucguuuuccugccaaauaaacaggaucagcgcuuuacagaucuaaaaaaaaaaaaaaaaaaaaaaaaaaaaaaaaaaaaaaaaaaaaaaaaaaaaaaaaaaaaaaaaugcaucccccccccccccccccccccccccccccccaaaggcucuuuucagagccaccagaauu

SEQ ID NO: 18070 - RNA, 1834 nt, Artificial Sequence
  mRNA product Design b-3 comprising derived and/or modified sequence from HRSV(Memphis-37)__AIY60640.1__F-del_DSCav1_mut6 (opt6)
gggagagucccgcagucggcguccagcggcucugcuuguucgugugugugucguugcaggccuuauucaagcuuaccauggaacuaccuauacuaaaaaccaacgccauaacaacaauacuagccgcaguuacacucugcuuugcauccucacaaaacaucacagaggaauuuuaccaaucuacuugcuccgcaguaucaaaaggauaccuaggagcacuccguacaggaugguacacaucagucauaacaauugaauuaucuaacaucaaagaaaacaaauguaaugguacagacgccaaaguaaaauuaauaaaacaagaacuagacaaauacaaaaacgccguaacagaccuacaaaugcuaaugugcucaacccccgccgcaggaucuggaucagcaauugccucaggcauagcaguaugcaaaguccuacaccuagaaggagaagucaacaaaauaaaaaacgcucuccucucaaccaauaaagcaguaguaucccucucaaacggaguaucaguacuaacauucaaaguacuagaccucaaaaauuauauagacaagcaacuacucccaauauuaaauaaacaauccugcucaauacccaauccagaaacagucauggaauuucaacaaaaaaacaaccgacucuuagaaauaacaagagaauuuucagucaaugccggcgucacaaccccaguaucaacauacaugcuaacaaacucagaacuacuaucacuaaucaacgauaugcccauaaccaacgaccaaaaaaaacuaaugucaaacaauguacaaauuguaagacaacagucuuauucaauaaugugcauaauaaaagaagaagucuuagcauauguaguacaacuaccacuauacggaguaauagacacaccauguuggaaauuacacacauccccacuauguaccaccaacacaaaagaaggaucuaacauaugccuaaccagaacagaccgaggcugguauugcgacaaugcaggaucaguauccuucuuuccacaagcagaaacaugcaaagucugcucuaacagaguauucugcgauacuaugaacucacuuaccuuaccaucagaaguaaaucuauguaauaucgacauauucaaucccaaauaugauugcaaaauaaugaccucaaaaacagauguaucaucaucagucauaacaucacuaggagcaauagucagcugcuaugggaaaacaaaaugcacagcuuccaacaaaaacaaaggaaucauaaaaacauucucaaaugguugugacuacguauccaacaaaggaguagauacaguaucuguaggcaacacauuauacuauguaaauaaacaagaaggacaaagccuauacgucaaaggagaacccaucauaaauuucuaugacccauuaguuuucccaucugacgaauuugacgcuuccaucucccaaguaaaugaaaaaaucaaccaaagccucgcauucauucgcaaaucugacgaauuacuccacaacguaaacguaggaaaauccacaacaaacauuaugaucaccaccauaauaaucguaauaauagucauauuacuacuccucauagcaguaggacuauuccuauacuguaaagcuagauaaggacuaguguccaccugucccuccugggcugcuggauugucucguuuuccugccaaauaaacaggaucagcgcuuuacagaucuaaaaaaaaaaaaaaaaaaaaaaaaaaaaaaaaaaaaaaaaaaaaaaaaaaaaaaaaaaaaaaaaugcaucccccccccccccccccccccccccccccccaaaggcucuuuucagagccaccagaauu

SEQ ID NO: 18071 - RNA, 1834 nt, Artificial Sequence
  mRNA product Design b-3 comprising derived and/or modified sequence from HRSV(Memphis-37)__AIY60640.1__F-del_DSCav1_mut6 (opt11)
gggagagucccgcagucggcguccagcggcucugcuuguucgugugugugucguugcaggccuuauucaagcuuaccauggaauuaccaauccucaaaacuaacgccaucaccaccauccucgcugccgucacccucugcuucgccuccagccaaaacaucacagaagaguucuaccaaagcacaugcuccgcugucuccaaaggcuaccuuggcgcccuccgcaccggcugguacaccucaguaauuaccauugaacuaagcaacaucaaagaaaauaaaugcaacggcaccgacgccaaaguuaaacucauaaaacaggaacucgacaaauacaaaaacgccguaacagaccuccaaaugcucaugugcuccacccccgccgccggcucaggcuccgccaucgcaagcggaauagcaguuugcaaaguccuccaccuagaaggcgaggucaacaagauuaaaaacgcacuucucucaaccaacaaggccgucguaucacucucaaacggcgucuccguccucaccuucaaaguucuggaccucaaaaacuacaucgauaaacaacuacucccaauacuuaacaaacaaucaugcuccaucccaaaccccgaaaccgucauggaguuccaacagaaaaacaaccgccuacuggaaaucacacgcgaguucagcguaaacgcuggcgucacuacacccgucuccaccuacaugcucaccaauucugaacuccuaucacucauaaacgacaugcccauuaccaacgaccaaaagaaacuaaugucaaacaacguccaaaucguaagacaacaaucguauuccaucaugugcauaauuaaagaagaaguucucgccuacgugguccaacuaccccucuacggagucauagacacuccuuguuggaaacuccacaccucuccccucugcacuaccaacacaaaagaaggcuccaacaucugccucacccgaaccgacagaggcugguacugcgacaacgccggcuccgucuccuucuucccccaagccgaaaccugcaaagucugcuccaaccgcguuuucugcgacaccaugaacucccucacacuccccuccgaagucaaccuauguaacauagacauauucaacccaaaauacgacugcaaaaucaugacauccaaaaccgacgugucuuccucggucaucaccucccucggcgccaucgucucaugcuacggcaaaacuaaaugcaccgcauccaacaaaaacaaaggcauaaucaaaacauucuccaacggcugcgacuacguuucuaacaaaggcgucgauaccgucuccgucggaaacacccucuacuacguaaacaagcaagaaggccagucccuauacguaaaaggagaaccaauuaucaacuucuacgacccccuagucuuccccuccgacgaguucgacgccuccauaucccaagucaacgagaaaaucaaccaaucccuagccuucauccgcaaaucagacgaacuccuccacaacgucaacgucggaaaauccacaacuaacaucaugaucaccaccaucauuaucgucaucauaguuauacuccuccuccucauagccgucggccucuuccuauacugcaaagcucgcuaaggacuaguguccaccugucccuccugggcugcuggauugucucguuuuccugccaaauaaacaggaucagcgcuuuacagaucuaaaaaaaaaaaaaaaaaaaaaaaaaaaaaaaaaaaaaaaaaaaaaaaaaaaaaaaaaaaaaaaaugcaucccccccccccccccccccccccccccccccaaaggcucuuuucagagccaccagaauu

SEQ ID NO: 18072 - RNA, 1885 nt, Artificial Sequence
  mRNA product Design b-4 comprising derived and/or modified sequence from HRSV(Memphis-37)__AIY60640.1__F-del_DSCav1_mut6 (opt1)
gggagagucccgcagucggcguccagcggcucugcuuguucgugugugugucguugcaggccuuauucaagcuuaccauggagcugcccauccucaagaccaacgccaucaccacgauccuggccgcggugacccugugcuucgccagcucccagaacaucaccgaggaguucuaccagagcacgugcuccgccgucagcaagggcuaccucggcgcccugcgcaccgggugguacaccagcgugaucaccaucgagcuguccaacaucaaggagaacaagugcaacggcaccgacgccaaggugaagcucaucaagcaggagcuggacaaguacaagaacgcggucacggaccugcagaugcugaugugcagcaccccggccgccggcuccgggagcgcgaucgccuccggcaucgccgucugcaaggugcugcaccucgagggcgaggugaacaagaucaagaacgcccugcuguccaccaacaaggccgucgugagccucuccaacggggugagcguccugaccuucaaggugcuggaccucaagaacuacaucgacaagcagcugcugcccauccugaacaagcagagcugcuccauccccaaccccgagaccgucauggaguuccagcagaagaacaaccgccuccuggagaucacgcgggaguucagcgugaacgcgggcgugaccacccccgucuccaccuacaugcugacgaacagcgagcuccugucccugaucaacgacaugccgaucaccaacgaccagaagaagcucaugagcaacaacgugcagaucgugcgccagcaguccuacagcaucaugugcaucaucaaggaggagguccuggccuacguggugcagcugccccucuacggggucaucgacacccccugcuggaagcugcacaccagcccccugugcacgaccaacaccaaggagggcuccaacaucugccucacccggacggaccgcgggugguacugcgacaacgccggcagcguguccuucuucccgcaggccgagaccugcaaggucugcagcaaccggguguucugcgacaccaugaacucccugacccugcccagcgaggugaaccucugcaacaucgacaucuucaaccccaaguacgacugcaagaucaugacguccaagaccgacgucagcuccagcgugaucaccucccugggcgccaucgugagcugcuacgggaagaccaagugcacggcgagcaacaagaacaagggcaucaucaagaccuucuccaacgggugcgacuacgucagcaacaagggcguggacaccguguccgucggcaacacccuguacuacgugaacaagcaggagggccagagccucuacgugaagggggagcccaucaucaacuucuacgacccgcuggucuuccccuccgacgaguucgacgccagcaucucccaggugaacgagaagaucaaccagagccuggccuucauccggaaguccgacgagcuccugcacaacgugaacgucggcaagagcaccacgaacaucaugaucaccaccaucaucaucgugaucaucgugauccugcugcuccugaucgccgucgggcuguuccucuacugcaaggcccgcugaggacuaguaauaaggaaacuguaugaaugucugugggcaggaagugaagagauccuucuguaaagguuuuuggaauuaugucugcugaauaauaaacuuuuuugaaauaauaaaucugguagaaaaaugagaucuaaaaaaaaaaaaaaaaaaaaaaaaaaaaaaaaaaaaaaaaaaaaaaaaaaaaaaaaaaaaaaaaugcaucccccccccccccccccccccccccccccccaaaggcucuuuucagagccaccagaauu

SEQ ID NO: 18073 - RNA, 1885 nt, Artificial Sequence
  mRNA product Design b-4 comprising derived and/or modified sequence from HRSV(Memphis-37)__AIY60640.1__F-del_DSCav1_mut6 (opt1)
gggagagucccgcagucggcguccagcggcucugcuuguucgugugugugucguugcaggccuuauucaagcuuaccauggagcugcccauccucaagaccaacgccaucaccacgauccuggccgcggugacccugugcuucgccagcucccagaacaucaccgaggaguucuaccagagcacgugcuccgccgucagcaagggcuaccucggggcccugcgcaccggcugguacaccuccgugaucaccaucgagcugagcaacaucaaggagaacaagugcaacgggaccgacgccaaggugaagcucaucaagcaggagcuggacaaguacaagaacgcggucacggaccugcagaugcucaugugcuccaccccggccgccggcagcggguccgccaucgcgagcggcaucgccgugugcaaggugcugcaccuggagggcgaggucaacaagaucaagaacgcccuccuguccaccaacaaggccguggugagccuguccaacggggucagcgugcucaccuucaaggugcuggaccugaagaacuacaucgacaagcagcuccugcccauccugaacaagcaguccugcagcauccccaaccccgagacggucauggaguuccagcagaagaacaaccggcuccuggagaucacccgcgaguucuccgugaacgccggcgugaccaccccggucagcacguacaugcugaccaacuccgagcuccugagccugaucaacgacaugcccaucaccaacgaccagaagaagcucaugagcaacaacgugcagaucgugcggcagcaguccuacagcaucaugugcaucaucaaggaggagguccuggcguacguggugcagcugccccucuacggggucaucgacacccccugcuggaagcugcacacguccccgcugugcaccaccaacaccaaggagggcagcaacaucugccucacgcgcaccgaccgggggugguacugcgacaacgccggcuccgugagcuucuucccccaggccgagaccugcaaggugugcuccaaccgcgucuucugcgacaccaugaacagccugacgcugcccuccgaggugaaccucugcaacaucgacaucuucaaccccaaguacgacugcaagaucaugaccagcaagaccgacgucuccagcuccgugaucaccagccugggcgccaucguguccugcuacgggaagacgaagugcaccgccagcaacaagaacaagggcaucaucaagaccuucuccaacgggugcgacuacgucagcaacaagggcguggacaccguguccgucggcaacacgcuguacuacgugaacaagcaggaggggcagagccucuacgugaagggcgagccgaucaucaacuucuacgacccccuggucuuccccagcgacgaguucgacgcguccaucagccaggugaacgagaagaucaaccagucccuggccuucauccgcaagagcgacgagcuccugcacaacgugaacgucgggaaguccaccaccaacaucaugaucaccaccaucaucaucgugaucaucgugauccugcuccugcugaucgccgucggccucuuccuguacugcaaggcccggugaggacuaguaauaaggaaacuguaugaaugucugugggcaggaagugaagagauccuucuguaaagguuuuuggaauuaugucugcugaauaauaaacuuuuuugaaauaauaaaucugguagaaaaaugagaucuaaaaaaaaaaaaaaaaaaaaaaaaaaaaaaaaaaaaaaaaaaaaaaaaaaaaaaaaaaaaaaaaugcaucccccccccccccccccccccccccccccccaaaggcucuuuucagagccaccagaauu

SEQ ID NO: 18074 - RNA, 1885 nt, Artificial Sequence
  mRNA product Design b-4 comprising derived and/or modified sequence from HRSV(Memphis-37)__AIY60640.1__F-del_DSCav1_mut6 (opt2)
gggagagucccgcagucggcguccagcggcucugcuuguucgugugugugucguugcaggccuuauucaagcuuaccauggagcuccccauccucaagaccaacgccaucaccaccauccucgccgccgucacccucugcuucgccuccucccagaacaucaccgaggaguucuaccaguccaccugcuccgccgucuccaagggcuaccucggcgcccuccgcaccggcugguacaccuccgucaucaccaucgagcucuccaacaucaaggagaacaagugcaacggcaccgacgccaaggucaagcucaucaagcaggagcucgacaaguacaagaacgccgucaccgaccuccagaugcucaugugcuccacccccgccgccggcuccggcuccgccaucgccuccggcaucgccgucugcaagguccuccaccucgagggcgaggucaacaagaucaagaacgcccuccucuccaccaacaaggccgucgucucccucuccaacggcgucuccguccucaccuucaagguccucgaccucaagaacuacaucgacaagcagcuccuccccauccucaacaagcaguccugcuccauccccaaccccgagaccgucauggaguuccagcagaagaacaaccgccuccucgagaucacccgcgaguucuccgucaacgccggcgucaccacccccgucuccaccuacaugcucaccaacuccgagcuccucucccucaucaacgacaugcccaucaccaacgaccagaagaagcucauguccaacaacguccagaucguccgccagcaguccuacuccaucaugugcaucaucaaggaggagguccucgccuacgucguccagcucccccucuacggcgucaucgacacccccugcuggaagcuccacaccuccccccucugcaccaccaacaccaaggagggcuccaacaucugccucacccgcaccgaccgcggcugguacugcgacaacgccggcuccgucuccuucuucccccaggccgagaccugcaaggucugcuccaaccgcgucuucugcgacaccaugaacucccucacccuccccuccgaggucaaccucugcaacaucgacaucuucaaccccaaguacgacugcaagaucaugaccuccaagaccgacgucuccuccuccgucaucaccucccucggcgccaucgucuccugcuacggcaagaccaagugcaccgccuccaacaagaacaagggcaucaucaagaccuucuccaacggcugcgacuacgucuccaacaagggcgucgacaccgucuccgucggcaacacccucuacuacgucaacaagcaggagggccagucccucuacgucaagggcgagcccaucaucaacuucuacgacccccucgucuuccccuccgacgaguucgacgccuccaucucccaggucaacgagaagaucaaccagucccucgccuucauccgcaaguccgacgagcuccuccacaacgucaacgucggcaaguccaccaccaacaucaugaucaccaccaucaucaucgucaucaucgucauccuccuccuccucaucgccgucggccucuuccucuacugcaaggcccgcugaggacuaguaauaaggaaacuguaugaaugucugugggcaggaagugaagagauccuucuguaaagguuuuuggaauuaugucugcugaauaauaaacuuuuuugaaauaauaaaucugguagaaaaaugagaucuaaaaaaaaaaaaaaaaaaaaaaaaaaaaaaaaaaaaaaaaaaaaaaaaaaaaaaaaaaaaaaaaugcaucccccccccccccccccccccccccccccccaaaggcucuuuucagagccaccagaauu

SEQ ID NO: 18075 - RNA, 1885 nt, Artificial Sequence
  mRNA product Design b-4 comprising derived and/or modified sequence from HRSV(Memphis-37)__AIY60640.1__F-del_DSCav1_mut6 (opt3)
gggagagucccgcagucggcguccagcggcucugcuuguucgugugugugucguugcaggccuuauucaagcuuaccauggagcugcccauccucaagaccaacgccauuacaacuauacuugcugcagugacgcugugcuucgccagcucccagaauaucaccgaagaguuuuaccaaucuacauguucagcggucaguaaaggcuauuugggggcuuuaagaacuggaugguacaccagcguuauuacaaucgaacuguccaacauuaaggagaauaaaugcaacgguaccgacgccaaggugaaacuaaucaagcaggaacucgauaaguauaaaaaugcaguaacugaccugcagaugcuuauguguucuacuccugccgcuggcucggggucagcaauagccagcggaaucgcugugugcaagguccugcacuuggagggcgaggugaacaaaauuaagaaugcccuccugaguaccaacaaagcgguugugucccugucuaauggugucagcgugcucacguucaagguauuagaucugaagaacuacaucgacaaacagcuuuugccaauucugaauaagcaauccuguucaaucccgaaccccgaaacuguuauggaguuucagcagaaaaauaacaggcuacucgaaauaacccgggaguucagugugaaugcaggggucacaacuccugugagcaccuauaugcugacaaacucugagcuucuguccuugauuaacgauaugccaaucaccaaugaccagaagaaacucaugucaaacaaugugcaaauuguccgccagcagagcuacaguaucaugugcaucauuaaggaagagguucuggccuaugugguacaguuaccccuguacggagugauagauacgccuuguuggaaacuccauacuucuccacuuugcacaaccaacacuaaggaaggcuccaauaucugucugacacgaaccgaccguggcugguacugcgauaacgcugggagcgucucguuuuucccccaagccgagacguguaaggugugcucuaauagaguuuucugcgacaccaugaacuccuugacacuaccuucagaagugaaucuguguaacauugauaucuucaauccaaaauaugacugcaagauaaugacaaguaaaaccgaugucagcuccucugugauuacaagccucggagcaaucguaucauguuacgguaagacuaaaugcaccgcuaguaacaagaauaagggcaucauuaaaacauuuuccaacgggugugacuauguuagcaauaagggaguggacaccgucucugugggcaacacucuguacuaugucaacaaacaggagggucagucacuuuacgugaagggggagccgaucauuaauuucuaugauccccugguuuuuccuagugacgaauuugaugccagcauaucccaagugaacgagaaaaucaaucagucuuuggcguuuauuaggaagucggacgaacuccugcacaacguaaaugucggaaagagcacgacaaacaucaugaucaccacuauuauaaucgugauuaucguuauuuuacugcuacucaucgccgugggccuguuccuuuacugcaaagcacggugaggacuaguaauaaggaaacuguaugaaugucugugggcaggaagugaagagauccuucuguaaagguuuuuggaauuaugucugcugaauaauaaacuuuuuugaaauaauaaaucugguagaaaaaugagaucuaaaaaaaaaaaaaaaaaaaaaaaaaaaaaaaaaaaaaaaaaaaaaaaaaaaaaaaaaaaaaaaaugcaucccccccccccccccccccccccccccccccaaaggcucuuuucagagccaccagaauu

SEQ ID NO: 18076 - RNA, 1885 nt, Artificial Sequence
  mRNA product Design b-4 comprising derived and/or modified sequence from HRSV(Memphis-37)__AIY60640.1__F-del_DSCav1_mut6 (opt4)
gggagagucccgcagucggcguccagcggcucugcuuguucgugugugugucguugcaggccuuauucaagcuuaccauggagcugcccauccugaagaccaacgccaucaccaccauccuggccgccgugacccugugcuucgccagcagccagaacaucaccgaggaguucuaccagagcaccugcagcgccgugagcaagggcuaccugggcgcccugagaaccggcugguacaccagcgugaucaccaucgagcugagcaacaucaaggagaacaagugcaacggcaccgacgccaaggugaagcugaucaagcaggagcuggacaaguacaagaacgccgugaccgaccugcagaugcugaugugcagcacccccgccgccggcagcggcagcgccaucgccagcggcaucgccgugugcaaggugcugcaccuggagggcgaggugaacaagaucaagaacgcccugcugagcaccaacaaggccguggugagccugagcaacggcgugagcgugcugaccuucaaggugcuggaccugaagaacuacaucgacaagcagcugcugcccauccugaacaagcagagcugcagcauccccaaccccgagaccgugauggaguuccagcagaagaacaacagacugcuggagaucaccagagaguucagcgugaacgccggcgugaccacccccgugagcaccuacaugcugaccaacagcgagcugcugagccugaucaacgacaugcccaucaccaacgaccagaagaagcugaugagcaacaacgugcagaucgugagacagcagagcuacagcaucaugugcaucaucaaggaggaggugcuggccuacguggugcagcugccccuguacggcgugaucgacacccccugcuggaagcugcacaccagcccccugugcaccaccaacaccaaggagggcagcaacaucugccugaccagaaccgacagaggcugguacugcgacaacgccggcagcgugagcuucuucccccaggccgagaccugcaaggugugcagcaacagaguguucugcgacaccaugaacagccugacccugcccagcgaggugaaccugugcaacaucgacaucuucaaccccaaguacgacugcaagaucaugaccagcaagaccgacgugagcagcagcgugaucaccagccugggcgccaucgugagcugcuacggcaagaccaagugcaccgccagcaacaagaacaagggcaucaucaagaccuucagcaacggcugcgacuacgugagcaacaagggcguggacaccgugagcgugggcaacacccuguacuacgugaacaagcaggagggccagagccuguacgugaagggcgagcccaucaucaacuucuacgacccccugguguuccccagcgacgaguucgacgccagcaucagccaggugaacgagaagaucaaccagagccuggccuucaucagaaagagcgacgagcugcugcacaacgugaacgugggcaagagcaccaccaacaucaugaucaccaccaucaucaucgugaucaucgugauccugcugcugcugaucgccgugggccuguuccuguacugcaaggccagaugaggacuaguaauaaggaaacuguaugaaugucugugggcaggaagugaagagauccuucuguaaagguuuuuggaauuaugucugcugaauaauaaacuuuuuugaaauaauaaaucugguagaaaaaugagaucuaaaaaaaaaaaaaaaaaaaaaaaaaaaaaaaaaaaaaaaaaaaaaaaaaaaaaaaaaaaaaaaaugcaucccccccccccccccccccccccccccccccaaaggcucuuuucagagccaccagaauu

SEQ ID NO: 18077 - RNA, 1885 nt, Artificial Sequence
  mRNA product Design b-4 comprising derived and/or modified sequence from HRSV(Memphis-37)__AIY60640.1__F-del_DSCav1_mut6 (opt5)
gggagagucccgcagucggcguccagcggcucugcuuguucgugugugugucguugcaggccuuauucaagcuuaccauggagcugcccauccucaagaccaacgccauuacaacgauccuggcugccgugacccuuugcuucgcgagcucccagaauauuacagaagaguuuuaccaaucuaccuguagcgcugucuccaaaggcuaucugggggcccucagaacaggaugguacaccucuguuaucacaauugaacugagcaacaucaaggagaauaaaugcaacggcaccgacgccaaggugaaacuuaucaagcaggaacuggauaaguauaaaaaugcugugacggaccuccagaugcugauguguuccaccccugccgcugggucuggaagcgccauugcguccggcaucgccgucugcaaggugcugcaccucgagggggagguuaacaaaauuaagaaugcucugcuuagcacaaacaaagccguggucucucuguccaauggagugagcguucucaccuucaaggugcuggaucuuaagaacuacaucgacaaacagcugcucccgauucugaauaagcaaucuuguuccauccccaacccugaaacagucauggaguuucagcagaaaaauaaccggcugcucgaaauuacccgcgaguucagcgugaaugcuggcgugacgacacccgucucuaccuauaugcugacaaacuccgagcuucugagccucaucaacgauaugccuaucaccaaugaccagaagaaacugauguccaacaauguucaaauugugagacagcagucuuacagcaucaugugcauuaucaaggaagaggugcuugccuaugucgugcagcugccccucuacggcguuauugauaccccuuguuggaaacugcauacauccccgcugugcacgaccaacacaaaggaagggagcaauaucugucucacccggacagaccgcggaugguacugcgauaacgcgggcucuguguccuuuuucccccaagccgagaccuguaaggucugcagcaauagaguguuuugcgacacgaugaacucucugacacuuccuagcgaaguuaaucuguguaacaucgauauuuucaaucccaaauaugacugcaagaucaugaccuccaaaaccgaugugucuagcuccgucauuacaagccucggggcuaucgugucuuguuacggaaagaccaaaugcacagccuccaacaagaauaagggcauuaucaaaacguuuagcaacgggugugacuaugucucuaauaagggaguggacaccguuuccgugggcaacacacuguacuaugucaacaaacaggagggccagagccuuuacgugaagggggagccuaucauuaauuucuaugauccccugguuuuuccguccgacgaauuugaugcuucuaucagccaagugaacgagaaaauuaaucagucccucgccuucauccggaagucugacgaacugcugcacaacgucaaugugggaaagagcaccacaaacauuaugaucaccacgauuaucaucgugauuaucguuauucuccugcuucugaucgccgucggccucuuccuguacugcaaagcucgcugaggacuaguaauaaggaaacuguaugaaugucugugggcaggaagugaagagauccuucuguaaagguuuuuggaauuaugucugcugaauaauaaacuuuuuugaaauaauaaaucugguagaaaaaugagaucuaaaaaaaaaaaaaaaaaaaaaaaaaaaaaaaaaaaaaaaaaaaaaaaaaaaaaaaaaaaaaaaaugcaucccccccccccccccccccccccccccccccaaaggcucuuuucagagccaccagaauu

SEQ ID NO: 18078 - RNA, 1885 nt, Artificial Sequence
  mRNA product Design b-4 comprising derived and/or modified sequence from HRSV(Memphis-37)__AIY60640.1__F-del_DSCav1_mut6 (opt6)
gggagagucccgcagucggcguccagcggcucugcuuguucgugugugugucguugcaggccuuauucaagcuuaccauggaacuaccuauacuaaaaaccaacgccauaacaacaauacuagccgcaguuacacucugcuuugcauccucacaaaacaucacagaggaauuuuaccaaucuacuugcuccgcaguaucaaaaggauaccuaggagcacuccguacaggaugguacacaucagucauaacaauugaauuaucuaacaucaaagaaaacaaauguaaugguacagacgccaaaguaaaauuaauaaaacaagaacuagacaaauacaaaaacgccguaacagaccuacaaaugcuaaugugcucaacccccgccgcaggaucuggaucagcaauugccucaggcauagcaguaugcaaaguccuacaccuagaaggagaagucaacaaaauaaaaaacgcucuccucucaaccaauaaagcaguaguaucccucucaaacggaguaucaguacuaacauucaaaguacuagaccucaaaaauuauauagacaagcaacuacucccaauauuaaauaaacaauccugcucaauacccaauccagaaacagucauggaauuucaacaaaaaaacaaccgacucuuagaaauaacaagagaauuuucagucaaugccggcgucacaaccccaguaucaacauacaugcuaacaaacucagaacuacuaucacuaaucaacgauaugcccauaaccaacgaccaaaaaaaacuaaugucaaacaauguacaaauuguaagacaacagucuuauucaauaaugugcauaauaaaagaagaagucuuagcauauguaguacaacuaccacuauacggaguaauagacacaccauguuggaaauuacacacauccccacuauguaccaccaacacaaaagaaggaucuaacauaugccuaaccagaacagaccgaggcugguauugcgacaaugcaggaucaguauccuucuuuccacaagcagaaacaugcaaagucugcucuaacagaguauucugcgauacuaugaacucacuuaccuuaccaucagaaguaaaucuauguaauaucgacauauucaaucccaaauaugauugcaaaauaaugaccucaaaaacagauguaucaucaucagucauaacaucacuaggagcaauagucagcugcuaugggaaaacaaaaugcacagcuuccaacaaaaacaaaggaaucauaaaaacauucucaaaugguugugacuacguauccaacaaaggaguagauacaguaucuguaggcaacacauuauacuauguaaauaaacaagaaggacaaagccuauacgucaaaggagaacccaucauaaauuucuaugacccauuaguuuucccaucugacgaauuugacgcuuccaucucccaaguaaaugaaaaaaucaaccaaagccucgcauucauucgcaaaucugacgaauuacuccacaacguaaacguaggaaaauccacaacaaacauuaugaucaccaccauaauaaucguaauaauagucauauuacuacuccucauagcaguaggacuauuccuauacuguaaagcuagauaaggacuaguaauaaggaaacuguaugaaugucugugggcaggaagugaagagauccuucuguaaagguuuuuggaauuaugucugcugaauaauaaacuuuuuugaaauaauaaaucugguagaaaaaugagaucuaaaaaaaaaaaaaaaaaaaaaaaaaaaaaaaaaaaaaaaaaaaaaaaaaaaaaaaaaaaaaaaaugcaucccccccccccccccccccccccccccccccaaaggcucuuuucagagccaccagaauu

SEQ ID NO: 18079 - RNA, 1885 nt, Artificial Sequence
  mRNA product Design b-4 comprising derived and/or modified sequence from HRSV(Memphis-37)__AIY60640.1__F-del_DSCav1_mut6 (opt11)
gggagagucccgcagucggcguccagcggcucugcuuguucgugugugugucguugcaggccuuauucaagcuuaccauggaauuaccaauccucaaaacuaacgccaucaccaccauccucgcugccgucacccucugcuucgccuccagccaaaacaucacagaagaguucuaccaaagcacaugcuccgcugucuccaaaggcuaccuuggcgcccuccgcaccggcugguacaccucaguaauuaccauugaacuaagcaacaucaaagaaaauaaaugcaacggcaccgacgccaaaguuaaacucauaaaacaggaacucgacaaauacaaaaacgccguaacagaccuccaaaugcucaugugcuccacccccgccgccggcucaggcuccgccaucgcaagcggaauagcaguuugcaaaguccuccaccuagaaggcgaggucaacaagauuaaaaacgcacuucucucaaccaacaaggccgucguaucacucucaaacggcgucuccguccucaccuucaaaguucuggaccucaaaaacuacaucgauaaacaacuacucccaauacuuaacaaacaaucaugcuccaucccaaaccccgaaaccgucauggaguuccaacagaaaaacaaccgccuacuggaaaucacacgcgaguucagcguaaacgcuggcgucacuacacccgucuccaccuacaugcucaccaauucugaacuccuaucacucauaaacgacaugcccauuaccaacgaccaaaagaaacuaaugucaaacaacguccaaaucguaagacaacaaucguauuccaucaugugcauaauuaaagaagaaguucucgccuacgugguccaacuaccccucuacggagucauagacacuccuuguuggaaacuccacaccucuccccucugcacuaccaacacaaaagaaggcuccaacaucugccucacccgaaccgacagaggcugguacugcgacaacgccggcuccgucuccuucuucccccaagccgaaaccugcaaagucugcuccaaccgcguuuucugcgacaccaugaacucccucacacuccccuccgaagucaaccuauguaacauagacauauucaacccaaaauacgacugcaaaaucaugacauccaaaaccgacgugucuuccucggucaucaccucccucggcgccaucgucucaugcuacggcaaaacuaaaugcaccgcauccaacaaaaacaaaggcauaaucaaaacauucuccaacggcugcgacuacguuucuaacaaaggcgucgauaccgucuccgucggaaacacccucuacuacguaaacaagcaagaaggccagucccuauacguaaaaggagaaccaauuaucaacuucuacgacccccuagucuuccccuccgacgaguucgacgccuccauaucccaagucaacgagaaaaucaaccaaucccuagccuucauccgcaaaucagacgaacuccuccacaacgucaacgucggaaaauccacaacuaacaucaugaucaccaccaucauuaucgucaucauaguuauacuccuccuccucauagccgucggccucuuccuauacugcaaagcucgcuaaggacuaguaauaaggaaacuguaugaaugucugugggcaggaagugaagagauccuucuguaaagguuuuuggaauuaugucugcugaauaauaaacuuuuuugaaauaauaaaucugguagaaaaaugagaucuaaaaaaaaaaaaaaaaaaaaaaaaaaaaaaaaaaaaaaaaaaaaaaaaaaaaaaaaaaaaaaaaugcaucccccccccccccccccccccccccccccccaaaggcucuuuucagagccaccagaauu

SEQ ID NO: 18080 - RNA, 1947 nt, Artificial Sequence
  mRNA product Design b-5 comprising derived and/or modified sequence from HRSV(Memphis-37)__AIY60640.1__F-del_DSCav1_mut6 (opt1)
gggagacuccugucgggcggaaguaggaggaguagaguuuaaaaacaguacucuuuuuccgguucgggacguaguugaagcaacgacaagccggauaaccgcucuugagacaggaagcuuaccauggagcugcccauccucaagaccaacgccaucaccacgauccuggccgcggugacccugugcuucgccagcucccagaacaucaccgaggaguucuaccagagcacgugcuccgccgucagcaagggcuaccucggcgcccugcgcaccgggugguacaccagcgugaucaccaucgagcuguccaacaucaaggagaacaagugcaacggcaccgacgccaaggugaagcucaucaagcaggagcuggacaaguacaagaacgcggucacggaccugcagaugcugaugugcagcaccccggccgccggcuccgggagcgcgaucgccuccggcaucgccgucugcaaggugcugcaccucgagggcgaggugaacaagaucaagaacgcccugcuguccaccaacaaggccgucgugagccucuccaacggggugagcguccugaccuucaaggugcuggaccucaagaacuacaucgacaagcagcugcugcccauccugaacaagcagagcugcuccauccccaaccccgagaccgucauggaguuccagcagaagaacaaccgccuccuggagaucacgcgggaguucagcgugaacgcgggcgugaccacccccgucuccaccuacaugcugacgaacagcgagcuccugucccugaucaacgacaugccgaucaccaacgaccagaagaagcucaugagcaacaacgugcagaucgugcgccagcaguccuacagcaucaugugcaucaucaaggaggagguccuggccuacguggugcagcugccccucuacggggucaucgacacccccugcuggaagcugcacaccagcccccugugcacgaccaacaccaaggagggcuccaacaucugccucacccggacggaccgcgggugguacugcgacaacgccggcagcguguccuucuucccgcaggccgagaccugcaaggucugcagcaaccggguguucugcgacaccaugaacucccugacccugcccagcgaggugaaccucugcaacaucgacaucuucaaccccaaguacgacugcaagaucaugacguccaagaccgacgucagcuccagcgugaucaccucccugggcgccaucgugagcugcuacgggaagaccaagugcacggcgagcaacaagaacaagggcaucaucaagaccuucuccaacgggugcgacuacgucagcaacaagggcguggacaccguguccgucggcaacacccuguacuacgugaacaagcaggagggccagagccucuacgugaagggggagcccaucaucaacuucuacgacccgcuggucuuccccuccgacgaguucgacgccagcaucucccaggugaacgagaagaucaaccagagccuggccuucauccggaaguccgacgagcuccugcacaacgugaacgucggcaagagcaccacgaacaucaugaucaccaccaucaucaucgugaucaucgugauccugcugcuccugaucgccgucgggcuguuccucuacugcaaggcccgcugaggacuaguacuggcugcaucucccuuuccucuguccuccauccuucucccaggauggugaagggggaccugguacccagugauccccaccccaggauccuaaaucaugacuuaccugcuaauaaaaacucauuggaaaagugagaagaucuaaaaaaaaaaaaaaaaaaaaaaaaaaaaaaaaaaaaaaaaaaaaaaaaaaaaaaaaaaaaaaaaugcaucccccccccccccccccccccccccccccccaaaggcucuuuucagagccaccagaauu

SEQ ID NO: 18081 - RNA, 1947 nt, Artificial Sequence
  mRNA product Design b-5 comprising derived and/or modified sequence from HRSV(Memphis-37)__AIY60640.1__F-del_DSCav1_mut6 (opt1)
gggagacuccugucgggcggaaguaggaggaguagaguuuaaaaacaguacucuuuuuccgguucgggacguaguugaagcaacgacaagccggauaaccgcucuugagacaggaagcuuaccauggagcugcccauccucaagaccaacgccaucaccacgauccuggccgcggugacccugugcuucgccagcucccagaacaucaccgaggaguucuaccagagcacgugcuccgccgucagcaagggcuaccucggggcccugcgcaccggcugguacaccuccgugaucaccaucgagcugagcaacaucaaggagaacaagugcaacgggaccgacgccaaggugaagcucaucaagcaggagcuggacaaguacaagaacgcggucacggaccugcagaugcucaugugcuccaccccggccgccggcagcggguccgccaucgcgagcggcaucgccgugugcaaggugcugcaccuggagggcgaggucaacaagaucaagaacgcccuccuguccaccaacaaggccguggugagccuguccaacggggucagcgugcucaccuucaaggugcuggaccugaagaacuacaucgacaagcagcuccugcccauccugaacaagcaguccugcagcauccccaaccccgagacggucauggaguuccagcagaagaacaaccggcuccuggagaucacccgcgaguucuccgugaacgccggcgugaccaccccggucagcacguacaugcugaccaacuccgagcuccugagccugaucaacgacaugcccaucaccaacgaccagaagaagcucaugagcaacaacgugcagaucgugcggcagcaguccuacagcaucaugugcaucaucaaggaggagguccuggcguacguggugcagcugccccucuacggggucaucgacacccccugcuggaagcugcacacguccccgcugugcaccaccaacaccaaggagggcagcaacaucugccucacgcgcaccgaccgggggugguacugcgacaacgccggcuccgugagcuucuucccccaggccgagaccugcaaggugugcuccaaccgcgucuucugcgacaccaugaacagccugacgcugcccuccgaggugaaccucugcaacaucgacaucuucaaccccaaguacgacugcaagaucaugaccagcaagaccgacgucuccagcuccgugaucaccagccugggcgccaucguguccugcuacgggaagacgaagugcaccgccagcaacaagaacaagggcaucaucaagaccuucuccaacgggugcgacuacgucagcaacaagggcguggacaccguguccgucggcaacacgcuguacuacgugaacaagcaggaggggcagagccucuacgugaagggcgagccgaucaucaacuucuacgacccccuggucuuccccagcgacgaguucgacgcguccaucagccaggugaacgagaagaucaaccagucccuggccuucauccgcaagagcgacgagcuccugcacaacgugaacgucgggaaguccaccaccaacaucaugaucaccaccaucaucaucgugaucaucgugauccugcuccugcugaucgccgucggccucuuccuguacugcaaggcccggugaggacuaguacuggcugcaucucccuuuccucuguccuccauccuucucccaggauggugaagggggaccugguacccagugauccccaccccaggauccuaaaucaugacuuaccugcuaauaaaaacucauuggaaaagugagaagaucuaaaaaaaaaaaaaaaaaaaaaaaaaaaaaaaaaaaaaaaaaaaaaaaaaaaaaaaaaaaaaaaaugcaucccccccccccccccccccccccccccccccaaaggcucuuuucagagccaccagaauu

SEQ ID NO: 18082 - RNA, 1947 nt, Artificial Sequence
  mRNA product Design b-5 comprising derived and/or modified sequence from HRSV(Memphis-37)__AIY60640.1__F-del_DSCav1_mut6 (opt2)
gggagacuccugucgggcggaaguaggaggaguagaguuuaaaaacaguacucuuuuuccgguucgggacguaguugaagcaacgacaagccggauaaccgcucuugagacaggaagcuuaccauggagcuccccauccucaagaccaacgccaucaccaccauccucgccgccgucacccucugcuucgccuccucccagaacaucaccgaggaguucuaccaguccaccugcuccgccgucuccaagggcuaccucggcgcccuccgcaccggcugguacaccuccgucaucaccaucgagcucuccaacaucaaggagaacaagugcaacggcaccgacgccaaggucaagcucaucaagcaggagcucgacaaguacaagaacgccgucaccgaccuccagaugcucaugugcuccacccccgccgccggcuccggcuccgccaucgccuccggcaucgccgucugcaagguccuccaccucgagggcgaggucaacaagaucaagaacgcccuccucuccaccaacaaggccgucgucucccucuccaacggcgucuccguccucaccuucaagguccucgaccucaagaacuacaucgacaagcagcuccuccccauccucaacaagcaguccugcuccauccccaaccccgagaccgucauggaguuccagcagaagaacaaccgccuccucgagaucacccgcgaguucuccgucaacgccggcgucaccacccccgucuccaccuacaugcucaccaacuccgagcuccucucccucaucaacgacaugcccaucaccaacgaccagaagaagcucauguccaacaacguccagaucguccgccagcaguccuacuccaucaugugcaucaucaaggaggagguccucgccuacgucguccagcucccccucuacggcgucaucgacacccccugcuggaagcuccacaccuccccccucugcaccaccaacaccaaggagggcuccaacaucugccucacccgcaccgaccgcggcugguacugcgacaacgccggcuccgucuccuucuucccccaggccgagaccugcaaggucugcuccaaccgcgucuucugcgacaccaugaacucccucacccuccccuccgaggucaaccucugcaacaucgacaucuucaaccccaaguacgacugcaagaucaugaccuccaagaccgacgucuccuccuccgucaucaccucccucggcgccaucgucuccugcuacggcaagaccaagugcaccgccuccaacaagaacaagggcaucaucaagaccuucuccaacggcugcgacuacgucuccaacaagggcgucgacaccgucuccgucggcaacacccucuacuacgucaacaagcaggagggccagucccucuacgucaagggcgagcccaucaucaacuucuacgacccccucgucuuccccuccgacgaguucgacgccuccaucucccaggucaacgagaagaucaaccagucccucgccuucauccgcaaguccgacgagcuccuccacaacgucaacgucggcaaguccaccaccaacaucaugaucaccaccaucaucaucgucaucaucgucauccuccuccuccucaucgccgucggccucuuccucuacugcaaggcccgcugaggacuaguacuggcugcaucucccuuuccucuguccuccauccuucucccaggauggugaagggggaccugguacccagugauccccaccccaggauccuaaaucaugacuuaccugcuaauaaaaacucauuggaaaagugagaagaucuaaaaaaaaaaaaaaaaaaaaaaaaaaaaaaaaaaaaaaaaaaaaaaaaaaaaaaaaaaaaaaaaugcaucccccccccccccccccccccccccccccccaaaggcucuuuucagagccaccagaauu

SEQ ID NO: 18083 - RNA, 1947 nt, Artificial Sequence
  mRNA product Design b-5 comprising derived and/or modified sequence from HRSV(Memphis-37)__AIY60640.1__F-del_DSCav1_mut6 (opt3)
gggagacuccugucgggcggaaguaggaggaguagaguuuaaaaacaguacucuuuuuccgguucgggacguaguugaagcaacgacaagccggauaaccgcucuugagacaggaagcuuaccauggagcugcccauccucaagaccaacgccauuacaacuauacuugcugcagugacgcugugcuucgccagcucccagaauaucaccgaagaguuuuaccaaucuacauguucagcggucaguaaaggcuauuugggggcuuuaagaacuggaugguacaccagcguuauuacaaucgaacuguccaacauuaaggagaauaaaugcaacgguaccgacgccaaggugaaacuaaucaagcaggaacucgauaaguauaaaaaugcaguaacugaccugcagaugcuuauguguucuacuccugccgcuggcucggggucagcaauagccagcggaaucgcugugugcaagguccugcacuuggagggcgaggugaacaaaauuaagaaugcccuccugaguaccaacaaagcgguugugucccugucuaauggugucagcgugcucacguucaagguauuagaucugaagaacuacaucgacaaacagcuuuugccaauucugaauaagcaauccuguucaaucccgaaccccgaaacuguuauggaguuucagcagaaaaauaacaggcuacucgaaauaacccgggaguucagugugaaugcaggggucacaacuccugugagcaccuauaugcugacaaacucugagcuucuguccuugauuaacgauaugccaaucaccaaugaccagaagaaacucaugucaaacaaugugcaaauuguccgccagcagagcuacaguaucaugugcaucauuaaggaagagguucuggccuaugugguacaguuaccccuguacggagugauagauacgccuuguuggaaacuccauacuucuccacuuugcacaaccaacacuaaggaaggcuccaauaucugucugacacgaaccgaccguggcugguacugcgauaacgcugggagcgucucguuuuucccccaagccgagacguguaaggugugcucuaauagaguuuucugcgacaccaugaacuccuugacacuaccuucagaagugaaucuguguaacauugauaucuucaauccaaaauaugacugcaagauaaugacaaguaaaaccgaugucagcuccucugugauuacaagccucggagcaaucguaucauguuacgguaagacuaaaugcaccgcuaguaacaagaauaagggcaucauuaaaacauuuuccaacgggugugacuauguuagcaauaagggaguggacaccgucucugugggcaacacucuguacuaugucaacaaacaggagggucagucacuuuacgugaagggggagccgaucauuaauuucuaugauccccugguuuuuccuagugacgaauuugaugccagcauaucccaagugaacgagaaaaucaaucagucuuuggcguuuauuaggaagucggacgaacuccugcacaacguaaaugucggaaagagcacgacaaacaucaugaucaccacuauuauaaucgugauuaucguuauuuuacugcuacucaucgccgugggccuguuccuuuacugcaaagcacggugaggacuaguacuggcugcaucucccuuuccucuguccuccauccuucucccaggauggugaagggggaccugguacccagugauccccaccccaggauccuaaaucaugacuuaccugcuaauaaaaacucauuggaaaagugagaagaucuaaaaaaaaaaaaaaaaaaaaaaaaaaaaaaaaaaaaaaaaaaaaaaaaaaaaaaaaaaaaaaaaugcaucccccccccccccccccccccccccccccccaaaggcucuuuucagagccaccagaauu

SEQ ID NO: 18084 - RNA, 1947 nt, Artificial Sequence
  mRNA product Design b-5 comprising derived and/or modified sequence from HRSV(Memphis-37)__AIY60640.1__F-del_DSCav1_mut6 (opt4)
gggagacuccugucgggcggaaguaggaggaguagaguuuaaaaacaguacucuuuuuccgguucgggacguaguugaagcaacgacaagccggauaaccgcucuugagacaggaagcuuaccauggagcugcccauccugaagaccaacgccaucaccaccauccuggccgccgugacccugugcuucgccagcagccagaacaucaccgaggaguucuaccagagcaccugcagcgccgugagcaagggcuaccugggcgcccugagaaccggcugguacaccagcgugaucaccaucgagcugagcaacaucaaggagaacaagugcaacggcaccgacgccaaggugaagcugaucaagcaggagcuggacaaguacaagaacgccgugaccgaccugcagaugcugaugugcagcacccccgccgccggcagcggcagcgccaucgccagcggcaucgccgugugcaaggugcugcaccuggagggcgaggugaacaagaucaagaacgcccugcugagcaccaacaaggccguggugagccugagcaacggcgugagcgugcugaccuucaaggugcuggaccugaagaacuacaucgacaagcagcugcugcccauccugaacaagcagagcugcagcauccccaaccccgagaccgugauggaguuccagcagaagaacaacagacugcuggagaucaccagagaguucagcgugaacgccggcgugaccacccccgugagcaccuacaugcugaccaacagcgagcugcugagccugaucaacgacaugcccaucaccaacgaccagaagaagcugaugagcaacaacgugcagaucgugagacagcagagcuacagcaucaugugcaucaucaaggaggaggugcuggccuacguggugcagcugccccuguacggcgugaucgacacccccugcuggaagcugcacaccagcccccugugcaccaccaacaccaaggagggcagcaacaucugccugaccagaaccgacagaggcugguacugcgacaacgccggcagcgugagcuucuucccccaggccgagaccugcaaggugugcagcaacagaguguucugcgacaccaugaacagccugacccugcccagcgaggugaaccugugcaacaucgacaucuucaaccccaaguacgacugcaagaucaugaccagcaagaccgacgugagcagcagcgugaucaccagccugggcgccaucgugagcugcuacggcaagaccaagugcaccgccagcaacaagaacaagggcaucaucaagaccuucagcaacggcugcgacuacgugagcaacaagggcguggacaccgugagcgugggcaacacccuguacuacgugaacaagcaggagggccagagccuguacgugaagggcgagcccaucaucaacuucuacgacccccugguguuccccagcgacgaguucgacgccagcaucagccaggugaacgagaagaucaaccagagccuggccuucaucagaaagagcgacgagcugcugcacaacgugaacgugggcaagagcaccaccaacaucaugaucaccaccaucaucaucgugaucaucgugauccugcugcugcugaucgccgugggccuguuccuguacugcaaggccagaugaggacuaguacuggcugcaucucccuuuccucuguccuccauccuucucccaggauggugaagggggaccugguacccagugauccccaccccaggauccuaaaucaugacuuaccugcuaauaaaaacucauuggaaaagugagaagaucuaaaaaaaaaaaaaaaaaaaaaaaaaaaaaaaaaaaaaaaaaaaaaaaaaaaaaaaaaaaaaaaaugcaucccccccccccccccccccccccccccccccaaaggcucuuuucagagccaccagaauu

SEQ ID NO: 18085 - RNA, 1947 nt, Artificial Sequence
  mRNA product Design b-5 comprising derived and/or modified sequence from HRSV(Memphis-37)__AIY60640.1__F-del_DSCav1_mut6 (opt5)
gggagacuccugucgggcggaaguaggaggaguagaguuuaaaaacaguacucuuuuuccgguucgggacguaguugaagcaacgacaagccggauaaccgcucuugagacaggaagcuuaccauggagcugcccauccucaagaccaacgccauuacaacgauccuggcugccgugacccuuugcuucgcgagcucccagaauauuacagaagaguuuuaccaaucuaccuguagcgcugucuccaaaggcuaucugggggcccucagaacaggaugguacaccucuguuaucacaauugaacugagcaacaucaaggagaauaaaugcaacggcaccgacgccaaggugaaacuuaucaagcaggaacuggauaaguauaaaaaugcugugacggaccuccagaugcugauguguuccaccccugccgcugggucuggaagcgccauugcguccggcaucgccgucugcaaggugcugcaccucgagggggagguuaacaaaauuaagaaugcucugcuuagcacaaacaaagccguggucucucuguccaauggagugagcguucucaccuucaaggugcuggaucuuaagaacuacaucgacaaacagcugcucccgauucugaauaagcaaucuuguuccauccccaacccugaaacagucauggaguuucagcagaaaaauaaccggcugcucgaaauuacccgcgaguucagcgugaaugcuggcgugacgacacccgucucuaccuauaugcugacaaacuccgagcuucugagccucaucaacgauaugccuaucaccaaugaccagaagaaacugauguccaacaauguucaaauugugagacagcagucuuacagcaucaugugcauuaucaaggaagaggugcuugccuaugucgugcagcugccccucuacggcguuauugauaccccuuguuggaaacugcauacauccccgcugugcacgaccaacacaaaggaagggagcaauaucugucucacccggacagaccgcggaugguacugcgauaacgcgggcucuguguccuuuuucccccaagccgagaccuguaaggucugcagcaauagaguguuuugcgacacgaugaacucucugacacuuccuagcgaaguuaaucuguguaacaucgauauuuucaaucccaaauaugacugcaagaucaugaccuccaaaaccgaugugucuagcuccgucauuacaagccucggggcuaucgugucuuguuacggaaagaccaaaugcacagccuccaacaagaauaagggcauuaucaaaacguuuagcaacgggugugacuaugucucuaauaagggaguggacaccguuuccgugggcaacacacuguacuaugucaacaaacaggagggccagagccuuuacgugaagggggagccuaucauuaauuucuaugauccccugguuuuuccguccgacgaauuugaugcuucuaucagccaagugaacgagaaaauuaaucagucccucgccuucauccggaagucugacgaacugcugcacaacgucaaugugggaaagagcaccacaaacauuaugaucaccacgauuaucaucgugauuaucguuauucuccugcuucugaucgccgucggccucuuccuguacugcaaagcucgcugaggacuaguacuggcugcaucucccuuuccucuguccuccauccuucucccaggauggugaagggggaccugguacccagugauccccaccccaggauccuaaaucaugacuuaccugcuaauaaaaacucauuggaaaagugagaagaucuaaaaaaaaaaaaaaaaaaaaaaaaaaaaaaaaaaaaaaaaaaaaaaaaaaaaaaaaaaaaaaaaugcaucccccccccccccccccccccccccccccccaaaggcucuuuucagagccaccagaauu

SEQ ID NO: 18086 - RNA, 1947 nt, Artificial Sequence
  mRNA product Design b-5 comprising derived and/or modified sequence from HRSV(Memphis-37)__AIY60640.1__F-del_DSCav1_mut6 (opt6)
gggagacuccugucgggcggaaguaggaggaguagaguuuaaaaacaguacucuuuuuccgguucgggacguaguugaagcaacgacaagccggauaaccgcucuugagacaggaagcuuaccauggaacuaccuauacuaaaaaccaacgccauaacaacaauacuagccgcaguuacacucugcuuugcauccucacaaaacaucacagaggaauuuuaccaaucuacuugcuccgcaguaucaaaaggauaccuaggagcacuccguacaggaugguacacaucagucauaacaauugaauuaucuaacaucaaagaaaacaaauguaaugguacagacgccaaaguaaaauuaauaaaacaagaacuagacaaauacaaaaacgccguaacagaccuacaaaugcuaaugugcucaacccccgccgcaggaucuggaucagcaauugccucaggcauagcaguaugcaaaguccuacaccuagaaggagaagucaacaaaauaaaaaacgcucuccucucaaccaauaaagcaguaguaucccucucaaacggaguaucaguacuaacauucaaaguacuagaccucaaaaauuauauagacaagcaacuacucccaauauuaaauaaacaauccugcucaauacccaauccagaaacagucauggaauuucaacaaaaaaacaaccgacucuuagaaauaacaagagaauuuucagucaaugccggcgucacaaccccaguaucaacauacaugcuaacaaacucagaacuacuaucacuaaucaacgauaugcccauaaccaacgaccaaaaaaaacuaaugucaaacaauguacaaauuguaagacaacagucuuauucaauaaugugcauaauaaaagaagaagucuuagcauauguaguacaacuaccacuauacggaguaauagacacaccauguuggaaauuacacacauccccacuauguaccaccaacacaaaagaaggaucuaacauaugccuaaccagaacagaccgaggcugguauugcgacaaugcaggaucaguauccuucuuuccacaagcagaaacaugcaaagucugcucuaacagaguauucugcgauacuaugaacucacuuaccuuaccaucagaaguaaaucuauguaauaucgacauauucaaucccaaauaugauugcaaaauaaugaccucaaaaacagauguaucaucaucagucauaacaucacuaggagcaauagucagcugcuaugggaaaacaaaaugcacagcuuccaacaaaaacaaaggaaucauaaaaacauucucaaaugguugugacuacguauccaacaaaggaguagauacaguaucuguaggcaacacauuauacuauguaaauaaacaagaaggacaaagccuauacgucaaaggagaacccaucauaaauuucuaugacccauuaguuuucccaucugacgaauuugacgcuuccaucucccaaguaaaugaaaaaaucaaccaaagccucgcauucauucgcaaaucugacgaauuacuccacaacguaaacguaggaaaauccacaacaaacauuaugaucaccaccauaauaaucguaauaauagucauauuacuacuccucauagcaguaggacuauuccuauacuguaaagcuagauaaggacuaguacuggcugcaucucccuuuccucuguccuccauccuucucccaggauggugaagggggaccugguacccagugauccccaccccaggauccuaaaucaugacuuaccugcuaauaaaaacucauuggaaaagugagaagaucuaaaaaaaaaaaaaaaaaaaaaaaaaaaaaaaaaaaaaaaaaaaaaaaaaaaaaaaaaaaaaaaaugcaucccccccccccccccccccccccccccccccaaaggcucuuuucagagccaccagaauu

SEQ ID NO: 18087 - RNA, 1947 nt, Artificial Sequence
  mRNA product Design b-5 comprising derived and/or modified sequence from HRSV(Memphis-37)__AIY60640.1__F-del_DSCav1_mut6 (opt11)
gggagacuccugucgggcggaaguaggaggaguagaguuuaaaaacaguacucuuuuuccgguucgggacguaguugaagcaacgacaagccggauaaccgcucuugagacaggaagcuuaccauggaauuaccaauccucaaaacuaacgccaucaccaccauccucgcugccgucacccucugcuucgccuccagccaaaacaucacagaagaguucuaccaaagcacaugcuccgcugucuccaaaggcuaccuuggcgcccuccgcaccggcugguacaccucaguaauuaccauugaacuaagcaacaucaaagaaaauaaaugcaacggcaccgacgccaaaguuaaacucauaaaacaggaacucgacaaauacaaaaacgccguaacagaccuccaaaugcucaugugcuccacccccgccgccggcucaggcuccgccaucgcaagcggaauagcaguuugcaaaguccuccaccuagaaggcgaggucaacaagauuaaaaacgcacuucucucaaccaacaaggccgucguaucacucucaaacggcgucuccguccucaccuucaaaguucuggaccucaaaaacuacaucgauaaacaacuacucccaauacuuaacaaacaaucaugcuccaucccaaaccccgaaaccgucauggaguuccaacagaaaaacaaccgccuacuggaaaucacacgcgaguucagcguaaacgcuggcgucacuacacccgucuccaccuacaugcucaccaauucugaacuccuaucacucauaaacgacaugcccauuaccaacgaccaaaagaaacuaaugucaaacaacguccaaaucguaagacaacaaucguauuccaucaugugcauaauuaaagaagaaguucucgccuacgugguccaacuaccccucuacggagucauagacacuccuuguuggaaacuccacaccucuccccucugcacuaccaacacaaaagaaggcuccaacaucugccucacccgaaccgacagaggcugguacugcgacaacgccggcuccgucuccuucuucccccaagccgaaaccugcaaagucugcuccaaccgcguuuucugcgacaccaugaacucccucacacuccccuccgaagucaaccuauguaacauagacauauucaacccaaaauacgacugcaaaaucaugacauccaaaaccgacgugucuuccucggucaucaccucccucggcgccaucgucucaugcuacggcaaaacuaaaugcaccgcauccaacaaaaacaaaggcauaaucaaaacauucuccaacggcugcgacuacguuucuaacaaaggcgucgauaccgucuccgucggaaacacccucuacuacguaaacaagcaagaaggccagucccuauacguaaaaggagaaccaauuaucaacuucuacgacccccuagucuuccccuccgacgaguucgacgccuccauaucccaagucaacgagaaaaucaaccaaucccuagccuucauccgcaaaucagacgaacuccuccacaacgucaacgucggaaaauccacaacuaacaucaugaucaccaccaucauuaucgucaucauaguuauacuccuccuccucauagccgucggccucuuccuauacugcaaagcucgcuaaggacuaguacuggcugcaucucccuuuccucuguccuccauccuucucccaggauggugaagggggaccugguacccagugauccccaccccaggauccuaaaucaugacuuaccugcuaauaaaaacucauuggaaaagugagaagaucuaaaaaaaaaaaaaaaaaaaaaaaaaaaaaaaaaaaaaaaaaaaaaaaaaaaaaaaaaaaaaaaaugcaucccccccccccccccccccccccccccccccaaaggcucuuuucagagccaccagaauu

SEQ ID NO: 18088 - RNA, 1853 nt, Artificial Sequence
  mRNA product Design c-1 comprising derived and/or modified sequence from HRSV(Memphis-37)__AIY60640.1__F-del_DSCav1_mut6 (opt1)
gggagaguccgcucagccagguugcagaagcggcuuagcguguguccuaaucuucucucugcguguagguaggccugugccgcaaacaagcuuaccauggagcugcccauccucaagaccaacgccaucaccacgauccuggccgcggugacccugugcuucgccagcucccagaacaucaccgaggaguucuaccagagcacgugcuccgccgucagcaagggcuaccucggcgcccugcgcaccgggugguacaccagcgugaucaccaucgagcuguccaacaucaaggagaacaagugcaacggcaccgacgccaaggugaagcucaucaagcaggagcuggacaaguacaagaacgcggucacggaccugcagaugcugaugugcagcaccccggccgccggcuccgggagcgcgaucgccuccggcaucgccgucugcaaggugcugcaccucgagggcgaggugaacaagaucaagaacgcccugcuguccaccaacaaggccgucgugagccucuccaacggggugagcguccugaccuucaaggugcuggaccucaagaacuacaucgacaagcagcugcugcccauccugaacaagcagagcugcuccauccccaaccccgagaccgucauggaguuccagcagaagaacaaccgccuccuggagaucacgcgggaguucagcgugaacgcgggcgugaccacccccgucuccaccuacaugcugacgaacagcgagcuccugucccugaucaacgacaugccgaucaccaacgaccagaagaagcucaugagcaacaacgugcagaucgugcgccagcaguccuacagcaucaugugcaucaucaaggaggagguccuggccuacguggugcagcugccccucuacggggucaucgacacccccugcuggaagcugcacaccagcccccugugcacgaccaacaccaaggagggcuccaacaucugccucacccggacggaccgcgggugguacugcgacaacgccggcagcguguccuucuucccgcaggccgagaccugcaaggucugcagcaaccggguguucugcgacaccaugaacucccugacccugcccagcgaggugaaccucugcaacaucgacaucuucaaccccaaguacgacugcaagaucaugacguccaagaccgacgucagcuccagcgugaucaccucccugggcgccaucgugagcugcuacgggaagaccaagugcacggcgagcaacaagaacaagggcaucaucaagaccuucuccaacgggugcgacuacgucagcaacaagggcguggacaccguguccgucggcaacacccuguacuacgugaacaagcaggagggccagagccucuacgugaagggggagcccaucaucaacuucuacgacccgcuggucuuccccuccgacgaguucgacgccagcaucucccaggugaacgagaagaucaaccagagccuggccuucauccggaaguccgacgagcuccugcacaacgugaacgucggcaagagcaccacgaacaucaugaucaccaccaucaucaucgugaucaucgugauccugcugcuccugaucgccgucgggcuguuccucuacugcaaggcccgcugaggacuaguguccaccugucccuccugggcugcuggauugucucguuuuccugccaaauaaacaggaucagcgcuuuacagaucuaaaaaaaaaaaaaaaaaaaaaaaaaaaaaaaaaaaaaaaaaaaaaaaaaaaaaaaaaaaaaaaaugcaucccccccccccccccccccccccccccccccaaaggcucuuuucagagccaccagaauu

SEQ ID NO: 18089 - RNA, 1853 nt, Artificial Sequence
  mRNA product Design c-1 comprising derived and/or modified sequence from HRSV(Memphis-37)__AIY60640.1__F-del_DSCav1_mut6 (opt1)
gggagaguccgcucagccagguugcagaagcggcuuagcguguguccuaaucuucucucugcguguagguaggccugugccgcaaacaagcuuaccauggagcugcccauccucaagaccaacgccaucaccacgauccuggccgcggugacccugugcuucgccagcucccagaacaucaccgaggaguucuaccagagcacgugcuccgccgucagcaagggcuaccucggggcccugcgcaccggcugguacaccuccgugaucaccaucgagcugagcaacaucaaggagaacaagugcaacgggaccgacgccaaggugaagcucaucaagcaggagcuggacaaguacaagaacgcggucacggaccugcagaugcucaugugcuccaccccggccgccggcagcggguccgccaucgcgagcggcaucgccgugugcaaggugcugcaccuggagggcgaggucaacaagaucaagaacgcccuccuguccaccaacaaggccguggugagccuguccaacggggucagcgugcucaccuucaaggugcuggaccugaagaacuacaucgacaagcagcuccugcccauccugaacaagcaguccugcagcauccccaaccccgagacggucauggaguuccagcagaagaacaaccggcuccuggagaucacccgcgaguucuccgugaacgccggcgugaccaccccggucagcacguacaugcugaccaacuccgagcuccugagccugaucaacgacaugcccaucaccaacgaccagaagaagcucaugagcaacaacgugcagaucgugcggcagcaguccuacagcaucaugugcaucaucaaggaggagguccuggcguacguggugcagcugccccucuacggggucaucgacacccccugcuggaagcugcacacguccccgcugugcaccaccaacaccaaggagggcagcaacaucugccucacgcgcaccgaccgggggugguacugcgacaacgccggcuccgugagcuucuucccccaggccgagaccugcaaggugugcuccaaccgcgucuucugcgacaccaugaacagccugacgcugcccuccgaggugaaccucugcaacaucgacaucuucaaccccaaguacgacugcaagaucaugaccagcaagaccgacgucuccagcuccgugaucaccagccugggcgccaucguguccugcuacgggaagacgaagugcaccgccagcaacaagaacaagggcaucaucaagaccuucuccaacgggugcgacuacgucagcaacaagggcguggacaccguguccgucggcaacacgcuguacuacgugaacaagcaggaggggcagagccucuacgugaagggcgagccgaucaucaacuucuacgacccccuggucuuccccagcgacgaguucgacgcguccaucagccaggugaacgagaagaucaaccagucccuggccuucauccgcaagagcgacgagcuccugcacaacgugaacgucgggaaguccaccaccaacaucaugaucaccaccaucaucaucgugaucaucgugauccugcuccugcugaucgccgucggccucuuccuguacugcaaggcccggugaggacuaguguccaccugucccuccugggcugcuggauugucucguuuuccugccaaauaaacaggaucagcgcuuuacagaucuaaaaaaaaaaaaaaaaaaaaaaaaaaaaaaaaaaaaaaaaaaaaaaaaaaaaaaaaaaaaaaaaugcaucccccccccccccccccccccccccccccccaaaggcucuuuucagagccaccagaauu

SEQ ID NO: 18090 - RNA, 1853 nt, Artificial Sequence
  mRNA product Design c-1 comprising derived and/or modified sequence from HRSV(Memphis-37)__AIY60640.1__F-del_DSCav1_mut6 (opt2)
gggagaguccgcucagccagguugcagaagcggcuuagcguguguccuaaucuucucucugcguguagguaggccugugccgcaaacaagcuuaccauggagcuccccauccucaagaccaacgccaucaccaccauccucgccgccgucacccucugcuucgccuccucccagaacaucaccgaggaguucuaccaguccaccugcuccgccgucuccaagggcuaccucggcgcccuccgcaccggcugguacaccuccgucaucaccaucgagcucuccaacaucaaggagaacaagugcaacggcaccgacgccaaggucaagcucaucaagcaggagcucgacaaguacaagaacgccgucaccgaccuccagaugcucaugugcuccacccccgccgccggcuccggcuccgccaucgccuccggcaucgccgucugcaagguccuccaccucgagggcgaggucaacaagaucaagaacgcccuccucuccaccaacaaggccgucgucucccucuccaacggcgucuccguccucaccuucaagguccucgaccucaagaacuacaucgacaagcagcuccuccccauccucaacaagcaguccugcuccauccccaaccccgagaccgucauggaguuccagcagaagaacaaccgccuccucgagaucacccgcgaguucuccgucaacgccggcgucaccacccccgucuccaccuacaugcucaccaacuccgagcuccucucccucaucaacgacaugcccaucaccaacgaccagaagaagcucauguccaacaacguccagaucguccgccagcaguccuacuccaucaugugcaucaucaaggaggagguccucgccuacgucguccagcucccccucuacggcgucaucgacacccccugcuggaagcuccacaccuccccccucugcaccaccaacaccaaggagggcuccaacaucugccucacccgcaccgaccgcggcugguacugcgacaacgccggcuccgucuccuucuucccccaggccgagaccugcaaggucugcuccaaccgcgucuucugcgacaccaugaacucccucacccuccccuccgaggucaaccucugcaacaucgacaucuucaaccccaaguacgacugcaagaucaugaccuccaagaccgacgucuccuccuccgucaucaccucccucggcgccaucgucuccugcuacggcaagaccaagugcaccgccuccaacaagaacaagggcaucaucaagaccuucuccaacggcugcgacuacgucuccaacaagggcgucgacaccgucuccgucggcaacacccucuacuacgucaacaagcaggagggccagucccucuacgucaagggcgagcccaucaucaacuucuacgacccccucgucuuccccuccgacgaguucgacgccuccaucucccaggucaacgagaagaucaaccagucccucgccuucauccgcaaguccgacgagcuccuccacaacgucaacgucggcaaguccaccaccaacaucaugaucaccaccaucaucaucgucaucaucgucauccuccuccuccucaucgccgucggccucuuccucuacugcaaggcccgcugaggacuaguguccaccugucccuccugggcugcuggauugucucguuuuccugccaaauaaacaggaucagcgcuuuacagaucuaaaaaaaaaaaaaaaaaaaaaaaaaaaaaaaaaaaaaaaaaaaaaaaaaaaaaaaaaaaaaaaaugcaucccccccccccccccccccccccccccccccaaaggcucuuuucagagccaccagaauu

SEQ ID NO: 18091 - RNA, 1853 nt, Artificial Sequence
  mRNA product Design c-1 comprising derived and/or modified sequence from HRSV(Memphis-37)__AIY60640.1__F-del_DSCav1_mut6 (opt3)
gggagaguccgcucagccagguugcagaagcggcuuagcguguguccuaaucuucucucugcguguagguaggccugugccgcaaacaagcuuaccauggagcugcccauccucaagaccaacgccauuacaacuauacuugcugcagugacgcugugcuucgccagcucccagaauaucaccgaagaguuuuaccaaucuacauguucagcggucaguaaaggcuauuugggggcuuuaagaacuggaugguacaccagcguuauuacaaucgaacuguccaacauuaaggagaauaaaugcaacgguaccgacgccaaggugaaacuaaucaagcaggaacucgauaaguauaaaaaugcaguaacugaccugcagaugcuuauguguucuacuccugccgcuggcucggggucagcaauagccagcggaaucgcugugugcaagguccugcacuuggagggcgaggugaacaaaauuaagaaugcccuccugaguaccaacaaagcgguugugucccugucuaauggugucagcgugcucacguucaagguauuagaucugaagaacuacaucgacaaacagcuuuugccaauucugaauaagcaauccuguucaaucccgaaccccgaaacuguuauggaguuucagcagaaaaauaacaggcuacucgaaauaacccgggaguucagugugaaugcaggggucacaacuccugugagcaccuauaugcugacaaacucugagcuucuguccuugauuaacgauaugccaaucaccaaugaccagaagaaacucaugucaaacaaugugcaaauuguccgccagcagagcuacaguaucaugugcaucauuaaggaagagguucuggccuaugugguacaguuaccccuguacggagugauagauacgccuuguuggaaacuccauacuucuccacuuugcacaaccaacacuaaggaaggcuccaauaucugucugacacgaaccgaccguggcugguacugcgauaacgcugggagcgucucguuuuucccccaagccgagacguguaaggugugcucuaauagaguuuucugcgacaccaugaacuccuugacacuaccuucagaagugaaucuguguaacauugauaucuucaauccaaaauaugacugcaagauaaugacaaguaaaaccgaugucagcuccucugugauuacaagccucggagcaaucguaucauguuacgguaagacuaaaugcaccgcuaguaacaagaauaagggcaucauuaaaacauuuuccaacgggugugacuauguuagcaauaagggaguggacaccgucucugugggcaacacucuguacuaugucaacaaacaggagggucagucacuuuacgugaagggggagccgaucauuaauuucuaugauccccugguuuuuccuagugacgaauuugaugccagcauaucccaagugaacgagaaaaucaaucagucuuuggcguuuauuaggaagucggacgaacuccugcacaacguaaaugucggaaagagcacgacaaacaucaugaucaccacuauuauaaucgugauuaucguuauuuuacugcuacucaucgccgugggccuguuccuuuacugcaaagcacggugaggacuaguguccaccugucccuccugggcugcuggauugucucguuuuccugccaaauaaacaggaucagcgcuuuacagaucuaaaaaaaaaaaaaaaaaaaaaaaaaaaaaaaaaaaaaaaaaaaaaaaaaaaaaaaaaaaaaaaaugcaucccccccccccccccccccccccccccccccaaaggcucuuuucagagccaccagaauu

SEQ ID NO: 18092 - RNA, 1853 nt, Artificial Sequence
  mRNA product Design c-1 comprising derived and/or modified sequence from HRSV(Memphis-37)__AIY60640.1__F-del_DSCav1_mut6 (opt4)
gggagaguccgcucagccagguugcagaagcggcuuagcguguguccuaaucuucucucugcguguagguaggccugugccgcaaacaagcuuaccauggagcugcccauccugaagaccaacgccaucaccaccauccuggccgccgugacccugugcuucgccagcagccagaacaucaccgaggaguucuaccagagcaccugcagcgccgugagcaagggcuaccugggcgcccugagaaccggcugguacaccagcgugaucaccaucgagcugagcaacaucaaggagaacaagugcaacggcaccgacgccaaggugaagcugaucaagcaggagcuggacaaguacaagaacgccgugaccgaccugcagaugcugaugugcagcacccccgccgccggcagcggcagcgccaucgccagcggcaucgccgugugcaaggugcugcaccuggagggcgaggugaacaagaucaagaacgcccugcugagcaccaacaaggccguggugagccugagcaacggcgugagcgugcugaccuucaaggugcuggaccugaagaacuacaucgacaagcagcugcugcccauccugaacaagcagagcugcagcauccccaaccccgagaccgugauggaguuccagcagaagaacaacagacugcuggagaucaccagagaguucagcgugaacgccggcgugaccacccccgugagcaccuacaugcugaccaacagcgagcugcugagccugaucaacgacaugcccaucaccaacgaccagaagaagcugaugagcaacaacgugcagaucgugagacagcagagcuacagcaucaugugcaucaucaaggaggaggugcuggccuacguggugcagcugccccuguacggcgugaucgacacccccugcuggaagcugcacaccagcccccugugcaccaccaacaccaaggagggcagcaacaucugccugaccagaaccgacagaggcugguacugcgacaacgccggcagcgugagcuucuucccccaggccgagaccugcaaggugugcagcaacagaguguucugcgacaccaugaacagccugacccugcccagcgaggugaaccugugcaacaucgacaucuucaaccccaaguacgacugcaagaucaugaccagcaagaccgacgugagcagcagcgugaucaccagccugggcgccaucgugagcugcuacggcaagaccaagugcaccgccagcaacaagaacaagggcaucaucaagaccuucagcaacggcugcgacuacgugagcaacaagggcguggacaccgugagcgugggcaacacccuguacuacgugaacaagcaggagggccagagccuguacgugaagggcgagcccaucaucaacuucuacgacccccugguguuccccagcgacgaguucgacgccagcaucagccaggugaacgagaagaucaaccagagccuggccuucaucagaaagagcgacgagcugcugcacaacgugaacgugggcaagagcaccaccaacaucaugaucaccaccaucaucaucgugaucaucgugauccugcugcugcugaucgccgugggccuguuccuguacugcaaggccagaugaggacuaguguccaccugucccuccugggcugcuggauugucucguuuuccugccaaauaaacaggaucagcgcuuuacagaucuaaaaaaaaaaaaaaaaaaaaaaaaaaaaaaaaaaaaaaaaaaaaaaaaaaaaaaaaaaaaaaaaugcaucccccccccccccccccccccccccccccccaaaggcucuuuucagagccaccagaauu

SEQ ID NO: 18093 - RNA, 1853 nt, Artificial Sequence
  mRNA product Design c-1 comprising derived and/or modified sequence from HRSV(Memphis-37)__AIY60640.1__F-del_DSCav1_mut6 (opt5)
gggagaguccgcucagccagguugcagaagcggcuuagcguguguccuaaucuucucucugcguguagguaggccugugccgcaaacaagcuuaccauggagcugcccauccucaagaccaacgccauuacaacgauccuggcugccgugacccuuugcuucgcgagcucccagaauauuacagaagaguuuuaccaaucuaccuguagcgcugucuccaaaggcuaucugggggcccucagaacaggaugguacaccucuguuaucacaauugaacugagcaacaucaaggagaauaaaugcaacggcaccgacgccaaggugaaacuuaucaagcaggaacuggauaaguauaaaaaugcugugacggaccuccagaugcugauguguuccaccccugccgcugggucuggaagcgccauugcguccggcaucgccgucugcaaggugcugcaccucgagggggagguuaacaaaauuaagaaugcucugcuuagcacaaacaaagccguggucucucuguccaauggagugagcguucucaccuucaaggugcuggaucuuaagaacuacaucgacaaacagcugcucccgauucugaauaagcaaucuuguuccauccccaacccugaaacagucauggaguuucagcagaaaaauaaccggcugcucgaaauuacccgcgaguucagcgugaaugcuggcgugacgacacccgucucuaccuauaugcugacaaacuccgagcuucugagccucaucaacgauaugccuaucaccaaugaccagaagaaacugauguccaacaauguucaaauugugagacagcagucuuacagcaucaugugcauuaucaaggaagaggugcuugccuaugucgugcagcugccccucuacggcguuauugauaccccuuguuggaaacugcauacauccccgcugugcacgaccaacacaaaggaagggagcaauaucugucucacccggacagaccgcggaugguacugcgauaacgcgggcucuguguccuuuuucccccaagccgagaccuguaaggucugcagcaauagaguguuuugcgacacgaugaacucucugacacuuccuagcgaaguuaaucuguguaacaucgauauuuucaaucccaaauaugacugcaagaucaugaccuccaaaaccgaugugucuagcuccgucauuacaagccucggggcuaucgugucuuguuacggaaagaccaaaugcacagccuccaacaagaauaagggcauuaucaaaacguuuagcaacgggugugacuaugucucuaauaagggaguggacaccguuuccgugggcaacacacuguacuaugucaacaaacaggagggccagagccuuuacgugaagggggagccuaucauuaauuucuaugauccccugguuuuuccguccgacgaauuugaugcuucuaucagccaagugaacgagaaaauuaaucagucccucgccuucauccggaagucugacgaacugcugcacaacgucaaugugggaaagagcaccacaaacauuaugaucaccacgauuaucaucgugauuaucguuauucuccugcuucugaucgccgucggccucuuccuguacugcaaagcucgcugaggacuaguguccaccugucccuccugggcugcuggauugucucguuuuccugccaaauaaacaggaucagcgcuuuacagaucuaaaaaaaaaaaaaaaaaaaaaaaaaaaaaaaaaaaaaaaaaaaaaaaaaaaaaaaaaaaaaaaaugcaucccccccccccccccccccccccccccccccaaaggcucuuuucagagccaccagaauu

SEQ ID NO: 18094 - RNA, 1853 nt, Artificial Sequence
  mRNA product Design c-1 comprising derived and/or modified sequence from HRSV(Memphis-37)__AIY60640.1__F-del_DSCav1_mut6 (opt6)
gggagaguccgcucagccagguugcagaagcggcuuagcguguguccuaaucuucucucugcguguagguaggccugugccgcaaacaagcuuaccauggaacuaccuauacuaaaaaccaacgccauaacaacaauacuagccgcaguuacacucugcuuugcauccucacaaaacaucacagaggaauuuuaccaaucuacuugcuccgcaguaucaaaaggauaccuaggagcacuccguacaggaugguacacaucagucauaacaauugaauuaucuaacaucaaagaaaacaaauguaaugguacagacgccaaaguaaaauuaauaaaacaagaacuagacaaauacaaaaacgccguaacagaccuacaaaugcuaaugugcucaacccccgccgcaggaucuggaucagcaauugccucaggcauagcaguaugcaaaguccuacaccuagaaggagaagucaacaaaauaaaaaacgcucuccucucaaccaauaaagcaguaguaucccucucaaacggaguaucaguacuaacauucaaaguacuagaccucaaaaauuauauagacaagcaacuacucccaauauuaaauaaacaauccugcucaauacccaauccagaaacagucauggaauuucaacaaaaaaacaaccgacucuuagaaauaacaagagaauuuucagucaaugccggcgucacaaccccaguaucaacauacaugcuaacaaacucagaacuacuaucacuaaucaacgauaugcccauaaccaacgaccaaaaaaaacuaaugucaaacaauguacaaauuguaagacaacagucuuauucaauaaugugcauaauaaaagaagaagucuuagcauauguaguacaacuaccacuauacggaguaauagacacaccauguuggaaauuacacacauccccacuauguaccaccaacacaaaagaaggaucuaacauaugccuaaccagaacagaccgaggcugguauugcgacaaugcaggaucaguauccuucuuuccacaagcagaaacaugcaaagucugcucuaacagaguauucugcgauacuaugaacucacuuaccuuaccaucagaaguaaaucuauguaauaucgacauauucaaucccaaauaugauugcaaaauaaugaccucaaaaacagauguaucaucaucagucauaacaucacuaggagcaauagucagcugcuaugggaaaacaaaaugcacagcuuccaacaaaaacaaaggaaucauaaaaacauucucaaaugguugugacuacguauccaacaaaggaguagauacaguaucuguaggcaacacauuauacuauguaaauaaacaagaaggacaaagccuauacgucaaaggagaacccaucauaaauuucuaugacccauuaguuuucccaucugacgaauuugacgcuuccaucucccaaguaaaugaaaaaaucaaccaaagccucgcauucauucgcaaaucugacgaauuacuccacaacguaaacguaggaaaauccacaacaaacauuaugaucaccaccauaauaaucguaauaauagucauauuacuacuccucauagcaguaggacuauuccuauacuguaaagcuagauaaggacuaguguccaccugucccuccugggcugcuggauugucucguuuuccugccaaauaaacaggaucagcgcuuuacagaucuaaaaaaaaaaaaaaaaaaaaaaaaaaaaaaaaaaaaaaaaaaaaaaaaaaaaaaaaaaaaaaaaugcaucccccccccccccccccccccccccccccccaaaggcucuuuucagagccaccagaauu

SEQ ID NO: 18095 - RNA, 1853 nt, Artificial Sequence
  mRNA product Design c-1 comprising derived and/or modified sequence from HRSV(Memphis-37)__AIY60640.1__F-del_DSCav1_mut6 (opt11)
gggagaguccgcucagccagguugcagaagcggcuuagcguguguccuaaucuucucucugcguguagguaggccugugccgcaaacaagcuuaccauggaauuaccaauccucaaaacuaacgccaucaccaccauccucgcugccgucacccucugcuucgccuccagccaaaacaucacagaagaguucuaccaaagcacaugcuccgcugucuccaaaggcuaccuuggcgcccuccgcaccggcugguacaccucaguaauuaccauugaacuaagcaacaucaaagaaaauaaaugcaacggcaccgacgccaaaguuaaacucauaaaacaggaacucgacaaauacaaaaacgccguaacagaccuccaaaugcucaugugcuccacccccgccgccggcucaggcuccgccaucgcaagcggaauagcaguuugcaaaguccuccaccuagaaggcgaggucaacaagauuaaaaacgcacuucucucaaccaacaaggccgucguaucacucucaaacggcgucuccguccucaccuucaaaguucuggaccucaaaaacuacaucgauaaacaacuacucccaauacuuaacaaacaaucaugcuccaucccaaaccccgaaaccgucauggaguuccaacagaaaaacaaccgccuacuggaaaucacacgcgaguucagcguaaacgcuggcgucacuacacccgucuccaccuacaugcucaccaauucugaacuccuaucacucauaaacgacaugcccauuaccaacgaccaaaagaaacuaaugucaaacaacguccaaaucguaagacaacaaucguauuccaucaugugcauaauuaaagaagaaguucucgccuacgugguccaacuaccccucuacggagucauagacacuccuuguuggaaacuccacaccucuccccucugcacuaccaacacaaaagaaggcuccaacaucugccucacccgaaccgacagaggcugguacugcgacaacgccggcuccgucuccuucuucccccaagccgaaaccugcaaagucugcuccaaccgcguuuucugcgacaccaugaacucccucacacuccccuccgaagucaaccuauguaacauagacauauucaacccaaaauacgacugcaaaaucaugacauccaaaaccgacgugucuuccucggucaucaccucccucggcgccaucgucucaugcuacggcaaaacuaaaugcaccgcauccaacaaaaacaaaggcauaaucaaaacauucuccaacggcugcgacuacguuucuaacaaaggcgucgauaccgucuccgucggaaacacccucuacuacguaaacaagcaagaaggccagucccuauacguaaaaggagaaccaauuaucaacuucuacgacccccuagucuuccccuccgacgaguucgacgccuccauaucccaagucaacgagaaaaucaaccaaucccuagccuucauccgcaaaucagacgaacuccuccacaacgucaacgucggaaaauccacaacuaacaucaugaucaccaccaucauuaucgucaucauaguuauacuccuccuccucauagccgucggccucuuccuauacugcaaagcucgcuaaggacuaguguccaccugucccuccugggcugcuggauugucucguuuuccugccaaauaaacaggaucagcgcuuuacagaucuaaaaaaaaaaaaaaaaaaaaaaaaaaaaaaaaaaaaaaaaaaaaaaaaaaaaaaaaaaaaaaaaugcaucccccccccccccccccccccccccccccccaaaggcucuuuucagagccaccagaauu

SEQ ID NO: 18096 - RNA, 1943 nt, Artificial Sequence
  mRNA product Design c-2 comprising derived and/or modified sequence from HRSV(Memphis-37)__AIY60640.1__F-del_DSCav1_mut6 (opt1)
gggagacuccugucgggcggaaguaggaggaguagaguuuaaaaacaguacucuuuuuccgguucgggacguaguugaagcaacgacaagccggauaaccgcucuugagacaggaagcuuaccauggagcugcccauccucaagaccaacgccaucaccacgauccuggccgcggugacccugugcuucgccagcucccagaacaucaccgaggaguucuaccagagcacgugcuccgccgucagcaagggcuaccucggcgcccugcgcaccgggugguacaccagcgugaucaccaucgagcuguccaacaucaaggagaacaagugcaacggcaccgacgccaaggugaagcucaucaagcaggagcuggacaaguacaagaacgcggucacggaccugcagaugcugaugugcagcaccccggccgccggcuccgggagcgcgaucgccuccggcaucgccgucugcaaggugcugcaccucgagggcgaggugaacaagaucaagaacgcccugcuguccaccaacaaggccgucgugagccucuccaacggggugagcguccugaccuucaaggugcuggaccucaagaacuacaucgacaagcagcugcugcccauccugaacaagcagagcugcuccauccccaaccccgagaccgucauggaguuccagcagaagaacaaccgccuccuggagaucacgcgggaguucagcgugaacgcgggcgugaccacccccgucuccaccuacaugcugacgaacagcgagcuccugucccugaucaacgacaugccgaucaccaacgaccagaagaagcucaugagcaacaacgugcagaucgugcgccagcaguccuacagcaucaugugcaucaucaaggaggagguccuggccuacguggugcagcugccccucuacggggucaucgacacccccugcuggaagcugcacaccagcccccugugcacgaccaacaccaaggagggcuccaacaucugccucacccggacggaccgcgggugguacugcgacaacgccggcagcguguccuucuucccgcaggccgagaccugcaaggucugcagcaaccggguguucugcgacaccaugaacucccugacccugcccagcgaggugaaccucugcaacaucgacaucuucaaccccaaguacgacugcaagaucaugacguccaagaccgacgucagcuccagcgugaucaccucccugggcgccaucgugagcugcuacgggaagaccaagugcacggcgagcaacaagaacaagggcaucaucaagaccuucuccaacgggugcgacuacgucagcaacaagggcguggacaccguguccgucggcaacacccuguacuacgugaacaagcaggagggccagagccucuacgugaagggggagcccaucaucaacuucuacgacccgcuggucuuccccuccgacgaguucgacgccagcaucucccaggugaacgagaagaucaaccagagccuggccuucauccggaaguccgacgagcuccugcacaacgugaacgucggcaagagcaccacgaacaucaugaucaccaccaucaucaucgugaucaucgugauccugcugcuccugaucgccgucgggcuguuccucuacugcaaggcccgcugaggacuaguggaagcauuuuccuggcugauuaaaagaaauuacucagcuauggucaucuguuccuguuagaaggcuaugcagcauauuauauacuaugcgcauguuaugaaaugcauaauaaaaaauuuuaaaaaaucuaaaagaucuaaaaaaaaaaaaaaaaaaaaaaaaaaaaaaaaaaaaaaaaaaaaaaaaaaaaaaaaaaaaaaaaugcaucccccccccccccccccccccccccccccccaaaggcucuuuucagagccaccagaauu

SEQ ID NO: 18097 - RNA, 1943 nt, Artificial Sequence
  mRNA product Design c-2 comprising derived and/or modified sequence from HRSV(Memphis-37)__AIY60640.1__F-del_DSCav1_mut6 (opt1)
gggagacuccugucgggcggaaguaggaggaguagaguuuaaaaacaguacucuuuuuccgguucgggacguaguugaagcaacgacaagccggauaaccgcucuugagacaggaagcuuaccauggagcugcccauccucaagaccaacgccaucaccacgauccuggccgcggugacccugugcuucgccagcucccagaacaucaccgaggaguucuaccagagcacgugcuccgccgucagcaagggcuaccucggggcccugcgcaccggcugguacaccuccgugaucaccaucgagcugagcaacaucaaggagaacaagugcaacgggaccgacgccaaggugaagcucaucaagcaggagcuggacaaguacaagaacgcggucacggaccugcagaugcucaugugcuccaccccggccgccggcagcggguccgccaucgcgagcggcaucgccgugugcaaggugcugcaccuggagggcgaggucaacaagaucaagaacgcccuccuguccaccaacaaggccguggugagccuguccaacggggucagcgugcucaccuucaaggugcuggaccugaagaacuacaucgacaagcagcuccugcccauccugaacaagcaguccugcagcauccccaaccccgagacggucauggaguuccagcagaagaacaaccggcuccuggagaucacccgcgaguucuccgugaacgccggcgugaccaccccggucagcacguacaugcugaccaacuccgagcuccugagccugaucaacgacaugcccaucaccaacgaccagaagaagcucaugagcaacaacgugcagaucgugcggcagcaguccuacagcaucaugugcaucaucaaggaggagguccuggcguacguggugcagcugccccucuacggggucaucgacacccccugcuggaagcugcacacguccccgcugugcaccaccaacaccaaggagggcagcaacaucugccucacgcgcaccgaccgggggugguacugcgacaacgccggcuccgugagcuucuucccccaggccgagaccugcaaggugugcuccaaccgcgucuucugcgacaccaugaacagccugacgcugcccuccgaggugaaccucugcaacaucgacaucuucaaccccaaguacgacugcaagaucaugaccagcaagaccgacgucuccagcuccgugaucaccagccugggcgccaucguguccugcuacgggaagacgaagugcaccgccagcaacaagaacaagggcaucaucaagaccuucuccaacgggugcgacuacgucagcaacaagggcguggacaccguguccgucggcaacacgcuguacuacgugaacaagcaggaggggcagagccucuacgugaagggcgagccgaucaucaacuucuacgacccccuggucuuccccagcgacgaguucgacgcguccaucagccaggugaacgagaagaucaaccagucccuggccuucauccgcaagagcgacgagcuccugcacaacgugaacgucgggaaguccaccaccaacaucaugaucaccaccaucaucaucgugaucaucgugauccugcuccugcugaucgccgucggccucuuccuguacugcaaggcccggugaggacuaguggaagcauuuuccuggcugauuaaaagaaauuacucagcuauggucaucuguuccuguuagaaggcuaugcagcauauuauauacuaugcgcauguuaugaaaugcauaauaaaaaauuuuaaaaaaucuaaaagaucuaaaaaaaaaaaaaaaaaaaaaaaaaaaaaaaaaaaaaaaaaaaaaaaaaaaaaaaaaaaaaaaaugcaucccccccccccccccccccccccccccccccaaaggcucuuuucagagccaccagaauu

SEQ ID NO: 18098 - RNA, 1943 nt, Artificial Sequence
  mRNA product Design c-2 comprising derived and/or modified sequence from HRSV(Memphis-37)__AIY60640.1__F-del_DSCav1_mut6 (opt2)
gggagacuccugucgggcggaaguaggaggaguagaguuuaaaaacaguacucuuuuuccgguucgggacguaguugaagcaacgacaagccggauaaccgcucuugagacaggaagcuuaccauggagcuccccauccucaagaccaacgccaucaccaccauccucgccgccgucacccucugcuucgccuccucccagaacaucaccgaggaguucuaccaguccaccugcuccgccgucuccaagggcuaccucggcgcccuccgcaccggcugguacaccuccgucaucaccaucgagcucuccaacaucaaggagaacaagugcaacggcaccgacgccaaggucaagcucaucaagcaggagcucgacaaguacaagaacgccgucaccgaccuccagaugcucaugugcuccacccccgccgccggcuccggcuccgccaucgccuccggcaucgccgucugcaagguccuccaccucgagggcgaggucaacaagaucaagaacgcccuccucuccaccaacaaggccgucgucucccucuccaacggcgucuccguccucaccuucaagguccucgaccucaagaacuacaucgacaagcagcuccuccccauccucaacaagcaguccugcuccauccccaaccccgagaccgucauggaguuccagcagaagaacaaccgccuccucgagaucacccgcgaguucuccgucaacgccggcgucaccacccccgucuccaccuacaugcucaccaacuccgagcuccucucccucaucaacgacaugcccaucaccaacgaccagaagaagcucauguccaacaacguccagaucguccgccagcaguccuacuccaucaugugcaucaucaaggaggagguccucgccuacgucguccagcucccccucuacggcgucaucgacacccccugcuggaagcuccacaccuccccccucugcaccaccaacaccaaggagggcuccaacaucugccucacccgcaccgaccgcggcugguacugcgacaacgccggcuccgucuccuucuucccccaggccgagaccugcaaggucugcuccaaccgcgucuucugcgacaccaugaacucccucacccuccccuccgaggucaaccucugcaacaucgacaucuucaaccccaaguacgacugcaagaucaugaccuccaagaccgacgucuccuccuccgucaucaccucccucggcgccaucgucuccugcuacggcaagaccaagugcaccgccuccaacaagaacaagggcaucaucaagaccuucuccaacggcugcgacuacgucuccaacaagggcgucgacaccgucuccgucggcaacacccucuacuacgucaacaagcaggagggccagucccucuacgucaagggcgagcccaucaucaacuucuacgacccccucgucuuccccuccgacgaguucgacgccuccaucucccaggucaacgagaagaucaaccagucccucgccuucauccgcaaguccgacgagcuccuccacaacgucaacgucggcaaguccaccaccaacaucaugaucaccaccaucaucaucgucaucaucgucauccuccuccuccucaucgccgucggccucuuccucuacugcaaggcccgcugaggacuaguggaagcauuuuccuggcugauuaaaagaaauuacucagcuauggucaucuguuccuguuagaaggcuaugcagcauauuauauacuaugcgcauguuaugaaaugcauaauaaaaaauuuuaaaaaaucuaaaagaucuaaaaaaaaaaaaaaaaaaaaaaaaaaaaaaaaaaaaaaaaaaaaaaaaaaaaaaaaaaaaaaaaugcaucccccccccccccccccccccccccccccccaaaggcucuuuucagagccaccagaauu

SEQ ID NO: 18099 - RNA, 1943 nt, Artificial Sequence
  mRNA product Design c-2 comprising derived and/or modified sequence from HRSV(Memphis-37)__AIY60640.1__F-del_DSCav1_mut6 (opt3)
gggagacuccugucgggcggaaguaggaggaguagaguuuaaaaacaguacucuuuuuccgguucgggacguaguugaagcaacgacaagccggauaaccgcucuugagacaggaagcuuaccauggagcugcccauccucaagaccaacgccauuacaacuauacuugcugcagugacgcugugcuucgccagcucccagaauaucaccgaagaguuuuaccaaucuacauguucagcggucaguaaaggcuauuugggggcuuuaagaacuggaugguacaccagcguuauuacaaucgaacuguccaacauuaaggagaauaaaugcaacgguaccgacgccaaggugaaacuaaucaagcaggaacucgauaaguauaaaaaugcaguaacugaccugcagaugcuuauguguucuacuccugccgcuggcucggggucagcaauagccagcggaaucgcugugugcaagguccugcacuuggagggcgaggugaacaaaauuaagaaugcccuccugaguaccaacaaagcgguugugucccugucuaauggugucagcgugcucacguucaagguauuagaucugaagaacuacaucgacaaacagcuuuugccaauucugaauaagcaauccuguucaaucccgaaccccgaaacuguuauggaguuucagcagaaaaauaacaggcuacucgaaauaacccgggaguucagugugaaugcaggggucacaacuccugugagcaccuauaugcugacaaacucugagcuucuguccuugauuaacgauaugccaaucaccaaugaccagaagaaacucaugucaaacaaugugcaaauuguccgccagcagagcuacaguaucaugugcaucauuaaggaagagguucuggccuaugugguacaguuaccccuguacggagugauagauacgccuuguuggaaacuccauacuucuccacuuugcacaaccaacacuaaggaaggcuccaauaucugucugacacgaaccgaccguggcugguacugcgauaacgcugggagcgucucguuuuucccccaagccgagacguguaaggugugcucuaauagaguuuucugcgacaccaugaacuccuugacacuaccuucagaagugaaucuguguaacauugauaucuucaauccaaaauaugacugcaagauaaugacaaguaaaaccgaugucagcuccucugugauuacaagccucggagcaaucguaucauguuacgguaagacuaaaugcaccgcuaguaacaagaauaagggcaucauuaaaacauuuuccaacgggugugacuauguuagcaauaagggaguggacaccgucucugugggcaacacucuguacuaugucaacaaacaggagggucagucacuuuacgugaagggggagccgaucauuaauuucuaugauccccugguuuuuccuagugacgaauuugaugccagcauaucccaagugaacgagaaaaucaaucagucuuuggcguuuauuaggaagucggacgaacuccugcacaacguaaaugucggaaagagcacgacaaacaucaugaucaccacuauuauaaucgugauuaucguuauuuuacugcuacucaucgccgugggccuguuccuuuacugcaaagcacggugaggacuaguggaagcauuuuccuggcugauuaaaagaaauuacucagcuauggucaucuguuccuguuagaaggcuaugcagcauauuauauacuaugcgcauguuaugaaaugcauaauaaaaaauuuuaaaaaaucuaaaagaucuaaaaaaaaaaaaaaaaaaaaaaaaaaaaaaaaaaaaaaaaaaaaaaaaaaaaaaaaaaaaaaaaugcaucccccccccccccccccccccccccccccccaaaggcucuuuucagagccaccagaauu

SEQ ID NO: 18100 - RNA, 1943 nt, Artificial Sequence
  mRNA product Design c-2 comprising derived and/or modified sequence from HRSV(Memphis-37)__AIY60640.1__F-del_DSCav1_mut6 (opt4)
gggagacuccugucgggcggaaguaggaggaguagaguuuaaaaacaguacucuuuuuccgguucgggacguaguugaagcaacgacaagccggauaaccgcucuugagacaggaagcuuaccauggagcugcccauccugaagaccaacgccaucaccaccauccuggccgccgugacccugugcuucgccagcagccagaacaucaccgaggaguucuaccagagcaccugcagcgccgugagcaagggcuaccugggcgcccugagaaccggcugguacaccagcgugaucaccaucgagcugagcaacaucaaggagaacaagugcaacggcaccgacgccaaggugaagcugaucaagcaggagcuggacaaguacaagaacgccgugaccgaccugcagaugcugaugugcagcacccccgccgccggcagcggcagcgccaucgccagcggcaucgccgugugcaaggugcugcaccuggagggcgaggugaacaagaucaagaacgcccugcugagcaccaacaaggccguggugagccugagcaacggcgugagcgugcugaccuucaaggugcuggaccugaagaacuacaucgacaagcagcugcugcccauccugaacaagcagagcugcagcauccccaaccccgagaccgugauggaguuccagcagaagaacaacagacugcuggagaucaccagagaguucagcgugaacgccggcgugaccacccccgugagcaccuacaugcugaccaacagcgagcugcugagccugaucaacgacaugcccaucaccaacgaccagaagaagcugaugagcaacaacgugcagaucgugagacagcagagcuacagcaucaugugcaucaucaaggaggaggugcuggccuacguggugcagcugccccuguacggcgugaucgacacccccugcuggaagcugcacaccagcccccugugcaccaccaacaccaaggagggcagcaacaucugccugaccagaaccgacagaggcugguacugcgacaacgccggcagcgugagcuucuucccccaggccgagaccugcaaggugugcagcaacagaguguucugcgacaccaugaacagccugacccugcccagcgaggugaaccugugcaacaucgacaucuucaaccccaaguacgacugcaagaucaugaccagcaagaccgacgugagcagcagcgugaucaccagccugggcgccaucgugagcugcuacggcaagaccaagugcaccgccagcaacaagaacaagggcaucaucaagaccuucagcaacggcugcgacuacgugagcaacaagggcguggacaccgugagcgugggcaacacccuguacuacgugaacaagcaggagggccagagccuguacgugaagggcgagcccaucaucaacuucuacgacccccugguguuccccagcgacgaguucgacgccagcaucagccaggugaacgagaagaucaaccagagccuggccuucaucagaaagagcgacgagcugcugcacaacgugaacgugggcaagagcaccaccaacaucaugaucaccaccaucaucaucgugaucaucgugauccugcugcugcugaucgccgugggccuguuccuguacugcaaggccagaugaggacuaguggaagcauuuuccuggcugauuaaaagaaauuacucagcuauggucaucuguuccuguuagaaggcuaugcagcauauuauauacuaugcgcauguuaugaaaugcauaauaaaaaauuuuaaaaaaucuaaaagaucuaaaaaaaaaaaaaaaaaaaaaaaaaaaaaaaaaaaaaaaaaaaaaaaaaaaaaaaaaaaaaaaaugcaucccccccccccccccccccccccccccccccaaaggcucuuuucagagccaccagaauu

SEQ ID NO: 18101 - RNA, 1943 nt, Artificial Sequence
  mRNA product Design c-2 comprising derived and/or modified sequence from HRSV(Memphis-37)__AIY60640.1__F-del_DSCav1_mut6 (opt5)
gggagacuccugucgggcggaaguaggaggaguagaguuuaaaaacaguacucuuuuuccgguucgggacguaguugaagcaacgacaagccggauaaccgcucuugagacaggaagcuuaccauggagcugcccauccucaagaccaacgccauuacaacgauccuggcugccgugacccuuugcuucgcgagcucccagaauauuacagaagaguuuuaccaaucuaccuguagcgcugucuccaaaggcuaucugggggcccucagaacaggaugguacaccucuguuaucacaauugaacugagcaacaucaaggagaauaaaugcaacggcaccgacgccaaggugaaacuuaucaagcaggaacuggauaaguauaaaaaugcugugacggaccuccagaugcugauguguuccaccccugccgcugggucuggaagcgccauugcguccggcaucgccgucugcaaggugcugcaccucgagggggagguuaacaaaauuaagaaugcucugcuuagcacaaacaaagccguggucucucuguccaauggagugagcguucucaccuucaaggugcuggaucuuaagaacuacaucgacaaacagcugcucccgauucugaauaagcaaucuuguuccauccccaacccugaaacagucauggaguuucagcagaaaaauaaccggcugcucgaaauuacccgcgaguucagcgugaaugcuggcgugacgacacccgucucuaccuauaugcugacaaacuccgagcuucugagccucaucaacgauaugccuaucaccaaugaccagaagaaacugauguccaacaauguucaaauugugagacagcagucuuacagcaucaugugcauuaucaaggaagaggugcuugccuaugucgugcagcugccccucuacggcguuauugauaccccuuguuggaaacugcauacauccccgcugugcacgaccaacacaaaggaagggagcaauaucugucucacccggacagaccgcggaugguacugcgauaacgcgggcucuguguccuuuuucccccaagccgagaccuguaaggucugcagcaauagaguguuuugcgacacgaugaacucucugacacuuccuagcgaaguuaaucuguguaacaucgauauuuucaaucccaaauaugacugcaagaucaugaccuccaaaaccgaugugucuagcuccgucauuacaagccucggggcuaucgugucuuguuacggaaagaccaaaugcacagccuccaacaagaauaagggcauuaucaaaacguuuagcaacgggugugacuaugucucuaauaagggaguggacaccguuuccgugggcaacacacuguacuaugucaacaaacaggagggccagagccuuuacgugaagggggagccuaucauuaauuucuaugauccccugguuuuuccguccgacgaauuugaugcuucuaucagccaagugaacgagaaaauuaaucagucccucgccuucauccggaagucugacgaacugcugcacaacgucaaugugggaaagagcaccacaaacauuaugaucaccacgauuaucaucgugauuaucguuauucuccugcuucugaucgccgucggccucuuccuguacugcaaagcucgcugaggacuaguggaagcauuuuccuggcugauuaaaagaaauuacucagcuauggucaucuguuccuguuagaaggcuaugcagcauauuauauacuaugcgcauguuaugaaaugcauaauaaaaaauuuuaaaaaaucuaaaagaucuaaaaaaaaaaaaaaaaaaaaaaaaaaaaaaaaaaaaaaaaaaaaaaaaaaaaaaaaaaaaaaaaugcaucccccccccccccccccccccccccccccccaaaggcucuuuucagagccaccagaauu

SEQ ID NO: 18102 - RNA, 1943 nt, Artificial Sequence
  mRNA product Design c-2 comprising derived and/or modified sequence from HRSV(Memphis-37)__AIY60640.1__F-del_DSCav1_mut6 (opt6)
gggagacuccugucgggcggaaguaggaggaguagaguuuaaaaacaguacucuuuuuccgguucgggacguaguugaagcaacgacaagccggauaaccgcucuugagacaggaagcuuaccauggaacuaccuauacuaaaaaccaacgccauaacaacaauacuagccgcaguuacacucugcuuugcauccucacaaaacaucacagaggaauuuuaccaaucuacuugcuccgcaguaucaaaaggauaccuaggagcacuccguacaggaugguacacaucagucauaacaauugaauuaucuaacaucaaagaaaacaaauguaaugguacagacgccaaaguaaaauuaauaaaacaagaacuagacaaauacaaaaacgccguaacagaccuacaaaugcuaaugugcucaacccccgccgcaggaucuggaucagcaauugccucaggcauagcaguaugcaaaguccuacaccuagaaggagaagucaacaaaauaaaaaacgcucuccucucaaccaauaaagcaguaguaucccucucaaacggaguaucaguacuaacauucaaaguacuagaccucaaaaauuauauagacaagcaacuacucccaauauuaaauaaacaauccugcucaauacccaauccagaaacagucauggaauuucaacaaaaaaacaaccgacucuuagaaauaacaagagaauuuucagucaaugccggcgucacaaccccaguaucaacauacaugcuaacaaacucagaacuacuaucacuaaucaacgauaugcccauaaccaacgaccaaaaaaaacuaaugucaaacaauguacaaauuguaagacaacagucuuauucaauaaugugcauaauaaaagaagaagucuuagcauauguaguacaacuaccacuauacggaguaauagacacaccauguuggaaauuacacacauccccacuauguaccaccaacacaaaagaaggaucuaacauaugccuaaccagaacagaccgaggcugguauugcgacaaugcaggaucaguauccuucuuuccacaagcagaaacaugcaaagucugcucuaacagaguauucugcgauacuaugaacucacuuaccuuaccaucagaaguaaaucuauguaauaucgacauauucaaucccaaauaugauugcaaaauaaugaccucaaaaacagauguaucaucaucagucauaacaucacuaggagcaauagucagcugcuaugggaaaacaaaaugcacagcuuccaacaaaaacaaaggaaucauaaaaacauucucaaaugguugugacuacguauccaacaaaggaguagauacaguaucuguaggcaacacauuauacuauguaaauaaacaagaaggacaaagccuauacgucaaaggagaacccaucauaaauuucuaugacccauuaguuuucccaucugacgaauuugacgcuuccaucucccaaguaaaugaaaaaaucaaccaaagccucgcauucauucgcaaaucugacgaauuacuccacaacguaaacguaggaaaauccacaacaaacauuaugaucaccaccauaauaaucguaauaauagucauauuacuacuccucauagcaguaggacuauuccuauacuguaaagcuagauaaggacuaguggaagcauuuuccuggcugauuaaaagaaauuacucagcuauggucaucuguuccuguuagaaggcuaugcagcauauuauauacuaugcgcauguuaugaaaugcauaauaaaaaauuuuaaaaaaucuaaaagaucuaaaaaaaaaaaaaaaaaaaaaaaaaaaaaaaaaaaaaaaaaaaaaaaaaaaaaaaaaaaaaaaaugcaucccccccccccccccccccccccccccccccaaaggcucuuuucagagccaccagaauu

SEQ ID NO: 18103 - RNA, 1943 nt, Artificial Sequence
  mRNA product Design c-2 comprising derived and/or modified sequence from HRSV(Memphis-37)__AIY60640.1__F-del_DSCav1_mut6 (opt11)
gggagacuccugucgggcggaaguaggaggaguagaguuuaaaaacaguacucuuuuuccgguucgggacguaguugaagcaacgacaagccggauaaccgcucuugagacaggaagcuuaccauggaauuaccaauccucaaaacuaacgccaucaccaccauccucgcugccgucacccucugcuucgccuccagccaaaacaucacagaagaguucuaccaaagcacaugcuccgcugucuccaaaggcuaccuuggcgcccuccgcaccggcugguacaccucaguaauuaccauugaacuaagcaacaucaaagaaaauaaaugcaacggcaccgacgccaaaguuaaacucauaaaacaggaacucgacaaauacaaaaacgccguaacagaccuccaaaugcucaugugcuccacccccgccgccggcucaggcuccgccaucgcaagcggaauagcaguuugcaaaguccuccaccuagaaggcgaggucaacaagauuaaaaacgcacuucucucaaccaacaaggccgucguaucacucucaaacggcgucuccguccucaccuucaaaguucuggaccucaaaaacuacaucgauaaacaacuacucccaauacuuaacaaacaaucaugcuccaucccaaaccccgaaaccgucauggaguuccaacagaaaaacaaccgccuacuggaaaucacacgcgaguucagcguaaacgcuggcgucacuacacccgucuccaccuacaugcucaccaauucugaacuccuaucacucauaaacgacaugcccauuaccaacgaccaaaagaaacuaaugucaaacaacguccaaaucguaagacaacaaucguauuccaucaugugcauaauuaaagaagaaguucucgccuacgugguccaacuaccccucuacggagucauagacacuccuuguuggaaacuccacaccucuccccucugcacuaccaacacaaaagaaggcuccaacaucugccucacccgaaccgacagaggcugguacugcgacaacgccggcuccgucuccuucuucccccaagccgaaaccugcaaagucugcuccaaccgcguuuucugcgacaccaugaacucccucacacuccccuccgaagucaaccuauguaacauagacauauucaacccaaaauacgacugcaaaaucaugacauccaaaaccgacgugucuuccucggucaucaccucccucggcgccaucgucucaugcuacggcaaaacuaaaugcaccgcauccaacaaaaacaaaggcauaaucaaaacauucuccaacggcugcgacuacguuucuaacaaaggcgucgauaccgucuccgucggaaacacccucuacuacguaaacaagcaagaaggccagucccuauacguaaaaggagaaccaauuaucaacuucuacgacccccuagucuuccccuccgacgaguucgacgccuccauaucccaagucaacgagaaaaucaaccaaucccuagccuucauccgcaaaucagacgaacuccuccacaacgucaacgucggaaaauccacaacuaacaucaugaucaccaccaucauuaucgucaucauaguuauacuccuccuccucauagccgucggccucuuccuauacugcaaagcucgcuaaggacuaguggaagcauuuuccuggcugauuaaaagaaauuacucagcuauggucaucuguuccuguuagaaggcuaugcagcauauuauauacuaugcgcauguuaugaaaugcauaauaaaaaauuuuaaaaaaucuaaaagaucuaaaaaaaaaaaaaaaaaaaaaaaaaaaaaaaaaaaaaaaaaaaaaaaaaaaaaaaaaaaaaaaaugcaucccccccccccccccccccccccccccccccaaaggcucuuuucagagccaccagaauu

SEQ ID NO: 18104 - RNA, 1920 nt, Artificial Sequence
  mRNA product Design c-3 comprising derived and/or modified sequence from HRSV(Memphis-37)__AIY60640.1__F-del_DSCav1_mut6 (opt1)
gggagaguccgcucagccagguugcagaagcggcuuagcguguguccuaaucuucucucugcguguagguaggccugugccgcaaacaagcuuaccauggagcugcccauccucaagaccaacgccaucaccacgauccuggccgcggugacccugugcuucgccagcucccagaacaucaccgaggaguucuaccagagcacgugcuccgccgucagcaagggcuaccucggcgcccugcgcaccgggugguacaccagcgugaucaccaucgagcuguccaacaucaaggagaacaagugcaacggcaccgacgccaaggugaagcucaucaagcaggagcuggacaaguacaagaacgcggucacggaccugcagaugcugaugugcagcaccccggccgccggcuccgggagcgcgaucgccuccggcaucgccgucugcaaggugcugcaccucgagggcgaggugaacaagaucaagaacgcccugcuguccaccaacaaggccgucgugagccucuccaacggggugagcguccugaccuucaaggugcuggaccucaagaacuacaucgacaagcagcugcugcccauccugaacaagcagagcugcuccauccccaaccccgagaccgucauggaguuccagcagaagaacaaccgccuccuggagaucacgcgggaguucagcgugaacgcgggcgugaccacccccgucuccaccuacaugcugacgaacagcgagcuccugucccugaucaacgacaugccgaucaccaacgaccagaagaagcucaugagcaacaacgugcagaucgugcgccagcaguccuacagcaucaugugcaucaucaaggaggagguccuggccuacguggugcagcugccccucuacggggucaucgacacccccugcuggaagcugcacaccagcccccugugcacgaccaacaccaaggagggcuccaacaucugccucacccggacggaccgcgggugguacugcgacaacgccggcagcguguccuucuucccgcaggccgagaccugcaaggucugcagcaaccggguguucugcgacaccaugaacucccugacccugcccagcgaggugaaccucugcaacaucgacaucuucaaccccaaguacgacugcaagaucaugacguccaagaccgacgucagcuccagcgugaucaccucccugggcgccaucgugagcugcuacgggaagaccaagugcacggcgagcaacaagaacaagggcaucaucaagaccuucuccaacgggugcgacuacgucagcaacaagggcguggacaccguguccgucggcaacacccuguacuacgugaacaagcaggagggccagagccucuacgugaagggggagcccaucaucaacuucuacgacccgcuggucuuccccuccgacgaguucgacgccagcaucucccaggugaacgagaagaucaaccagagccuggccuucauccggaaguccgacgagcuccugcacaacgugaacgucggcaagagcaccacgaacaucaugaucaccaccaucaucaucgugaucaucgugauccugcugcuccugaucgccgucgggcuguuccucuacugcaaggcccgcugaggacuaguacuggcugcaucucccuuuccucuguccuccauccuucucccaggauggugaagggggaccugguacccagugauccccaccccaggauccuaaaucaugacuuaccugcuaauaaaaacucauuggaaaagugagaagaucuaaaaaaaaaaaaaaaaaaaaaaaaaaaaaaaaaaaaaaaaaaaaaaaaaaaaaaaaaaaaaaaaugcaucccccccccccccccccccccccccccccccaaaggcucuuuucagagccaccagaauu

SEQ ID NO: 18105 - RNA, 1920 nt, Artificial Sequence
  mRNA product Design c-3 comprising derived and/or modified sequence from HRSV(Memphis-37)__AIY60640.1__F-del_DSCav1_mut6 (opt1)
gggagaguccgcucagccagguugcagaagcggcuuagcguguguccuaaucuucucucugcguguagguaggccugugccgcaaacaagcuuaccauggagcugcccauccucaagaccaacgccaucaccacgauccuggccgcggugacccugugcuucgccagcucccagaacaucaccgaggaguucuaccagagcacgugcuccgccgucagcaagggcuaccucggggcccugcgcaccggcugguacaccuccgugaucaccaucgagcugagcaacaucaaggagaacaagugcaacgggaccgacgccaaggugaagcucaucaagcaggagcuggacaaguacaagaacgcggucacggaccugcagaugcucaugugcuccaccccggccgccggcagcggguccgccaucgcgagcggcaucgccgugugcaaggugcugcaccuggagggcgaggucaacaagaucaagaacgcccuccuguccaccaacaaggccguggugagccuguccaacggggucagcgugcucaccuucaaggugcuggaccugaagaacuacaucgacaagcagcuccugcccauccugaacaagcaguccugcagcauccccaaccccgagacggucauggaguuccagcagaagaacaaccggcuccuggagaucacccgcgaguucuccgugaacgccggcgugaccaccccggucagcacguacaugcugaccaacuccgagcuccugagccugaucaacgacaugcccaucaccaacgaccagaagaagcucaugagcaacaacgugcagaucgugcggcagcaguccuacagcaucaugugcaucaucaaggaggagguccuggcguacguggugcagcugccccucuacggggucaucgacacccccugcuggaagcugcacacguccccgcugugcaccaccaacaccaaggagggcagcaacaucugccucacgcgcaccgaccgggggugguacugcgacaacgccggcuccgugagcuucuucccccaggccgagaccugcaaggugugcuccaaccgcgucuucugcgacaccaugaacagccugacgcugcccuccgaggugaaccucugcaacaucgacaucuucaaccccaaguacgacugcaagaucaugaccagcaagaccgacgucuccagcuccgugaucaccagccugggcgccaucguguccugcuacgggaagacgaagugcaccgccagcaacaagaacaagggcaucaucaagaccuucuccaacgggugcgacuacgucagcaacaagggcguggacaccguguccgucggcaacacgcuguacuacgugaacaagcaggaggggcagagccucuacgugaagggcgagccgaucaucaacuucuacgacccccuggucuuccccagcgacgaguucgacgcguccaucagccaggugaacgagaagaucaaccagucccuggccuucauccgcaagagcgacgagcuccugcacaacgugaacgucgggaaguccaccaccaacaucaugaucaccaccaucaucaucgugaucaucgugauccugcuccugcugaucgccgucggccucuuccuguacugcaaggcccggugaggacuaguacuggcugcaucucccuuuccucuguccuccauccuucucccaggauggugaagggggaccugguacccagugauccccaccccaggauccuaaaucaugacuuaccugcuaauaaaaacucauuggaaaagugagaagaucuaaaaaaaaaaaaaaaaaaaaaaaaaaaaaaaaaaaaaaaaaaaaaaaaaaaaaaaaaaaaaaaaugcaucccccccccccccccccccccccccccccccaaaggcucuuuucagagccaccagaauu

SEQ ID NO: 18106 - RNA, 1920 nt, Artificial Sequence
  mRNA product Design c-3 comprising derived and/or modified sequence from HRSV(Memphis-37)__AIY60640.1__F-del_DSCav1_mut6 (opt2)
gggagaguccgcucagccagguugcagaagcggcuuagcguguguccuaaucuucucucugcguguagguaggccugugccgcaaacaagcuuaccauggagcuccccauccucaagaccaacgccaucaccaccauccucgccgccgucacccucugcuucgccuccucccagaacaucaccgaggaguucuaccaguccaccugcuccgccgucuccaagggcuaccucggcgcccuccgcaccggcugguacaccuccgucaucaccaucgagcucuccaacaucaaggagaacaagugcaacggcaccgacgccaaggucaagcucaucaagcaggagcucgacaaguacaagaacgccgucaccgaccuccagaugcucaugugcuccacccccgccgccggcuccggcuccgccaucgccuccggcaucgccgucugcaagguccuccaccucgagggcgaggucaacaagaucaagaacgcccuccucuccaccaacaaggccgucgucucccucuccaacggcgucuccguccucaccuucaagguccucgaccucaagaacuacaucgacaagcagcuccuccccauccucaacaagcaguccugcuccauccccaaccccgagaccgucauggaguuccagcagaagaacaaccgccuccucgagaucacccgcgaguucuccgucaacgccggcgucaccacccccgucuccaccuacaugcucaccaacuccgagcuccucucccucaucaacgacaugcccaucaccaacgaccagaagaagcucauguccaacaacguccagaucguccgccagcaguccuacuccaucaugugcaucaucaaggaggagguccucgccuacgucguccagcucccccucuacggcgucaucgacacccccugcuggaagcuccacaccuccccccucugcaccaccaacaccaaggagggcuccaacaucugccucacccgcaccgaccgcggcugguacugcgacaacgccggcuccgucuccuucuucccccaggccgagaccugcaaggucugcuccaaccgcgucuucugcgacaccaugaacucccucacccuccccuccgaggucaaccucugcaacaucgacaucuucaaccccaaguacgacugcaagaucaugaccuccaagaccgacgucuccuccuccgucaucaccucccucggcgccaucgucuccugcuacggcaagaccaagugcaccgccuccaacaagaacaagggcaucaucaagaccuucuccaacggcugcgacuacgucuccaacaagggcgucgacaccgucuccgucggcaacacccucuacuacgucaacaagcaggagggccagucccucuacgucaagggcgagcccaucaucaacuucuacgacccccucgucuuccccuccgacgaguucgacgccuccaucucccaggucaacgagaagaucaaccagucccucgccuucauccgcaaguccgacgagcuccuccacaacgucaacgucggcaaguccaccaccaacaucaugaucaccaccaucaucaucgucaucaucgucauccuccuccuccucaucgccgucggccucuuccucuacugcaaggcccgcugaggacuaguacuggcugcaucucccuuuccucuguccuccauccuucucccaggauggugaagggggaccugguacccagugauccccaccccaggauccuaaaucaugacuuaccugcuaauaaaaacucauuggaaaagugagaagaucuaaaaaaaaaaaaaaaaaaaaaaaaaaaaaaaaaaaaaaaaaaaaaaaaaaaaaaaaaaaaaaaaugcaucccccccccccccccccccccccccccccccaaaggcucuuuucagagccaccagaauu

SEQ ID NO: 18107 - RNA, 1920 nt, Artificial Sequence
  mRNA product Design c-3 comprising derived and/or modified sequence from HRSV(Memphis-37)__AIY60640.1__F-del_DSCav1_mut6 (opt3)
gggagaguccgcucagccagguugcagaagcggcuuagcguguguccuaaucuucucucugcguguagguaggccugugccgcaaacaagcuuaccauggagcugcccauccucaagaccaacgccauuacaacuauacuugcugcagugacgcugugcuucgccagcucccagaauaucaccgaagaguuuuaccaaucuacauguucagcggucaguaaaggcuauuugggggcuuuaagaacuggaugguacaccagcguuauuacaaucgaacuguccaacauuaaggagaauaaaugcaacgguaccgacgccaaggugaaacuaaucaagcaggaacucgauaaguauaaaaaugcaguaacugaccugcagaugcuuauguguucuacuccugccgcuggcucggggucagcaauagccagcggaaucgcugugugcaagguccugcacuuggagggcgaggugaacaaaauuaagaaugcccuccugaguaccaacaaagcgguugugucccugucuaauggugucagcgugcucacguucaagguauuagaucugaagaacuacaucgacaaacagcuuuugccaauucugaauaagcaauccuguucaaucccgaaccccgaaacuguuauggaguuucagcagaaaaauaacaggcuacucgaaauaacccgggaguucagugugaaugcaggggucacaacuccugugagcaccuauaugcugacaaacucugagcuucuguccuugauuaacgauaugccaaucaccaaugaccagaagaaacucaugucaaacaaugugcaaauuguccgccagcagagcuacaguaucaugugcaucauuaaggaagagguucuggccuaugugguacaguuaccccuguacggagugauagauacgccuuguuggaaacuccauacuucuccacuuugcacaaccaacacuaaggaaggcuccaauaucugucugacacgaaccgaccguggcugguacugcgauaacgcugggagcgucucguuuuucccccaagccgagacguguaaggugugcucuaauagaguuuucugcgacaccaugaacuccuugacacuaccuucagaagugaaucuguguaacauugauaucuucaauccaaaauaugacugcaagauaaugacaaguaaaaccgaugucagcuccucugugauuacaagccucggagcaaucguaucauguuacgguaagacuaaaugcaccgcuaguaacaagaauaagggcaucauuaaaacauuuuccaacgggugugacuauguuagcaauaagggaguggacaccgucucugugggcaacacucuguacuaugucaacaaacaggagggucagucacuuuacgugaagggggagccgaucauuaauuucuaugauccccugguuuuuccuagugacgaauuugaugccagcauaucccaagugaacgagaaaaucaaucagucuuuggcguuuauuaggaagucggacgaacuccugcacaacguaaaugucggaaagagcacgacaaacaucaugaucaccacuauuauaaucgugauuaucguuauuuuacugcuacucaucgccgugggccuguuccuuuacugcaaagcacggugaggacuaguacuggcugcaucucccuuuccucuguccuccauccuucucccaggauggugaagggggaccugguacccagugauccccaccccaggauccuaaaucaugacuuaccugcuaauaaaaacucauuggaaaagugagaagaucuaaaaaaaaaaaaaaaaaaaaaaaaaaaaaaaaaaaaaaaaaaaaaaaaaaaaaaaaaaaaaaaaugcaucccccccccccccccccccccccccccccccaaaggcucuuuucagagccaccagaauu

SEQ ID NO: 18108 - RNA, 1920 nt, Artificial Sequence
  mRNA product Design c-3 comprising derived and/or modified sequence from HRSV(Memphis-37)__AIY60640.1__F-del_DSCav1_mut6 (opt4)
gggagaguccgcucagccagguugcagaagcggcuuagcguguguccuaaucuucucucugcguguagguaggccugugccgcaaacaagcuuaccauggagcugcccauccugaagaccaacgccaucaccaccauccuggccgccgugacccugugcuucgccagcagccagaacaucaccgaggaguucuaccagagcaccugcagcgccgugagcaagggcuaccugggcgcccugagaaccggcugguacaccagcgugaucaccaucgagcugagcaacaucaaggagaacaagugcaacggcaccgacgccaaggugaagcugaucaagcaggagcuggacaaguacaagaacgccgugaccgaccugcagaugcugaugugcagcacccccgccgccggcagcggcagcgccaucgccagcggcaucgccgugugcaaggugcugcaccuggagggcgaggugaacaagaucaagaacgcccugcugagcaccaacaaggccguggugagccugagcaacggcgugagcgugcugaccuucaaggugcuggaccugaagaacuacaucgacaagcagcugcugcccauccugaacaagcagagcugcagcauccccaaccccgagaccgugauggaguuccagcagaagaacaacagacugcuggagaucaccagagaguucagcgugaacgccggcgugaccacccccgugagcaccuacaugcugaccaacagcgagcugcugagccugaucaacgacaugcccaucaccaacgaccagaagaagcugaugagcaacaacgugcagaucgugagacagcagagcuacagcaucaugugcaucaucaaggaggaggugcuggccuacguggugcagcugccccuguacggcgugaucgacacccccugcuggaagcugcacaccagcccccugugcaccaccaacaccaaggagggcagcaacaucugccugaccagaaccgacagaggcugguacugcgacaacgccggcagcgugagcuucuucccccaggccgagaccugcaaggugugcagcaacagaguguucugcgacaccaugaacagccugacccugcccagcgaggugaaccugugcaacaucgacaucuucaaccccaaguacgacugcaagaucaugaccagcaagaccgacgugagcagcagcgugaucaccagccugggcgccaucgugagcugcuacggcaagaccaagugcaccgccagcaacaagaacaagggcaucaucaagaccuucagcaacggcugcgacuacgugagcaacaagggcguggacaccgugagcgugggcaacacccuguacuacgugaacaagcaggagggccagagccuguacgugaagggcgagcccaucaucaacuucuacgacccccugguguuccccagcgacgaguucgacgccagcaucagccaggugaacgagaagaucaaccagagccuggccuucaucagaaagagcgacgagcugcugcacaacgugaacgugggcaagagcaccaccaacaucaugaucaccaccaucaucaucgugaucaucgugauccugcugcugcugaucgccgugggccuguuccuguacugcaaggccagaugaggacuaguacuggcugcaucucccuuuccucuguccuccauccuucucccaggauggugaagggggaccugguacccagugauccccaccccaggauccuaaaucaugacuuaccugcuaauaaaaacucauuggaaaagugagaagaucuaaaaaaaaaaaaaaaaaaaaaaaaaaaaaaaaaaaaaaaaaaaaaaaaaaaaaaaaaaaaaaaaugcaucccccccccccccccccccccccccccccccaaaggcucuuuucagagccaccagaauu

SEQ ID NO: 18109 - RNA, 1920 nt, Artificial Sequence
  mRNA product Design c-3 comprising derived and/or modified sequence from HRSV(Memphis-37)__AIY60640.1__F-del_DSCav1_mut6 (opt5)
gggagaguccgcucagccagguugcagaagcggcuuagcguguguccuaaucuucucucugcguguagguaggccugugccgcaaacaagcuuaccauggagcugcccauccucaagaccaacgccauuacaacgauccuggcugccgugacccuuugcuucgcgagcucccagaauauuacagaagaguuuuaccaaucuaccuguagcgcugucuccaaaggcuaucugggggcccucagaacaggaugguacaccucuguuaucacaauugaacugagcaacaucaaggagaauaaaugcaacggcaccgacgccaaggugaaacuuaucaagcaggaacuggauaaguauaaaaaugcugugacggaccuccagaugcugauguguuccaccccugccgcugggucuggaagcgccauugcguccggcaucgccgucugcaaggugcugcaccucgagggggagguuaacaaaauuaagaaugcucugcuuagcacaaacaaagccguggucucucuguccaauggagugagcguucucaccuucaaggugcuggaucuuaagaacuacaucgacaaacagcugcucccgauucugaauaagcaaucuuguuccauccccaacccugaaacagucauggaguuucagcagaaaaauaaccggcugcucgaaauuacccgcgaguucagcgugaaugcuggcgugacgacacccgucucuaccuauaugcugacaaacuccgagcuucugagccucaucaacgauaugccuaucaccaaugaccagaagaaacugauguccaacaauguucaaauugugagacagcagucuuacagcaucaugugcauuaucaaggaagaggugcuugccuaugucgugcagcugccccucuacggcguuauugauaccccuuguuggaaacugcauacauccccgcugugcacgaccaacacaaaggaagggagcaauaucugucucacccggacagaccgcggaugguacugcgauaacgcgggcucuguguccuuuuucccccaagccgagaccuguaaggucugcagcaauagaguguuuugcgacacgaugaacucucugacacuuccuagcgaaguuaaucuguguaacaucgauauuuucaaucccaaauaugacugcaagaucaugaccuccaaaaccgaugugucuagcuccgucauuacaagccucggggcuaucgugucuuguuacggaaagaccaaaugcacagccuccaacaagaauaagggcauuaucaaaacguuuagcaacgggugugacuaugucucuaauaagggaguggacaccguuuccgugggcaacacacuguacuaugucaacaaacaggagggccagagccuuuacgugaagggggagccuaucauuaauuucuaugauccccugguuuuuccguccgacgaauuugaugcuucuaucagccaagugaacgagaaaauuaaucagucccucgccuucauccggaagucugacgaacugcugcacaacgucaaugugggaaagagcaccacaaacauuaugaucaccacgauuaucaucgugauuaucguuauucuccugcuucugaucgccgucggccucuuccuguacugcaaagcucgcugaggacuaguacuggcugcaucucccuuuccucuguccuccauccuucucccaggauggugaagggggaccugguacccagugauccccaccccaggauccuaaaucaugacuuaccugcuaauaaaaacucauuggaaaagugagaagaucuaaaaaaaaaaaaaaaaaaaaaaaaaaaaaaaaaaaaaaaaaaaaaaaaaaaaaaaaaaaaaaaaugcaucccccccccccccccccccccccccccccccaaaggcucuuuucagagccaccagaauu

SEQ ID NO: 18110 - RNA, 1920 nt, Artificial Sequence
  mRNA product Design c-3 comprising derived and/or modified sequence from HRSV(Memphis-37)__AIY60640.1__F-del_DSCav1_mut6 (opt6)
gggagaguccgcucagccagguugcagaagcggcuuagcguguguccuaaucuucucucugcguguagguaggccugugccgcaaacaagcuuaccauggaacuaccuauacuaaaaaccaacgccauaacaacaauacuagccgcaguuacacucugcuuugcauccucacaaaacaucacagaggaauuuuaccaaucuacuugcuccgcaguaucaaaaggauaccuaggagcacuccguacaggaugguacacaucagucauaacaauugaauuaucuaacaucaaagaaaacaaauguaaugguacagacgccaaaguaaaauuaauaaaacaagaacuagacaaauacaaaaacgccguaacagaccuacaaaugcuaaugugcucaacccccgccgcaggaucuggaucagcaauugccucaggcauagcaguaugcaaaguccuacaccuagaaggagaagucaacaaaauaaaaaacgcucuccucucaaccaauaaagcaguaguaucccucucaaacggaguaucaguacuaacauucaaaguacuagaccucaaaaauuauauagacaagcaacuacucccaauauuaaauaaacaauccugcucaauacccaauccagaaacagucauggaauuucaacaaaaaaacaaccgacucuuagaaauaacaagagaauuuucagucaaugccggcgucacaaccccaguaucaacauacaugcuaacaaacucagaacuacuaucacuaaucaacgauaugcccauaaccaacgaccaaaaaaaacuaaugucaaacaauguacaaauuguaagacaacagucuuauucaauaaugugcauaauaaaagaagaagucuuagcauauguaguacaacuaccacuauacggaguaauagacacaccauguuggaaauuacacacauccccacuauguaccaccaacacaaaagaaggaucuaacauaugccuaaccagaacagaccgaggcugguauugcgacaaugcaggaucaguauccuucuuuccacaagcagaaacaugcaaagucugcucuaacagaguauucugcgauacuaugaacucacuuaccuuaccaucagaaguaaaucuauguaauaucgacauauucaaucccaaauaugauugcaaaauaaugaccucaaaaacagauguaucaucaucagucauaacaucacuaggagcaauagucagcugcuaugggaaaacaaaaugcacagcuuccaacaaaaacaaaggaaucauaaaaacauucucaaaugguugugacuacguauccaacaaaggaguagauacaguaucuguaggcaacacauuauacuauguaaauaaacaagaaggacaaagccuauacgucaaaggagaacccaucauaaauuucuaugacccauuaguuuucccaucugacgaauuugacgcuuccaucucccaaguaaaugaaaaaaucaaccaaagccucgcauucauucgcaaaucugacgaauuacuccacaacguaaacguaggaaaauccacaacaaacauuaugaucaccaccauaauaaucguaauaauagucauauuacuacuccucauagcaguaggacuauuccuauacuguaaagcuagauaaggacuaguacuggcugcaucucccuuuccucuguccuccauccuucucccaggauggugaagggggaccugguacccagugauccccaccccaggauccuaaaucaugacuuaccugcuaauaaaaacucauuggaaaagugagaagaucuaaaaaaaaaaaaaaaaaaaaaaaaaaaaaaaaaaaaaaaaaaaaaaaaaaaaaaaaaaaaaaaaugcaucccccccccccccccccccccccccccccccaaaggcucuuuucagagccaccagaauu

SEQ ID NO: 18111 - RNA, 1920 nt, Artificial Sequence
  mRNA product Design c-3 comprising derived and/or modified sequence from HRSV(Memphis-37)__AIY60640.1__F-del_DSCav1_mut6 (opt11)
gggagaguccgcucagccagguugcagaagcggcuuagcguguguccuaaucuucucucugcguguagguaggccugugccgcaaacaagcuuaccauggaauuaccaauccucaaaacuaacgccaucaccaccauccucgcugccgucacccucugcuucgccuccagccaaaacaucacagaagaguucuaccaaagcacaugcuccgcugucuccaaaggcuaccuuggcgcccuccgcaccggcugguacaccucaguaauuaccauugaacuaagcaacaucaaagaaaauaaaugcaacggcaccgacgccaaaguuaaacucauaaaacaggaacucgacaaauacaaaaacgccguaacagaccuccaaaugcucaugugcuccacccccgccgccggcucaggcuccgccaucgcaagcggaauagcaguuugcaaaguccuccaccuagaaggcgaggucaacaagauuaaaaacgcacuucucucaaccaacaaggccgucguaucacucucaaacggcgucuccguccucaccuucaaaguucuggaccucaaaaacuacaucgauaaacaacuacucccaauacuuaacaaacaaucaugcuccaucccaaaccccgaaaccgucauggaguuccaacagaaaaacaaccgccuacuggaaaucacacgcgaguucagcguaaacgcuggcgucacuacacccgucuccaccuacaugcucaccaauucugaacuccuaucacucauaaacgacaugcccauuaccaacgaccaaaagaaacuaaugucaaacaacguccaaaucguaagacaacaaucguauuccaucaugugcauaauuaaagaagaaguucucgccuacgugguccaacuaccccucuacggagucauagacacuccuuguuggaaacuccacaccucuccccucugcacuaccaacacaaaagaaggcuccaacaucugccucacccgaaccgacagaggcugguacugcgacaacgccggcuccgucuccuucuucccccaagccgaaaccugcaaagucugcuccaaccgcguuuucugcgacaccaugaacucccucacacuccccuccgaagucaaccuauguaacauagacauauucaacccaaaauacgacugcaaaaucaugacauccaaaaccgacgugucuuccucggucaucaccucccucggcgccaucgucucaugcuacggcaaaacuaaaugcaccgcauccaacaaaaacaaaggcauaaucaaaacauucuccaacggcugcgacuacguuucuaacaaaggcgucgauaccgucuccgucggaaacacccucuacuacguaaacaagcaagaaggccagucccuauacguaaaaggagaaccaauuaucaacuucuacgacccccuagucuuccccuccgacgaguucgacgccuccauaucccaagucaacgagaaaaucaaccaaucccuagccuucauccgcaaaucagacgaacuccuccacaacgucaacgucggaaaauccacaacuaacaucaugaucaccaccaucauuaucgucaucauaguuauacuccuccuccucauagccgucggccucuuccuauacugcaaagcucgcuaaggacuaguacuggcugcaucucccuuuccucuguccuccauccuucucccaggauggugaagggggaccugguacccagugauccccaccccaggauccuaaaucaugacuuaccugcuaauaaaaacucauuggaaaagugagaagaucuaaaaaaaaaaaaaaaaaaaaaaaaaaaaaaaaaaaaaaaaaaaaaaaaaaaaaaaaaaaaaaaaugcaucccccccccccccccccccccccccccccccaaaggcucuuuucagagccaccagaauu

SEQ ID NO: 18112 - RNA, 1916 nt, Artificial Sequence
  mRNA product Design c-4 comprising derived and/or modified sequence from HRSV(Memphis-37)__AIY60640.1__F-del_DSCav1_mut6 (opt1)
gggagaguccgcucagccagguugcagaagcggcuuagcguguguccuaaucuucucucugcguguagguaggccugugccgcaaacaagcuuaccauggagcugcccauccucaagaccaacgccaucaccacgauccuggccgcggugacccugugcuucgccagcucccagaacaucaccgaggaguucuaccagagcacgugcuccgccgucagcaagggcuaccucggcgcccugcgcaccgggugguacaccagcgugaucaccaucgagcuguccaacaucaaggagaacaagugcaacggcaccgacgccaaggugaagcucaucaagcaggagcuggacaaguacaagaacgcggucacggaccugcagaugcugaugugcagcaccccggccgccggcuccgggagcgcgaucgccuccggcaucgccgucugcaaggugcugcaccucgagggcgaggugaacaagaucaagaacgcccugcuguccaccaacaaggccgucgugagccucuccaacggggugagcguccugaccuucaaggugcuggaccucaagaacuacaucgacaagcagcugcugcccauccugaacaagcagagcugcuccauccccaaccccgagaccgucauggaguuccagcagaagaacaaccgccuccuggagaucacgcgggaguucagcgugaacgcgggcgugaccacccccgucuccaccuacaugcugacgaacagcgagcuccugucccugaucaacgacaugccgaucaccaacgaccagaagaagcucaugagcaacaacgugcagaucgugcgccagcaguccuacagcaucaugugcaucaucaaggaggagguccuggccuacguggugcagcugccccucuacggggucaucgacacccccugcuggaagcugcacaccagcccccugugcacgaccaacaccaaggagggcuccaacaucugccucacccggacggaccgcgggugguacugcgacaacgccggcagcguguccuucuucccgcaggccgagaccugcaaggucugcagcaaccggguguucugcgacaccaugaacucccugacccugcccagcgaggugaaccucugcaacaucgacaucuucaaccccaaguacgacugcaagaucaugacguccaagaccgacgucagcuccagcgugaucaccucccugggcgccaucgugagcugcuacgggaagaccaagugcacggcgagcaacaagaacaagggcaucaucaagaccuucuccaacgggugcgacuacgucagcaacaagggcguggacaccguguccgucggcaacacccuguacuacgugaacaagcaggagggccagagccucuacgugaagggggagcccaucaucaacuucuacgacccgcuggucuuccccuccgacgaguucgacgccagcaucucccaggugaacgagaagaucaaccagagccuggccuucauccggaaguccgacgagcuccugcacaacgugaacgucggcaagagcaccacgaacaucaugaucaccaccaucaucaucgugaucaucgugauccugcugcuccugaucgccgucgggcuguuccucuacugcaaggcccgcugaggacuaguggaagcauuuuccuggcugauuaaaagaaauuacucagcuauggucaucuguuccuguuagaaggcuaugcagcauauuauauacuaugcgcauguuaugaaaugcauaauaaaaaauuuuaaaaaaucuaaaagaucuaaaaaaaaaaaaaaaaaaaaaaaaaaaaaaaaaaaaaaaaaaaaaaaaaaaaaaaaaaaaaaaaugcaucccccccccccccccccccccccccccccccaaaggcucuuuucagagccaccagaauu

SEQ ID NO: 18113 - RNA, 1916 nt, Artificial Sequence
  mRNA product Design c-4 comprising derived and/or modified sequence from HRSV(Memphis-37)__AIY60640.1__F-del_DSCav1_mut6 (opt1)
gggagaguccgcucagccagguugcagaagcggcuuagcguguguccuaaucuucucucugcguguagguaggccugugccgcaaacaagcuuaccauggagcugcccauccucaagaccaacgccaucaccacgauccuggccgcggugacccugugcuucgccagcucccagaacaucaccgaggaguucuaccagagcacgugcuccgccgucagcaagggcuaccucggggcccugcgcaccggcugguacaccuccgugaucaccaucgagcugagcaacaucaaggagaacaagugcaacgggaccgacgccaaggugaagcucaucaagcaggagcuggacaaguacaagaacgcggucacggaccugcagaugcucaugugcuccaccccggccgccggcagcggguccgccaucgcgagcggcaucgccgugugcaaggugcugcaccuggagggcgaggucaacaagaucaagaacgcccuccuguccaccaacaaggccguggugagccuguccaacggggucagcgugcucaccuucaaggugcuggaccugaagaacuacaucgacaagcagcuccugcccauccugaacaagcaguccugcagcauccccaaccccgagacggucauggaguuccagcagaagaacaaccggcuccuggagaucacccgcgaguucuccgugaacgccggcgugaccaccccggucagcacguacaugcugaccaacuccgagcuccugagccugaucaacgacaugcccaucaccaacgaccagaagaagcucaugagcaacaacgugcagaucgugcggcagcaguccuacagcaucaugugcaucaucaaggaggagguccuggcguacguggugcagcugccccucuacggggucaucgacacccccugcuggaagcugcacacguccccgcugugcaccaccaacaccaaggagggcagcaacaucugccucacgcgcaccgaccgggggugguacugcgacaacgccggcuccgugagcuucuucccccaggccgagaccugcaaggugugcuccaaccgcgucuucugcgacaccaugaacagccugacgcugcccuccgaggugaaccucugcaacaucgacaucuucaaccccaaguacgacugcaagaucaugaccagcaagaccgacgucuccagcuccgugaucaccagccugggcgccaucguguccugcuacgggaagacgaagugcaccgccagcaacaagaacaagggcaucaucaagaccuucuccaacgggugcgacuacgucagcaacaagggcguggacaccguguccgucggcaacacgcuguacuacgugaacaagcaggaggggcagagccucuacgugaagggcgagccgaucaucaacuucuacgacccccuggucuuccccagcgacgaguucgacgcguccaucagccaggugaacgagaagaucaaccagucccuggccuucauccgcaagagcgacgagcuccugcacaacgugaacgucgggaaguccaccaccaacaucaugaucaccaccaucaucaucgugaucaucgugauccugcuccugcugaucgccgucggccucuuccuguacugcaaggcccggugaggacuaguggaagcauuuuccuggcugauuaaaagaaauuacucagcuauggucaucuguuccuguuagaaggcuaugcagcauauuauauacuaugcgcauguuaugaaaugcauaauaaaaaauuuuaaaaaaucuaaaagaucuaaaaaaaaaaaaaaaaaaaaaaaaaaaaaaaaaaaaaaaaaaaaaaaaaaaaaaaaaaaaaaaaugcaucccccccccccccccccccccccccccccccaaaggcucuuuucagagccaccagaauu

SEQ ID NO: 18114 - RNA, 1916 nt, Artificial Sequence
  mRNA product Design c-4 comprising derived and/or modified sequence from HRSV(Memphis-37)__AIY60640.1__F-del_DSCav1_mut6 (opt2)
gggagaguccgcucagccagguugcagaagcggcuuagcguguguccuaaucuucucucugcguguagguaggccugugccgcaaacaagcuuaccauggagcuccccauccucaagaccaacgccaucaccaccauccucgccgccgucacccucugcuucgccuccucccagaacaucaccgaggaguucuaccaguccaccugcuccgccgucuccaagggcuaccucggcgcccuccgcaccggcugguacaccuccgucaucaccaucgagcucuccaacaucaaggagaacaagugcaacggcaccgacgccaaggucaagcucaucaagcaggagcucgacaaguacaagaacgccgucaccgaccuccagaugcucaugugcuccacccccgccgccggcuccggcuccgccaucgccuccggcaucgccgucugcaagguccuccaccucgagggcgaggucaacaagaucaagaacgcccuccucuccaccaacaaggccgucgucucccucuccaacggcgucuccguccucaccuucaagguccucgaccucaagaacuacaucgacaagcagcuccuccccauccucaacaagcaguccugcuccauccccaaccccgagaccgucauggaguuccagcagaagaacaaccgccuccucgagaucacccgcgaguucuccgucaacgccggcgucaccacccccgucuccaccuacaugcucaccaacuccgagcuccucucccucaucaacgacaugcccaucaccaacgaccagaagaagcucauguccaacaacguccagaucguccgccagcaguccuacuccaucaugugcaucaucaaggaggagguccucgccuacgucguccagcucccccucuacggcgucaucgacacccccugcuggaagcuccacaccuccccccucugcaccaccaacaccaaggagggcuccaacaucugccucacccgcaccgaccgcggcugguacugcgacaacgccggcuccgucuccuucuucccccaggccgagaccugcaaggucugcuccaaccgcgucuucugcgacaccaugaacucccucacccuccccuccgaggucaaccucugcaacaucgacaucuucaaccccaaguacgacugcaagaucaugaccuccaagaccgacgucuccuccuccgucaucaccucccucggcgccaucgucuccugcuacggcaagaccaagugcaccgccuccaacaagaacaagggcaucaucaagaccuucuccaacggcugcgacuacgucuccaacaagggcgucgacaccgucuccgucggcaacacccucuacuacgucaacaagcaggagggccagucccucuacgucaagggcgagcccaucaucaacuucuacgacccccucgucuuccccuccgacgaguucgacgccuccaucucccaggucaacgagaagaucaaccagucccucgccuucauccgcaaguccgacgagcuccuccacaacgucaacgucggcaaguccaccaccaacaucaugaucaccaccaucaucaucgucaucaucgucauccuccuccuccucaucgccgucggccucuuccucuacugcaaggcccgcugaggacuaguggaagcauuuuccuggcugauuaaaagaaauuacucagcuauggucaucuguuccuguuagaaggcuaugcagcauauuauauacuaugcgcauguuaugaaaugcauaauaaaaaauuuuaaaaaaucuaaaagaucuaaaaaaaaaaaaaaaaaaaaaaaaaaaaaaaaaaaaaaaaaaaaaaaaaaaaaaaaaaaaaaaaugcaucccccccccccccccccccccccccccccccaaaggcucuuuucagagccaccagaauu

SEQ ID NO: 18115 - RNA, 1916 nt, Artificial Sequence
  mRNA product Design c-4 comprising derived and/or modified sequence from HRSV(Memphis-37)__AIY60640.1__F-del_DSCav1_mut6 (opt3)
gggagaguccgcucagccagguugcagaagcggcuuagcguguguccuaaucuucucucugcguguagguaggccugugccgcaaacaagcuuaccauggagcugcccauccucaagaccaacgccauuacaacuauacuugcugcagugacgcugugcuucgccagcucccagaauaucaccgaagaguuuuaccaaucuacauguucagcggucaguaaaggcuauuugggggcuuuaagaacuggaugguacaccagcguuauuacaaucgaacuguccaacauuaaggagaauaaaugcaacgguaccgacgccaaggugaaacuaaucaagcaggaacucgauaaguauaaaaaugcaguaacugaccugcagaugcuuauguguucuacuccugccgcuggcucggggucagcaauagccagcggaaucgcugugugcaagguccugcacuuggagggcgaggugaacaaaauuaagaaugcccuccugaguaccaacaaagcgguugugucccugucuaauggugucagcgugcucacguucaagguauuagaucugaagaacuacaucgacaaacagcuuuugccaauucugaauaagcaauccuguucaaucccgaaccccgaaacuguuauggaguuucagcagaaaaauaacaggcuacucgaaauaacccgggaguucagugugaaugcaggggucacaacuccugugagcaccuauaugcugacaaacucugagcuucuguccuugauuaacgauaugccaaucaccaaugaccagaagaaacucaugucaaacaaugugcaaauuguccgccagcagagcuacaguaucaugugcaucauuaaggaagagguucuggccuaugugguacaguuaccccuguacggagugauagauacgccuuguuggaaacuccauacuucuccacuuugcacaaccaacacuaaggaaggcuccaauaucugucugacacgaaccgaccguggcugguacugcgauaacgcugggagcgucucguuuuucccccaagccgagacguguaaggugugcucuaauagaguuuucugcgacaccaugaacuccuugacacuaccuucagaagugaaucuguguaacauugauaucuucaauccaaaauaugacugcaagauaaugacaaguaaaaccgaugucagcuccucugugauuacaagccucggagcaaucguaucauguuacgguaagacuaaaugcaccgcuaguaacaagaauaagggcaucauuaaaacauuuuccaacgggugugacuauguuagcaauaagggaguggacaccgucucugugggcaacacucuguacuaugucaacaaacaggagggucagucacuuuacgugaagggggagccgaucauuaauuucuaugauccccugguuuuuccuagugacgaauuugaugccagcauaucccaagugaacgagaaaaucaaucagucuuuggcguuuauuaggaagucggacgaacuccugcacaacguaaaugucggaaagagcacgacaaacaucaugaucaccacuauuauaaucgugauuaucguuauuuuacugcuacucaucgccgugggccuguuccuuuacugcaaagcacggugaggacuaguggaagcauuuuccuggcugauuaaaagaaauuacucagcuauggucaucuguuccuguuagaaggcuaugcagcauauuauauacuaugcgcauguuaugaaaugcauaauaaaaaauuuuaaaaaaucuaaaagaucuaaaaaaaaaaaaaaaaaaaaaaaaaaaaaaaaaaaaaaaaaaaaaaaaaaaaaaaaaaaaaaaaugcaucccccccccccccccccccccccccccccccaaaggcucuuuucagagccaccagaauu

SEQ ID NO: 18116 - RNA, 1916 nt, Artificial Sequence
  mRNA product Design c-4 comprising derived and/or modified sequence from HRSV(Memphis-37)__AIY60640.1__F-del_DSCav1_mut6 (opt4)
gggagaguccgcucagccagguugcagaagcggcuuagcguguguccuaaucuucucucugcguguagguaggccugugccgcaaacaagcuuaccauggagcugcccauccugaagaccaacgccaucaccaccauccuggccgccgugacccugugcuucgccagcagccagaacaucaccgaggaguucuaccagagcaccugcagcgccgugagcaagggcuaccugggcgcccugagaaccggcugguacaccagcgugaucaccaucgagcugagcaacaucaaggagaacaagugcaacggcaccgacgccaaggugaagcugaucaagcaggagcuggacaaguacaagaacgccgugaccgaccugcagaugcugaugugcagcacccccgccgccggcagcggcagcgccaucgccagcggcaucgccgugugcaaggugcugcaccuggagggcgaggugaacaagaucaagaacgcccugcugagcaccaacaaggccguggugagccugagcaacggcgugagcgugcugaccuucaaggugcuggaccugaagaacuacaucgacaagcagcugcugcccauccugaacaagcagagcugcagcauccccaaccccgagaccgugauggaguuccagcagaagaacaacagacugcuggagaucaccagagaguucagcgugaacgccggcgugaccacccccgugagcaccuacaugcugaccaacagcgagcugcugagccugaucaacgacaugcccaucaccaacgaccagaagaagcugaugagcaacaacgugcagaucgugagacagcagagcuacagcaucaugugcaucaucaaggaggaggugcuggccuacguggugcagcugccccuguacggcgugaucgacacccccugcuggaagcugcacaccagcccccugugcaccaccaacaccaaggagggcagcaacaucugccugaccagaaccgacagaggcugguacugcgacaacgccggcagcgugagcuucuucccccaggccgagaccugcaaggugugcagcaacagaguguucugcgacaccaugaacagccugacccugcccagcgaggugaaccugugcaacaucgacaucuucaaccccaaguacgacugcaagaucaugaccagcaagaccgacgugagcagcagcgugaucaccagccugggcgccaucgugagcugcuacggcaagaccaagugcaccgccagcaacaagaacaagggcaucaucaagaccuucagcaacggcugcgacuacgugagcaacaagggcguggacaccgugagcgugggcaacacccuguacuacgugaacaagcaggagggccagagccuguacgugaagggcgagcccaucaucaacuucuacgacccccugguguuccccagcgacgaguucgacgccagcaucagccaggugaacgagaagaucaaccagagccuggccuucaucagaaagagcgacgagcugcugcacaacgugaacgugggcaagagcaccaccaacaucaugaucaccaccaucaucaucgugaucaucgugauccugcugcugcugaucgccgugggccuguuccuguacugcaaggccagaugaggacuaguggaagcauuuuccuggcugauuaaaagaaauuacucagcuauggucaucuguuccuguuagaaggcuaugcagcauauuauauacuaugcgcauguuaugaaaugcauaauaaaaaauuuuaaaaaaucuaaaagaucuaaaaaaaaaaaaaaaaaaaaaaaaaaaaaaaaaaaaaaaaaaaaaaaaaaaaaaaaaaaaaaaaugcaucccccccccccccccccccccccccccccccaaaggcucuuuucagagccaccagaauu

SEQ ID NO: 18117 - RNA, 1916 nt, Artificial Sequence
  mRNA product Design c-4 comprising derived and/or modified sequence from HRSV(Memphis-37)__AIY60640.1__F-del_DSCav1_mut6 (opt5)
gggagaguccgcucagccagguugcagaagcggcuuagcguguguccuaaucuucucucugcguguagguaggccugugccgcaaacaagcuuaccauggagcugcccauccucaagaccaacgccauuacaacgauccuggcugccgugacccuuugcuucgcgagcucccagaauauuacagaagaguuuuaccaaucuaccuguagcgcugucuccaaaggcuaucugggggcccucagaacaggaugguacaccucuguuaucacaauugaacugagcaacaucaaggagaauaaaugcaacggcaccgacgccaaggugaaacuuaucaagcaggaacuggauaaguauaaaaaugcugugacggaccuccagaugcugauguguuccaccccugccgcugggucuggaagcgccauugcguccggcaucgccgucugcaaggugcugcaccucgagggggagguuaacaaaauuaagaaugcucugcuuagcacaaacaaagccguggucucucuguccaauggagugagcguucucaccuucaaggugcuggaucuuaagaacuacaucgacaaacagcugcucccgauucugaauaagcaaucuuguuccauccccaacccugaaacagucauggaguuucagcagaaaaauaaccggcugcucgaaauuacccgcgaguucagcgugaaugcuggcgugacgacacccgucucuaccuauaugcugacaaacuccgagcuucugagccucaucaacgauaugccuaucaccaaugaccagaagaaacugauguccaacaauguucaaauugugagacagcagucuuacagcaucaugugcauuaucaaggaagaggugcuugccuaugucgugcagcugccccucuacggcguuauugauaccccuuguuggaaacugcauacauccccgcugugcacgaccaacacaaaggaagggagcaauaucugucucacccggacagaccgcggaugguacugcgauaacgcgggcucuguguccuuuuucccccaagccgagaccuguaaggucugcagcaauagaguguuuugcgacacgaugaacucucugacacuuccuagcgaaguuaaucuguguaacaucgauauuuucaaucccaaauaugacugcaagaucaugaccuccaaaaccgaugugucuagcuccgucauuacaagccucggggcuaucgugucuuguuacggaaagaccaaaugcacagccuccaacaagaauaagggcauuaucaaaacguuuagcaacgggugugacuaugucucuaauaagggaguggacaccguuuccgugggcaacacacuguacuaugucaacaaacaggagggccagagccuuuacgugaagggggagccuaucauuaauuucuaugauccccugguuuuuccguccgacgaauuugaugcuucuaucagccaagugaacgagaaaauuaaucagucccucgccuucauccggaagucugacgaacugcugcacaacgucaaugugggaaagagcaccacaaacauuaugaucaccacgauuaucaucgugauuaucguuauucuccugcuucugaucgccgucggccucuuccuguacugcaaagcucgcugaggacuaguggaagcauuuuccuggcugauuaaaagaaauuacucagcuauggucaucuguuccuguuagaaggcuaugcagcauauuauauacuaugcgcauguuaugaaaugcauaauaaaaaauuuuaaaaaaucuaaaagaucuaaaaaaaaaaaaaaaaaaaaaaaaaaaaaaaaaaaaaaaaaaaaaaaaaaaaaaaaaaaaaaaaugcaucccccccccccccccccccccccccccccccaaaggcucuuuucagagccaccagaauu

SEQ ID NO: 18118 - RNA, 1916 nt, Artificial Sequence
  mRNA product Design c-4 comprising derived and/or modified sequence from HRSV(Memphis-37)__AIY60640.1__F-del_DSCav1_mut6 (opt6)
gggagaguccgcucagccagguugcagaagcggcuuagcguguguccuaaucuucucucugcguguagguaggccugugccgcaaacaagcuuaccauggaacuaccuauacuaaaaaccaacgccauaacaacaauacuagccgcaguuacacucugcuuugcauccucacaaaacaucacagaggaauuuuaccaaucuacuugcuccgcaguaucaaaaggauaccuaggagcacuccguacaggaugguacacaucagucauaacaauugaauuaucuaacaucaaagaaaacaaauguaaugguacagacgccaaaguaaaauuaauaaaacaagaacuagacaaauacaaaaacgccguaacagaccuacaaaugcuaaugugcucaacccccgccgcaggaucuggaucagcaauugccucaggcauagcaguaugcaaaguccuacaccuagaaggagaagucaacaaaauaaaaaacgcucuccucucaaccaauaaagcaguaguaucccucucaaacggaguaucaguacuaacauucaaaguacuagaccucaaaaauuauauagacaagcaacuacucccaauauuaaauaaacaauccugcucaauacccaauccagaaacagucauggaauuucaacaaaaaaacaaccgacucuuagaaauaacaagagaauuuucagucaaugccggcgucacaaccccaguaucaacauacaugcuaacaaacucagaacuacuaucacuaaucaacgauaugcccauaaccaacgaccaaaaaaaacuaaugucaaacaauguacaaauuguaagacaacagucuuauucaauaaugugcauaauaaaagaagaagucuuagcauauguaguacaacuaccacuauacggaguaauagacacaccauguuggaaauuacacacauccccacuauguaccaccaacacaaaagaaggaucuaacauaugccuaaccagaacagaccgaggcugguauugcgacaaugcaggaucaguauccuucuuuccacaagcagaaacaugcaaagucugcucuaacagaguauucugcgauacuaugaacucacuuaccuuaccaucagaaguaaaucuauguaauaucgacauauucaaucccaaauaugauugcaaaauaaugaccucaaaaacagauguaucaucaucagucauaacaucacuaggagcaauagucagcugcuaugggaaaacaaaaugcacagcuuccaacaaaaacaaaggaaucauaaaaacauucucaaaugguugugacuacguauccaacaaaggaguagauacaguaucuguaggcaacacauuauacuauguaaauaaacaagaaggacaaagccuauacgucaaaggagaacccaucauaaauuucuaugacccauuaguuuucccaucugacgaauuugacgcuuccaucucccaaguaaaugaaaaaaucaaccaaagccucgcauucauucgcaaaucugacgaauuacuccacaacguaaacguaggaaaauccacaacaaacauuaugaucaccaccauaauaaucguaauaauagucauauuacuacuccucauagcaguaggacuauuccuauacuguaaagcuagauaaggacuaguggaagcauuuuccuggcugauuaaaagaaauuacucagcuauggucaucuguuccuguuagaaggcuaugcagcauauuauauacuaugcgcauguuaugaaaugcauaauaaaaaauuuuaaaaaaucuaaaagaucuaaaaaaaaaaaaaaaaaaaaaaaaaaaaaaaaaaaaaaaaaaaaaaaaaaaaaaaaaaaaaaaaugcaucccccccccccccccccccccccccccccccaaaggcucuuuucagagccaccagaauu

SEQ ID NO: 18119 - RNA, 1916 nt, Artificial Sequence
  mRNA product Design c-4 comprising derived and/or modified sequence from HRSV(Memphis-37)__AIY60640.1__F-del_DSCav1_mut6 (opt11)
gggagaguccgcucagccagguugcagaagcggcuuagcguguguccuaaucuucucucugcguguagguaggccugugccgcaaacaagcuuaccauggaauuaccaauccucaaaacuaacgccaucaccaccauccucgcugccgucacccucugcuucgccuccagccaaaacaucacagaagaguucuaccaaagcacaugcuccgcugucuccaaaggcuaccuuggcgcccuccgcaccggcugguacaccucaguaauuaccauugaacuaagcaacaucaaagaaaauaaaugcaacggcaccgacgccaaaguuaaacucauaaaacaggaacucgacaaauacaaaaacgccguaacagaccuccaaaugcucaugugcuccacccccgccgccggcucaggcuccgccaucgcaagcggaauagcaguuugcaaaguccuccaccuagaaggcgaggucaacaagauuaaaaacgcacuucucucaaccaacaaggccgucguaucacucucaaacggcgucuccguccucaccuucaaaguucuggaccucaaaaacuacaucgauaaacaacuacucccaauacuuaacaaacaaucaugcuccaucccaaaccccgaaaccgucauggaguuccaacagaaaaacaaccgccuacuggaaaucacacgcgaguucagcguaaacgcuggcgucacuacacccgucuccaccuacaugcucaccaauucugaacuccuaucacucauaaacgacaugcccauuaccaacgaccaaaagaaacuaaugucaaacaacguccaaaucguaagacaacaaucguauuccaucaugugcauaauuaaagaagaaguucucgccuacgugguccaacuaccccucuacggagucauagacacuccuuguuggaaacuccacaccucuccccucugcacuaccaacacaaaagaaggcuccaacaucugccucacccgaaccgacagaggcugguacugcgacaacgccggcuccgucuccuucuucccccaagccgaaaccugcaaagucugcuccaaccgcguuuucugcgacaccaugaacucccucacacuccccuccgaagucaaccuauguaacauagacauauucaacccaaaauacgacugcaaaaucaugacauccaaaaccgacgugucuuccucggucaucaccucccucggcgccaucgucucaugcuacggcaaaacuaaaugcaccgcauccaacaaaaacaaaggcauaaucaaaacauucuccaacggcugcgacuacguuucuaacaaaggcgucgauaccgucuccgucggaaacacccucuacuacguaaacaagcaagaaggccagucccuauacguaaaaggagaaccaauuaucaacuucuacgacccccuagucuuccccuccgacgaguucgacgccuccauaucccaagucaacgagaaaaucaaccaaucccuagccuucauccgcaaaucagacgaacuccuccacaacgucaacgucggaaaauccacaacuaacaucaugaucaccaccaucauuaucgucaucauaguuauacuccuccuccucauagccgucggccucuuccuauacugcaaagcucgcuaaggacuaguggaagcauuuuccuggcugauuaaaagaaauuacucagcuauggucaucuguuccuguuagaaggcuaugcagcauauuauauacuaugcgcauguuaugaaaugcauaauaaaaaauuuuaaaaaaucuaaaagaucuaaaaaaaaaaaaaaaaaaaaaaaaaaaaaaaaaaaaaaaaaaaaaaaaaaaaaaaaaaaaaaaaugcaucccccccccccccccccccccccccccccccaaaggcucuuuucagagccaccagaauu

SEQ ID NO: 18120 - RNA, 1834 nt, Artificial Sequence
  mRNA product Design c-5 comprising derived and/or modified sequence from HRSV(Memphis-37)__AIY60640.1__F-del_DSCav1_mut6 (opt1)
gggagagcggcucggccauuuugucccagucaguccggaggcugcggcugcagaaguaccgccugcggaguaacugcaaagaagcuuaccauggagcugcccauccucaagaccaacgccaucaccacgauccuggccgcggugacccugugcuucgccagcucccagaacaucaccgaggaguucuaccagagcacgugcuccgccgucagcaagggcuaccucggcgcccugcgcaccgggugguacaccagcgugaucaccaucgagcuguccaacaucaaggagaacaagugcaacggcaccgacgccaaggugaagcucaucaagcaggagcuggacaaguacaagaacgcggucacggaccugcagaugcugaugugcagcaccccggccgccggcuccgggagcgcgaucgccuccggcaucgccgucugcaaggugcugcaccucgagggcgaggugaacaagaucaagaacgcccugcuguccaccaacaaggccgucgugagccucuccaacggggugagcguccugaccuucaaggugcuggaccucaagaacuacaucgacaagcagcugcugcccauccugaacaagcagagcugcuccauccccaaccccgagaccgucauggaguuccagcagaagaacaaccgccuccuggagaucacgcgggaguucagcgugaacgcgggcgugaccacccccgucuccaccuacaugcugacgaacagcgagcuccugucccugaucaacgacaugccgaucaccaacgaccagaagaagcucaugagcaacaacgugcagaucgugcgccagcaguccuacagcaucaugugcaucaucaaggaggagguccuggccuacguggugcagcugccccucuacggggucaucgacacccccugcuggaagcugcacaccagcccccugugcacgaccaacaccaaggagggcuccaacaucugccucacccggacggaccgcgggugguacugcgacaacgccggcagcguguccuucuucccgcaggccgagaccugcaaggucugcagcaaccggguguucugcgacaccaugaacucccugacccugcccagcgaggugaaccucugcaacaucgacaucuucaaccccaaguacgacugcaagaucaugacguccaagaccgacgucagcuccagcgugaucaccucccugggcgccaucgugagcugcuacgggaagaccaagugcacggcgagcaacaagaacaagggcaucaucaagaccuucuccaacgggugcgacuacgucagcaacaagggcguggacaccguguccgucggcaacacccuguacuacgugaacaagcaggagggccagagccucuacgugaagggggagcccaucaucaacuucuacgacccgcuggucuuccccuccgacgaguucgacgccagcaucucccaggugaacgagaagaucaaccagagccuggccuucauccggaaguccgacgagcuccugcacaacgugaacgucggcaagagcaccacgaacaucaugaucaccaccaucaucaucgugaucaucgugauccugcugcuccugaucgccgucgggcuguuccucuacugcaaggcccgcugaggacuagucccuguucccagagcccacuuuuuuuucuuuuuuugaaauaaaauagccugucuuucagaucuaaaaaaaaaaaaaaaaaaaaaaaaaaaaaaaaaaaaaaaaaaaaaaaaaaaaaaaaaaaaaaaaugcaucccccccccccccccccccccccccccccccaaaggcucuuuucagagccaccagaauu

SEQ ID NO: 18121 - RNA, 1834 nt, Artificial Sequence
  mRNA product Design c-5 comprising derived and/or modified sequence from HRSV(Memphis-37)__AIY60640.1__F-del_DSCav1_mut6 (opt1)
gggagagcggcucggccauuuugucccagucaguccggaggcugcggcugcagaaguaccgccugcggaguaacugcaaagaagcuuaccauggagcugcccauccucaagaccaacgccaucaccacgauccuggccgcggugacccugugcuucgccagcucccagaacaucaccgaggaguucuaccagagcacgugcuccgccgucagcaagggcuaccucggggcccugcgcaccggcugguacaccuccgugaucaccaucgagcugagcaacaucaaggagaacaagugcaacgggaccgacgccaaggugaagcucaucaagcaggagcuggacaaguacaagaacgcggucacggaccugcagaugcucaugugcuccaccccggccgccggcagcggguccgccaucgcgagcggcaucgccgugugcaaggugcugcaccuggagggcgaggucaacaagaucaagaacgcccuccuguccaccaacaaggccguggugagccuguccaacggggucagcgugcucaccuucaaggugcuggaccugaagaacuacaucgacaagcagcuccugcccauccugaacaagcaguccugcagcauccccaaccccgagacggucauggaguuccagcagaagaacaaccggcuccuggagaucacccgcgaguucuccgugaacgccggcgugaccaccccggucagcacguacaugcugaccaacuccgagcuccugagccugaucaacgacaugcccaucaccaacgaccagaagaagcucaugagcaacaacgugcagaucgugcggcagcaguccuacagcaucaugugcaucaucaaggaggagguccuggcguacguggugcagcugccccucuacggggucaucgacacccccugcuggaagcugcacacguccccgcugugcaccaccaacaccaaggagggcagcaacaucugccucacgcgcaccgaccgggggugguacugcgacaacgccggcuccgugagcuucuucccccaggccgagaccugcaaggugugcuccaaccgcgucuucugcgacaccaugaacagccugacgcugcccuccgaggugaaccucugcaacaucgacaucuucaaccccaaguacgacugcaagaucaugaccagcaagaccgacgucuccagcuccgugaucaccagccugggcgccaucguguccugcuacgggaagacgaagugcaccgccagcaacaagaacaagggcaucaucaagaccuucuccaacgggugcgacuacgucagcaacaagggcguggacaccguguccgucggcaacacgcuguacuacgugaacaagcaggaggggcagagccucuacgugaagggcgagccgaucaucaacuucuacgacccccuggucuuccccagcgacgaguucgacgcguccaucagccaggugaacgagaagaucaaccagucccuggccuucauccgcaagagcgacgagcuccugcacaacgugaacgucgggaaguccaccaccaacaucaugaucaccaccaucaucaucgugaucaucgugauccugcuccugcugaucgccgucggccucuuccuguacugcaaggcccggugaggacuagucccuguucccagagcccacuuuuuuuucuuuuuuugaaauaaaauagccugucuuucagaucuaaaaaaaaaaaaaaaaaaaaaaaaaaaaaaaaaaaaaaaaaaaaaaaaaaaaaaaaaaaaaaaaugcaucccccccccccccccccccccccccccccccaaaggcucuuuucagagccaccagaauu

SEQ ID NO: 18122 - RNA, 1834 nt, Artificial Sequence
  mRNA product Design c-5 comprising derived and/or modified sequence from HRSV(Memphis-37)__AIY60640.1__F-del_DSCav1_mut6 (opt2)
gggagagcggcucggccauuuugucccagucaguccggaggcugcggcugcagaaguaccgccugcggaguaacugcaaagaagcuuaccauggagcuccccauccucaagaccaacgccaucaccaccauccucgccgccgucacccucugcuucgccuccucccagaacaucaccgaggaguucuaccaguccaccugcuccgccgucuccaagggcuaccucggcgcccuccgcaccggcugguacaccuccgucaucaccaucgagcucuccaacaucaaggagaacaagugcaacggcaccgacgccaaggucaagcucaucaagcaggagcucgacaaguacaagaacgccgucaccgaccuccagaugcucaugugcuccacccccgccgccggcuccggcuccgccaucgccuccggcaucgccgucugcaagguccuccaccucgagggcgaggucaacaagaucaagaacgcccuccucuccaccaacaaggccgucgucucccucuccaacggcgucuccguccucaccuucaagguccucgaccucaagaacuacaucgacaagcagcuccuccccauccucaacaagcaguccugcuccauccccaaccccgagaccgucauggaguuccagcagaagaacaaccgccuccucgagaucacccgcgaguucuccgucaacgccggcgucaccacccccgucuccaccuacaugcucaccaacuccgagcuccucucccucaucaacgacaugcccaucaccaacgaccagaagaagcucauguccaacaacguccagaucguccgccagcaguccuacuccaucaugugcaucaucaaggaggagguccucgccuacgucguccagcucccccucuacggcgucaucgacacccccugcuggaagcuccacaccuccccccucugcaccaccaacaccaaggagggcuccaacaucugccucacccgcaccgaccgcggcugguacugcgacaacgccggcuccgucuccuucuucccccaggccgagaccugcaaggucugcuccaaccgcgucuucugcgacaccaugaacucccucacccuccccuccgaggucaaccucugcaacaucgacaucuucaaccccaaguacgacugcaagaucaugaccuccaagaccgacgucuccuccuccgucaucaccucccucggcgccaucgucuccugcuacggcaagaccaagugcaccgccuccaacaagaacaagggcaucaucaagaccuucuccaacggcugcgacuacgucuccaacaagggcgucgacaccgucuccgucggcaacacccucuacuacgucaacaagcaggagggccagucccucuacgucaagggcgagcccaucaucaacuucuacgacccccucgucuuccccuccgacgaguucgacgccuccaucucccaggucaacgagaagaucaaccagucccucgccuucauccgcaaguccgacgagcuccuccacaacgucaacgucggcaaguccaccaccaacaucaugaucaccaccaucaucaucgucaucaucgucauccuccuccuccucaucgccgucggccucuuccucuacugcaaggcccgcugaggacuagucccuguucccagagcccacuuuuuuuucuuuuuuugaaauaaaauagccugucuuucagaucuaaaaaaaaaaaaaaaaaaaaaaaaaaaaaaaaaaaaaaaaaaaaaaaaaaaaaaaaaaaaaaaaugcaucccccccccccccccccccccccccccccccaaaggcucuuuucagagccaccagaauu

SEQ ID NO: 18123 - RNA, 1834 nt, Artificial Sequence
  mRNA product Design c-5 comprising derived and/or modified sequence from HRSV(Memphis-37)__AIY60640.1__F-del_DSCav1_mut6 (opt3)
gggagagcggcucggccauuuugucccagucaguccggaggcugcggcugcagaaguaccgccugcggaguaacugcaaagaagcuuaccauggagcugcccauccucaagaccaacgccauuacaacuauacuugcugcagugacgcugugcuucgccagcucccagaauaucaccgaagaguuuuaccaaucuacauguucagcggucaguaaaggcuauuugggggcuuuaagaacuggaugguacaccagcguuauuacaaucgaacuguccaacauuaaggagaauaaaugcaacgguaccgacgccaaggugaaacuaaucaagcaggaacucgauaaguauaaaaaugcaguaacugaccugcagaugcuuauguguucuacuccugccgcuggcucggggucagcaauagccagcggaaucgcugugugcaagguccugcacuuggagggcgaggugaacaaaauuaagaaugcccuccugaguaccaacaaagcgguugugucccugucuaauggugucagcgugcucacguucaagguauuagaucugaagaacuacaucgacaaacagcuuuugccaauucugaauaagcaauccuguucaaucccgaaccccgaaacuguuauggaguuucagcagaaaaauaacaggcuacucgaaauaacccgggaguucagugugaaugcaggggucacaacuccugugagcaccuauaugcugacaaacucugagcuucuguccuugauuaacgauaugccaaucaccaaugaccagaagaaacucaugucaaacaaugugcaaauuguccgccagcagagcuacaguaucaugugcaucauuaaggaagagguucuggccuaugugguacaguuaccccuguacggagugauagauacgccuuguuggaaacuccauacuucuccacuuugcacaaccaacacuaaggaaggcuccaauaucugucugacacgaaccgaccguggcugguacugcgauaacgcugggagcgucucguuuuucccccaagccgagacguguaaggugugcucuaauagaguuuucugcgacaccaugaacuccuugacacuaccuucagaagugaaucuguguaacauugauaucuucaauccaaaauaugacugcaagauaaugacaaguaaaaccgaugucagcuccucugugauuacaagccucggagcaaucguaucauguuacgguaagacuaaaugcaccgcuaguaacaagaauaagggcaucauuaaaacauuuuccaacgggugugacuauguuagcaauaagggaguggacaccgucucugugggcaacacucuguacuaugucaacaaacaggagggucagucacuuuacgugaagggggagccgaucauuaauuucuaugauccccugguuuuuccuagugacgaauuugaugccagcauaucccaagugaacgagaaaaucaaucagucuuuggcguuuauuaggaagucggacgaacuccugcacaacguaaaugucggaaagagcacgacaaacaucaugaucaccacuauuauaaucgugauuaucguuauuuuacugcuacucaucgccgugggccuguuccuuuacugcaaagcacggugaggacuagucccuguucccagagcccacuuuuuuuucuuuuuuugaaauaaaauagccugucuuucagaucuaaaaaaaaaaaaaaaaaaaaaaaaaaaaaaaaaaaaaaaaaaaaaaaaaaaaaaaaaaaaaaaaugcaucccccccccccccccccccccccccccccccaaaggcucuuuucagagccaccagaauu

SEQ ID NO: 18124 - RNA, 1834 nt, Artificial Sequence
  mRNA product Design c-5 comprising derived and/or modified sequence from HRSV(Memphis-37)__AIY60640.1__F-del_DSCav1_mut6 (opt4)
gggagagcggcucggccauuuugucccagucaguccggaggcugcggcugcagaaguaccgccugcggaguaacugcaaagaagcuuaccauggagcugcccauccugaagaccaacgccaucaccaccauccuggccgccgugacccugugcuucgccagcagccagaacaucaccgaggaguucuaccagagcaccugcagcgccgugagcaagggcuaccugggcgcccugagaaccggcugguacaccagcgugaucaccaucgagcugagcaacaucaaggagaacaagugcaacggcaccgacgccaaggugaagcugaucaagcaggagcuggacaaguacaagaacgccgugaccgaccugcagaugcugaugugcagcacccccgccgccggcagcggcagcgccaucgccagcggcaucgccgugugcaaggugcugcaccuggagggcgaggugaacaagaucaagaacgcccugcugagcaccaacaaggccguggugagccugagcaacggcgugagcgugcugaccuucaaggugcuggaccugaagaacuacaucgacaagcagcugcugcccauccugaacaagcagagcugcagcauccccaaccccgagaccgugauggaguuccagcagaagaacaacagacugcuggagaucaccagagaguucagcgugaacgccggcgugaccacccccgugagcaccuacaugcugaccaacagcgagcugcugagccugaucaacgacaugcccaucaccaacgaccagaagaagcugaugagcaacaacgugcagaucgugagacagcagagcuacagcaucaugugcaucaucaaggaggaggugcuggccuacguggugcagcugccccuguacggcgugaucgacacccccugcuggaagcugcacaccagcccccugugcaccaccaacaccaaggagggcagcaacaucugccugaccagaaccgacagaggcugguacugcgacaacgccggcagcgugagcuucuucccccaggccgagaccugcaaggugugcagcaacagaguguucugcgacaccaugaacagccugacccugcccagcgaggugaaccugugcaacaucgacaucuucaaccccaaguacgacugcaagaucaugaccagcaagaccgacgugagcagcagcgugaucaccagccugggcgccaucgugagcugcuacggcaagaccaagugcaccgccagcaacaagaacaagggcaucaucaagaccuucagcaacggcugcgacuacgugagcaacaagggcguggacaccgugagcgugggcaacacccuguacuacgugaacaagcaggagggccagagccuguacgugaagggcgagcccaucaucaacuucuacgacccccugguguuccccagcgacgaguucgacgccagcaucagccaggugaacgagaagaucaaccagagccuggccuucaucagaaagagcgacgagcugcugcacaacgugaacgugggcaagagcaccaccaacaucaugaucaccaccaucaucaucgugaucaucgugauccugcugcugcugaucgccgugggccuguuccuguacugcaaggccagaugaggacuagucccuguucccagagcccacuuuuuuuucuuuuuuugaaauaaaauagccugucuuucagaucuaaaaaaaaaaaaaaaaaaaaaaaaaaaaaaaaaaaaaaaaaaaaaaaaaaaaaaaaaaaaaaaaugcaucccccccccccccccccccccccccccccccaaaggcucuuuucagagccaccagaauu

SEQ ID NO: 18125 - RNA, 1834 nt, Artificial Sequence
  mRNA product Design c-5 comprising derived and/or modified sequence from HRSV(Memphis-37)__AIY60640.1__F-del_DSCav1_mut6 (opt5)
gggagagcggcucggccauuuugucccagucaguccggaggcugcggcugcagaaguaccgccugcggaguaacugcaaagaagcuuaccauggagcugcccauccucaagaccaacgccauuacaacgauccuggcugccgugacccuuugcuucgcgagcucccagaauauuacagaagaguuuuaccaaucuaccuguagcgcugucuccaaaggcuaucugggggcccucagaacaggaugguacaccucuguuaucacaauugaacugagcaacaucaaggagaauaaaugcaacggcaccgacgccaaggugaaacuuaucaagcaggaacuggauaaguauaaaaaugcugugacggaccuccagaugcugauguguuccaccccugccgcugggucuggaagcgccauugcguccggcaucgccgucugcaaggugcugcaccucgagggggagguuaacaaaauuaagaaugcucugcuuagcacaaacaaagccguggucucucuguccaauggagugagcguucucaccuucaaggugcuggaucuuaagaacuacaucgacaaacagcugcucccgauucugaauaagcaaucuuguuccauccccaacccugaaacagucauggaguuucagcagaaaaauaaccggcugcucgaaauuacccgcgaguucagcgugaaugcuggcgugacgacacccgucucuaccuauaugcugacaaacuccgagcuucugagccucaucaacgauaugccuaucaccaaugaccagaagaaacugauguccaacaauguucaaauugugagacagcagucuuacagcaucaugugcauuaucaaggaagaggugcuugccuaugucgugcagcugccccucuacggcguuauugauaccccuuguuggaaacugcauacauccccgcugugcacgaccaacacaaaggaagggagcaauaucugucucacccggacagaccgcggaugguacugcgauaacgcgggcucuguguccuuuuucccccaagccgagaccuguaaggucugcagcaauagaguguuuugcgacacgaugaacucucugacacuuccuagcgaaguuaaucuguguaacaucgauauuuucaaucccaaauaugacugcaagaucaugaccuccaaaaccgaugugucuagcuccgucauuacaagccucggggcuaucgugucuuguuacggaaagaccaaaugcacagccuccaacaagaauaagggcauuaucaaaacguuuagcaacgggugugacuaugucucuaauaagggaguggacaccguuuccgugggcaacacacuguacuaugucaacaaacaggagggccagagccuuuacgugaagggggagccuaucauuaauuucuaugauccccugguuuuuccguccgacgaauuugaugcuucuaucagccaagugaacgagaaaauuaaucagucccucgccuucauccggaagucugacgaacugcugcacaacgucaaugugggaaagagcaccacaaacauuaugaucaccacgauuaucaucgugauuaucguuauucuccugcuucugaucgccgucggccucuuccuguacugcaaagcucgcugaggacuagucccuguucccagagcccacuuuuuuuucuuuuuuugaaauaaaauagccugucuuucagaucuaaaaaaaaaaaaaaaaaaaaaaaaaaaaaaaaaaaaaaaaaaaaaaaaaaaaaaaaaaaaaaaaugcaucccccccccccccccccccccccccccccccaaaggcucuuuucagagccaccagaauu

SEQ ID NO: 18126 - RNA, 1834 nt, Artificial Sequence
  mRNA product Design c-5 comprising derived and/or modified sequence from HRSV(Memphis-37)__AIY60640.1__F-del_DSCav1_mut6 (opt6)
gggagagcggcucggccauuuugucccagucaguccggaggcugcggcugcagaaguaccgccugcggaguaacugcaaagaagcuuaccauggaacuaccuauacuaaaaaccaacgccauaacaacaauacuagccgcaguuacacucugcuuugcauccucacaaaacaucacagaggaauuuuaccaaucuacuugcuccgcaguaucaaaaggauaccuaggagcacuccguacaggaugguacacaucagucauaacaauugaauuaucuaacaucaaagaaaacaaauguaaugguacagacgccaaaguaaaauuaauaaaacaagaacuagacaaauacaaaaacgccguaacagaccuacaaaugcuaaugugcucaacccccgccgcaggaucuggaucagcaauugccucaggcauagcaguaugcaaaguccuacaccuagaaggagaagucaacaaaauaaaaaacgcucuccucucaaccaauaaagcaguaguaucccucucaaacggaguaucaguacuaacauucaaaguacuagaccucaaaaauuauauagacaagcaacuacucccaauauuaaauaaacaauccugcucaauacccaauccagaaacagucauggaauuucaacaaaaaaacaaccgacucuuagaaauaacaagagaauuuucagucaaugccggcgucacaaccccaguaucaacauacaugcuaacaaacucagaacuacuaucacuaaucaacgauaugcccauaaccaacgaccaaaaaaaacuaaugucaaacaauguacaaauuguaagacaacagucuuauucaauaaugugcauaauaaaagaagaagucuuagcauauguaguacaacuaccacuauacggaguaauagacacaccauguuggaaauuacacacauccccacuauguaccaccaacacaaaagaaggaucuaacauaugccuaaccagaacagaccgaggcugguauugcgacaaugcaggaucaguauccuucuuuccacaagcagaaacaugcaaagucugcucuaacagaguauucugcgauacuaugaacucacuuaccuuaccaucagaaguaaaucuauguaauaucgacauauucaaucccaaauaugauugcaaaauaaugaccucaaaaacagauguaucaucaucagucauaacaucacuaggagcaauagucagcugcuaugggaaaacaaaaugcacagcuuccaacaaaaacaaaggaaucauaaaaacauucucaaaugguugugacuacguauccaacaaaggaguagauacaguaucuguaggcaacacauuauacuauguaaauaaacaagaaggacaaagccuauacgucaaaggagaacccaucauaaauuucuaugacccauuaguuuucccaucugacgaauuugacgcuuccaucucccaaguaaaugaaaaaaucaaccaaagccucgcauucauucgcaaaucugacgaauuacuccacaacguaaacguaggaaaauccacaacaaacauuaugaucaccaccauaauaaucguaauaauagucauauuacuacuccucauagcaguaggacuauuccuauacuguaaagcuagauaaggacuagucccuguucccagagcccacuuuuuuuucuuuuuuugaaauaaaauagccugucuuucagaucuaaaaaaaaaaaaaaaaaaaaaaaaaaaaaaaaaaaaaaaaaaaaaaaaaaaaaaaaaaaaaaaaugcaucccccccccccccccccccccccccccccccaaaggcucuuuucagagccaccagaauu

SEQ ID NO: 18127 - RNA, 1834 nt, Artificial Sequence
  mRNA product Design c-5 comprising derived and/or modified sequence from HRSV(Memphis-37)__AIY60640.1__F-del_DSCav1_mut6 (opt11)
gggagagcggcucggccauuuugucccagucaguccggaggcugcggcugcagaaguaccgccugcggaguaacugcaaagaagcuuaccauggaauuaccaauccucaaaacuaacgccaucaccaccauccucgcugccgucacccucugcuucgccuccagccaaaacaucacagaagaguucuaccaaagcacaugcuccgcugucuccaaaggcuaccuuggcgcccuccgcaccggcugguacaccucaguaauuaccauugaacuaagcaacaucaaagaaaauaaaugcaacggcaccgacgccaaaguuaaacucauaaaacaggaacucgacaaauacaaaaacgccguaacagaccuccaaaugcucaugugcuccacccccgccgccggcucaggcuccgccaucgcaagcggaauagcaguuugcaaaguccuccaccuagaaggcgaggucaacaagauuaaaaacgcacuucucucaaccaacaaggccgucguaucacucucaaacggcgucuccguccucaccuucaaaguucuggaccucaaaaacuacaucgauaaacaacuacucccaauacuuaacaaacaaucaugcuccaucccaaaccccgaaaccgucauggaguuccaacagaaaaacaaccgccuacuggaaaucacacgcgaguucagcguaaacgcuggcgucacuacacccgucuccaccuacaugcucaccaauucugaacuccuaucacucauaaacgacaugcccauuaccaacgaccaaaagaaacuaaugucaaacaacguccaaaucguaagacaacaaucguauuccaucaugugcauaauuaaagaagaaguucucgccuacgugguccaacuaccccucuacggagucauagacacuccuuguuggaaacuccacaccucuccccucugcacuaccaacacaaaagaaggcuccaacaucugccucacccgaaccgacagaggcugguacugcgacaacgccggcuccgucuccuucuucccccaagccgaaaccugcaaagucugcuccaaccgcguuuucugcgacaccaugaacucccucacacuccccuccgaagucaaccuauguaacauagacauauucaacccaaaauacgacugcaaaaucaugacauccaaaaccgacgugucuuccucggucaucaccucccucggcgccaucgucucaugcuacggcaaaacuaaaugcaccgcauccaacaaaaacaaaggcauaaucaaaacauucuccaacggcugcgacuacguuucuaacaaaggcgucgauaccgucuccgucggaaacacccucuacuacguaaacaagcaagaaggccagucccuauacguaaaaggagaaccaauuaucaacuucuacgacccccuagucuuccccuccgacgaguucgacgccuccauaucccaagucaacgagaaaaucaaccaaucccuagccuucauccgcaaaucagacgaacuccuccacaacgucaacgucggaaaauccacaacuaacaucaugaucaccaccaucauuaucgucaucauaguuauacuccuccuccucauagccgucggccucuuccuauacugcaaagcucgcuaaggacuagucccuguucccagagcccacuuuuuuuucuuuuuuugaaauaaaauagccugucuuucagaucuaaaaaaaaaaaaaaaaaaaaaaaaaaaaaaaaaaaaaaaaaaaaaaaaaaaaaaaaaaaaaaaaugcaucccccccccccccccccccccccccccccccaaaggcucuuuucagagccaccagaauu

SEQ ID NO: 18128 - RNA, 1843 nt, Artificial Sequence
  mRNA product Design d-1 comprising derived and/or modified sequence from HRSV(Memphis-37)__AIY60640.1__F-del_DSCav1_mut6 (opt1)
gggagacccgugacccggaaguuguacggcuacgcgacuuucccucccacaaacccucgcgcccuuccuuuccuacuugggcccggcagaaagcuuaccauggagcugcccauccucaagaccaacgccaucaccacgauccuggccgcggugacccugugcuucgccagcucccagaacaucaccgaggaguucuaccagagcacgugcuccgccgucagcaagggcuaccucggcgcccugcgcaccgggugguacaccagcgugaucaccaucgagcuguccaacaucaaggagaacaagugcaacggcaccgacgccaaggugaagcucaucaagcaggagcuggacaaguacaagaacgcggucacggaccugcagaugcugaugugcagcaccccggccgccggcuccgggagcgcgaucgccuccggcaucgccgucugcaaggugcugcaccucgagggcgaggugaacaagaucaagaacgcccugcuguccaccaacaaggccgucgugagccucuccaacggggugagcguccugaccuucaaggugcuggaccucaagaacuacaucgacaagcagcugcugcccauccugaacaagcagagcugcuccauccccaaccccgagaccgucauggaguuccagcagaagaacaaccgccuccuggagaucacgcgggaguucagcgugaacgcgggcgugaccacccccgucuccaccuacaugcugacgaacagcgagcuccugucccugaucaacgacaugccgaucaccaacgaccagaagaagcucaugagcaacaacgugcagaucgugcgccagcaguccuacagcaucaugugcaucaucaaggaggagguccuggccuacguggugcagcugccccucuacggggucaucgacacccccugcuggaagcugcacaccagcccccugugcacgaccaacaccaaggagggcuccaacaucugccucacccggacggaccgcgggugguacugcgacaacgccggcagcguguccuucuucccgcaggccgagaccugcaaggucugcagcaaccggguguucugcgacaccaugaacucccugacccugcccagcgaggugaaccucugcaacaucgacaucuucaaccccaaguacgacugcaagaucaugacguccaagaccgacgucagcuccagcgugaucaccucccugggcgccaucgugagcugcuacgggaagaccaagugcacggcgagcaacaagaacaagggcaucaucaagaccuucuccaacgggugcgacuacgucagcaacaagggcguggacaccguguccgucggcaacacccuguacuacgugaacaagcaggagggccagagccucuacgugaagggggagcccaucaucaacuucuacgacccgcuggucuuccccuccgacgaguucgacgccagcaucucccaggugaacgagaagaucaaccagagccuggccuucauccggaaguccgacgagcuccugcacaacgugaacgucggcaagagcaccacgaacaucaugaucaccaccaucaucaucgugaucaucgugauccugcugcuccugaucgccgucgggcuguuccucuacugcaaggcccgcugaggacuagucccuguucccagagcccacuuuuuuuucuuuuuuugaaauaaaauagccugucuuucagaucuaaaaaaaaaaaaaaaaaaaaaaaaaaaaaaaaaaaaaaaaaaaaaaaaaaaaaaaaaaaaaaaaugcaucccccccccccccccccccccccccccccccaaaggcucuuuucagagccaccagaauu

SEQ ID NO: 18129 - RNA, 1843 nt, Artificial Sequence
  mRNA product Design d-1 comprising derived and/or modified sequence from HRSV(Memphis-37)__AIY60640.1__F-del_DSCav1_mut6 (opt1)
gggagacccgugacccggaaguuguacggcuacgcgacuuucccucccacaaacccucgcgcccuuccuuuccuacuugggcccggcagaaagcuuaccauggagcugcccauccucaagaccaacgccaucaccacgauccuggccgcggugacccugugcuucgccagcucccagaacaucaccgaggaguucuaccagagcacgugcuccgccgucagcaagggcuaccucggggcccugcgcaccggcugguacaccuccgugaucaccaucgagcugagcaacaucaaggagaacaagugcaacgggaccgacgccaaggugaagcucaucaagcaggagcuggacaaguacaagaacgcggucacggaccugcagaugcucaugugcuccaccccggccgccggcagcggguccgccaucgcgagcggcaucgccgugugcaaggugcugcaccuggagggcgaggucaacaagaucaagaacgcccuccuguccaccaacaaggccguggugagccuguccaacggggucagcgugcucaccuucaaggugcuggaccugaagaacuacaucgacaagcagcuccugcccauccugaacaagcaguccugcagcauccccaaccccgagacggucauggaguuccagcagaagaacaaccggcuccuggagaucacccgcgaguucuccgugaacgccggcgugaccaccccggucagcacguacaugcugaccaacuccgagcuccugagccugaucaacgacaugcccaucaccaacgaccagaagaagcucaugagcaacaacgugcagaucgugcggcagcaguccuacagcaucaugugcaucaucaaggaggagguccuggcguacguggugcagcugccccucuacggggucaucgacacccccugcuggaagcugcacacguccccgcugugcaccaccaacaccaaggagggcagcaacaucugccucacgcgcaccgaccgggggugguacugcgacaacgccggcuccgugagcuucuucccccaggccgagaccugcaaggugugcuccaaccgcgucuucugcgacaccaugaacagccugacgcugcccuccgaggugaaccucugcaacaucgacaucuucaaccccaaguacgacugcaagaucaugaccagcaagaccgacgucuccagcuccgugaucaccagccugggcgccaucguguccugcuacgggaagacgaagugcaccgccagcaacaagaacaagggcaucaucaagaccuucuccaacgggugcgacuacgucagcaacaagggcguggacaccguguccgucggcaacacgcuguacuacgugaacaagcaggaggggcagagccucuacgugaagggcgagccgaucaucaacuucuacgacccccuggucuuccccagcgacgaguucgacgcguccaucagccaggugaacgagaagaucaaccagucccuggccuucauccgcaagagcgacgagcuccugcacaacgugaacgucgggaaguccaccaccaacaucaugaucaccaccaucaucaucgugaucaucgugauccugcuccugcugaucgccgucggccucuuccuguacugcaaggcccggugaggacuagucccuguucccagagcccacuuuuuuuucuuuuuuugaaauaaaauagccugucuuucagaucuaaaaaaaaaaaaaaaaaaaaaaaaaaaaaaaaaaaaaaaaaaaaaaaaaaaaaaaaaaaaaaaaugcaucccccccccccccccccccccccccccccccaaaggcucuuuucagagccaccagaauu

SEQ ID NO: 18130 - RNA, 1843 nt, Artificial Sequence
  mRNA product Design d-1 comprising derived and/or modified sequence from HRSV(Memphis-37)__AIY60640.1__F-del_DSCav1_mut6 (opt2)
gggagacccgugacccggaaguuguacggcuacgcgacuuucccucccacaaacccucgcgcccuuccuuuccuacuugggcccggcagaaagcuuaccauggagcuccccauccucaagaccaacgccaucaccaccauccucgccgccgucacccucugcuucgccuccucccagaacaucaccgaggaguucuaccaguccaccugcuccgccgucuccaagggcuaccucggcgcccuccgcaccggcugguacaccuccgucaucaccaucgagcucuccaacaucaaggagaacaagugcaacggcaccgacgccaaggucaagcucaucaagcaggagcucgacaaguacaagaacgccgucaccgaccuccagaugcucaugugcuccacccccgccgccggcuccggcuccgccaucgccuccggcaucgccgucugcaagguccuccaccucgagggcgaggucaacaagaucaagaacgcccuccucuccaccaacaaggccgucgucucccucuccaacggcgucuccguccucaccuucaagguccucgaccucaagaacuacaucgacaagcagcuccuccccauccucaacaagcaguccugcuccauccccaaccccgagaccgucauggaguuccagcagaagaacaaccgccuccucgagaucacccgcgaguucuccgucaacgccggcgucaccacccccgucuccaccuacaugcucaccaacuccgagcuccucucccucaucaacgacaugcccaucaccaacgaccagaagaagcucauguccaacaacguccagaucguccgccagcaguccuacuccaucaugugcaucaucaaggaggagguccucgccuacgucguccagcucccccucuacggcgucaucgacacccccugcuggaagcuccacaccuccccccucugcaccaccaacaccaaggagggcuccaacaucugccucacccgcaccgaccgcggcugguacugcgacaacgccggcuccgucuccuucuucccccaggccgagaccugcaaggucugcuccaaccgcgucuucugcgacaccaugaacucccucacccuccccuccgaggucaaccucugcaacaucgacaucuucaaccccaaguacgacugcaagaucaugaccuccaagaccgacgucuccuccuccgucaucaccucccucggcgccaucgucuccugcuacggcaagaccaagugcaccgccuccaacaagaacaagggcaucaucaagaccuucuccaacggcugcgacuacgucuccaacaagggcgucgacaccgucuccgucggcaacacccucuacuacgucaacaagcaggagggccagucccucuacgucaagggcgagcccaucaucaacuucuacgacccccucgucuuccccuccgacgaguucgacgccuccaucucccaggucaacgagaagaucaaccagucccucgccuucauccgcaaguccgacgagcuccuccacaacgucaacgucggcaaguccaccaccaacaucaugaucaccaccaucaucaucgucaucaucgucauccuccuccuccucaucgccgucggccucuuccucuacugcaaggcccgcugaggacuagucccuguucccagagcccacuuuuuuuucuuuuuuugaaauaaaauagccugucuuucagaucuaaaaaaaaaaaaaaaaaaaaaaaaaaaaaaaaaaaaaaaaaaaaaaaaaaaaaaaaaaaaaaaaugcaucccccccccccccccccccccccccccccccaaaggcucuuuucagagccaccagaauu

SEQ ID NO: 18131 - RNA, 1843 nt, Artificial Sequence
  mRNA product Design d-1 comprising derived and/or modified sequence from HRSV(Memphis-37)__AIY60640.1__F-del_DSCav1_mut6 (opt3)
gggagacccgugacccggaaguuguacggcuacgcgacuuucccucccacaaacccucgcgcccuuccuuuccuacuugggcccggcagaaagcuuaccauggagcugcccauccucaagaccaacgccauuacaacuauacuugcugcagugacgcugugcuucgccagcucccagaauaucaccgaagaguuuuaccaaucuacauguucagcggucaguaaaggcuauuugggggcuuuaagaacuggaugguacaccagcguuauuacaaucgaacuguccaacauuaaggagaauaaaugcaacgguaccgacgccaaggugaaacuaaucaagcaggaacucgauaaguauaaaaaugcaguaacugaccugcagaugcuuauguguucuacuccugccgcuggcucggggucagcaauagccagcggaaucgcugugugcaagguccugcacuuggagggcgaggugaacaaaauuaagaaugcccuccugaguaccaacaaagcgguugugucccugucuaauggugucagcgugcucacguucaagguauuagaucugaagaacuacaucgacaaacagcuuuugccaauucugaauaagcaauccuguucaaucccgaaccccgaaacuguuauggaguuucagcagaaaaauaacaggcuacucgaaauaacccgggaguucagugugaaugcaggggucacaacuccugugagcaccuauaugcugacaaacucugagcuucuguccuugauuaacgauaugccaaucaccaaugaccagaagaaacucaugucaaacaaugugcaaauuguccgccagcagagcuacaguaucaugugcaucauuaaggaagagguucuggccuaugugguacaguuaccccuguacggagugauagauacgccuuguuggaaacuccauacuucuccacuuugcacaaccaacacuaaggaaggcuccaauaucugucugacacgaaccgaccguggcugguacugcgauaacgcugggagcgucucguuuuucccccaagccgagacguguaaggugugcucuaauagaguuuucugcgacaccaugaacuccuugacacuaccuucagaagugaaucuguguaacauugauaucuucaauccaaaauaugacugcaagauaaugacaaguaaaaccgaugucagcuccucugugauuacaagccucggagcaaucguaucauguuacgguaagacuaaaugcaccgcuaguaacaagaauaagggcaucauuaaaacauuuuccaacgggugugacuauguuagcaauaagggaguggacaccgucucugugggcaacacucuguacuaugucaacaaacaggagggucagucacuuuacgugaagggggagccgaucauuaauuucuaugauccccugguuuuuccuagugacgaauuugaugccagcauaucccaagugaacgagaaaaucaaucagucuuuggcguuuauuaggaagucggacgaacuccugcacaacguaaaugucggaaagagcacgacaaacaucaugaucaccacuauuauaaucgugauuaucguuauuuuacugcuacucaucgccgugggccuguuccuuuacugcaaagcacggugaggacuagucccuguucccagagcccacuuuuuuuucuuuuuuugaaauaaaauagccugucuuucagaucuaaaaaaaaaaaaaaaaaaaaaaaaaaaaaaaaaaaaaaaaaaaaaaaaaaaaaaaaaaaaaaaaugcaucccccccccccccccccccccccccccccccaaaggcucuuuucagagccaccagaauu

SEQ ID NO: 18132 - RNA, 1843 nt, Artificial Sequence
  mRNA product Design d-1 comprising derived and/or modified sequence from HRSV(Memphis-37)__AIY60640.1__F-del_DSCav1_mut6 (opt4)
gggagacccgugacccggaaguuguacggcuacgcgacuuucccucccacaaacccucgcgcccuuccuuuccuacuugggcccggcagaaagcuuaccauggagcugcccauccugaagaccaacgccaucaccaccauccuggccgccgugacccugugcuucgccagcagccagaacaucaccgaggaguucuaccagagcaccugcagcgccgugagcaagggcuaccugggcgcccugagaaccggcugguacaccagcgugaucaccaucgagcugagcaacaucaaggagaacaagugcaacggcaccgacgccaaggugaagcugaucaagcaggagcuggacaaguacaagaacgccgugaccgaccugcagaugcugaugugcagcacccccgccgccggcagcggcagcgccaucgccagcggcaucgccgugugcaaggugcugcaccuggagggcgaggugaacaagaucaagaacgcccugcugagcaccaacaaggccguggugagccugagcaacggcgugagcgugcugaccuucaaggugcuggaccugaagaacuacaucgacaagcagcugcugcccauccugaacaagcagagcugcagcauccccaaccccgagaccgugauggaguuccagcagaagaacaacagacugcuggagaucaccagagaguucagcgugaacgccggcgugaccacccccgugagcaccuacaugcugaccaacagcgagcugcugagccugaucaacgacaugcccaucaccaacgaccagaagaagcugaugagcaacaacgugcagaucgugagacagcagagcuacagcaucaugugcaucaucaaggaggaggugcuggccuacguggugcagcugccccuguacggcgugaucgacacccccugcuggaagcugcacaccagcccccugugcaccaccaacaccaaggagggcagcaacaucugccugaccagaaccgacagaggcugguacugcgacaacgccggcagcgugagcuucuucccccaggccgagaccugcaaggugugcagcaacagaguguucugcgacaccaugaacagccugacccugcccagcgaggugaaccugugcaacaucgacaucuucaaccccaaguacgacugcaagaucaugaccagcaagaccgacgugagcagcagcgugaucaccagccugggcgccaucgugagcugcuacggcaagaccaagugcaccgccagcaacaagaacaagggcaucaucaagaccuucagcaacggcugcgacuacgugagcaacaagggcguggacaccgugagcgugggcaacacccuguacuacgugaacaagcaggagggccagagccuguacgugaagggcgagcccaucaucaacuucuacgacccccugguguuccccagcgacgaguucgacgccagcaucagccaggugaacgagaagaucaaccagagccuggccuucaucagaaagagcgacgagcugcugcacaacgugaacgugggcaagagcaccaccaacaucaugaucaccaccaucaucaucgugaucaucgugauccugcugcugcugaucgccgugggccuguuccuguacugcaaggccagaugaggacuagucccuguucccagagcccacuuuuuuuucuuuuuuugaaauaaaauagccugucuuucagaucuaaaaaaaaaaaaaaaaaaaaaaaaaaaaaaaaaaaaaaaaaaaaaaaaaaaaaaaaaaaaaaaaugcaucccccccccccccccccccccccccccccccaaaggcucuuuucagagccaccagaauu

SEQ ID NO: 18133 - RNA, 1843 nt, Artificial Sequence
  mRNA product Design d-1 comprising derived and/or modified sequence from HRSV(Memphis-37)__AIY60640.1__F-del_DSCav1_mut6 (opt5)
gggagacccgugacccggaaguuguacggcuacgcgacuuucccucccacaaacccucgcgcccuuccuuuccuacuugggcccggcagaaagcuuaccauggagcugcccauccucaagaccaacgccauuacaacgauccuggcugccgugacccuuugcuucgcgagcucccagaauauuacagaagaguuuuaccaaucuaccuguagcgcugucuccaaaggcuaucugggggcccucagaacaggaugguacaccucuguuaucacaauugaacugagcaacaucaaggagaauaaaugcaacggcaccgacgccaaggugaaacuuaucaagcaggaacuggauaaguauaaaaaugcugugacggaccuccagaugcugauguguuccaccccugccgcugggucuggaagcgccauugcguccggcaucgccgucugcaaggugcugcaccucgagggggagguuaacaaaauuaagaaugcucugcuuagcacaaacaaagccguggucucucuguccaauggagugagcguucucaccuucaaggugcuggaucuuaagaacuacaucgacaaacagcugcucccgauucugaauaagcaaucuuguuccauccccaacccugaaacagucauggaguuucagcagaaaaauaaccggcugcucgaaauuacccgcgaguucagcgugaaugcuggcgugacgacacccgucucuaccuauaugcugacaaacuccgagcuucugagccucaucaacgauaugccuaucaccaaugaccagaagaaacugauguccaacaauguucaaauugugagacagcagucuuacagcaucaugugcauuaucaaggaagaggugcuugccuaugucgugcagcugccccucuacggcguuauugauaccccuuguuggaaacugcauacauccccgcugugcacgaccaacacaaaggaagggagcaauaucugucucacccggacagaccgcggaugguacugcgauaacgcgggcucuguguccuuuuucccccaagccgagaccuguaaggucugcagcaauagaguguuuugcgacacgaugaacucucugacacuuccuagcgaaguuaaucuguguaacaucgauauuuucaaucccaaauaugacugcaagaucaugaccuccaaaaccgaugugucuagcuccgucauuacaagccucggggcuaucgugucuuguuacggaaagaccaaaugcacagccuccaacaagaauaagggcauuaucaaaacguuuagcaacgggugugacuaugucucuaauaagggaguggacaccguuuccgugggcaacacacuguacuaugucaacaaacaggagggccagagccuuuacgugaagggggagccuaucauuaauuucuaugauccccugguuuuuccguccgacgaauuugaugcuucuaucagccaagugaacgagaaaauuaaucagucccucgccuucauccggaagucugacgaacugcugcacaacgucaaugugggaaagagcaccacaaacauuaugaucaccacgauuaucaucgugauuaucguuauucuccugcuucugaucgccgucggccucuuccuguacugcaaagcucgcugaggacuagucccuguucccagagcccacuuuuuuuucuuuuuuugaaauaaaauagccugucuuucagaucuaaaaaaaaaaaaaaaaaaaaaaaaaaaaaaaaaaaaaaaaaaaaaaaaaaaaaaaaaaaaaaaaugcaucccccccccccccccccccccccccccccccaaaggcucuuuucagagccaccagaauu

SEQ ID NO: 18134 - RNA, 1843 nt, Artificial Sequence
  mRNA product Design d-1 comprising derived and/or modified sequence from HRSV(Memphis-37)__AIY60640.1__F-del_DSCav1_mut6 (opt6)
gggagacccgugacccggaaguuguacggcuacgcgacuuucccucccacaaacccucgcgcccuuccuuuccuacuugggcccggcagaaagcuuaccauggaacuaccuauacuaaaaaccaacgccauaacaacaauacuagccgcaguuacacucugcuuugcauccucacaaaacaucacagaggaauuuuaccaaucuacuugcuccgcaguaucaaaaggauaccuaggagcacuccguacaggaugguacacaucagucauaacaauugaauuaucuaacaucaaagaaaacaaauguaaugguacagacgccaaaguaaaauuaauaaaacaagaacuagacaaauacaaaaacgccguaacagaccuacaaaugcuaaugugcucaacccccgccgcaggaucuggaucagcaauugccucaggcauagcaguaugcaaaguccuacaccuagaaggagaagucaacaaaauaaaaaacgcucuccucucaaccaauaaagcaguaguaucccucucaaacggaguaucaguacuaacauucaaaguacuagaccucaaaaauuauauagacaagcaacuacucccaauauuaaauaaacaauccugcucaauacccaauccagaaacagucauggaauuucaacaaaaaaacaaccgacucuuagaaauaacaagagaauuuucagucaaugccggcgucacaaccccaguaucaacauacaugcuaacaaacucagaacuacuaucacuaaucaacgauaugcccauaaccaacgaccaaaaaaaacuaaugucaaacaauguacaaauuguaagacaacagucuuauucaauaaugugcauaauaaaagaagaagucuuagcauauguaguacaacuaccacuauacggaguaauagacacaccauguuggaaauuacacacauccccacuauguaccaccaacacaaaagaaggaucuaacauaugccuaaccagaacagaccgaggcugguauugcgacaaugcaggaucaguauccuucuuuccacaagcagaaacaugcaaagucugcucuaacagaguauucugcgauacuaugaacucacuuaccuuaccaucagaaguaaaucuauguaauaucgacauauucaaucccaaauaugauugcaaaauaaugaccucaaaaacagauguaucaucaucagucauaacaucacuaggagcaauagucagcugcuaugggaaaacaaaaugcacagcuuccaacaaaaacaaaggaaucauaaaaacauucucaaaugguugugacuacguauccaacaaaggaguagauacaguaucuguaggcaacacauuauacuauguaaauaaacaagaaggacaaagccuauacgucaaaggagaacccaucauaaauuucuaugacccauuaguuuucccaucugacgaauuugacgcuuccaucucccaaguaaaugaaaaaaucaaccaaagccucgcauucauucgcaaaucugacgaauuacuccacaacguaaacguaggaaaauccacaacaaacauuaugaucaccaccauaauaaucguaauaauagucauauuacuacuccucauagcaguaggacuauuccuauacuguaaagcuagauaaggacuagucccuguucccagagcccacuuuuuuuucuuuuuuugaaauaaaauagccugucuuucagaucuaaaaaaaaaaaaaaaaaaaaaaaaaaaaaaaaaaaaaaaaaaaaaaaaaaaaaaaaaaaaaaaaugcaucccccccccccccccccccccccccccccccaaaggcucuuuucagagccaccagaauu

SEQ ID NO: 18135 - RNA, 1843 nt, Artificial Sequence
  mRNA product Design d-1 comprising derived and/or modified sequence from HRSV(Memphis-37)__AIY60640.1__F-del_DSCav1_mut6 (opt11)
gggagacccgugacccggaaguuguacggcuacgcgacuuucccucccacaaacccucgcgcccuuccuuuccuacuugggcccggcagaaagcuuaccauggaauuaccaauccucaaaacuaacgccaucaccaccauccucgcugccgucacccucugcuucgccuccagccaaaacaucacagaagaguucuaccaaagcacaugcuccgcugucuccaaaggcuaccuuggcgcccuccgcaccggcugguacaccucaguaauuaccauugaacuaagcaacaucaaagaaaauaaaugcaacggcaccgacgccaaaguuaaacucauaaaacaggaacucgacaaauacaaaaacgccguaacagaccuccaaaugcucaugugcuccacccccgccgccggcucaggcuccgccaucgcaagcggaauagcaguuugcaaaguccuccaccuagaaggcgaggucaacaagauuaaaaacgcacuucucucaaccaacaaggccgucguaucacucucaaacggcgucuccguccucaccuucaaaguucuggaccucaaaaacuacaucgauaaacaacuacucccaauacuuaacaaacaaucaugcuccaucccaaaccccgaaaccgucauggaguuccaacagaaaaacaaccgccuacuggaaaucacacgcgaguucagcguaaacgcuggcgucacuacacccgucuccaccuacaugcucaccaauucugaacuccuaucacucauaaacgacaugcccauuaccaacgaccaaaagaaacuaaugucaaacaacguccaaaucguaagacaacaaucguauuccaucaugugcauaauuaaagaagaaguucucgccuacgugguccaacuaccccucuacggagucauagacacuccuuguuggaaacuccacaccucuccccucugcacuaccaacacaaaagaaggcuccaacaucugccucacccgaaccgacagaggcugguacugcgacaacgccggcuccgucuccuucuucccccaagccgaaaccugcaaagucugcuccaaccgcguuuucugcgacaccaugaacucccucacacuccccuccgaagucaaccuauguaacauagacauauucaacccaaaauacgacugcaaaaucaugacauccaaaaccgacgugucuuccucggucaucaccucccucggcgccaucgucucaugcuacggcaaaacuaaaugcaccgcauccaacaaaaacaaaggcauaaucaaaacauucuccaacggcugcgacuacguuucuaacaaaggcgucgauaccgucuccgucggaaacacccucuacuacguaaacaagcaagaaggccagucccuauacguaaaaggagaaccaauuaucaacuucuacgacccccuagucuuccccuccgacgaguucgacgccuccauaucccaagucaacgagaaaaucaaccaaucccuagccuucauccgcaaaucagacgaacuccuccacaacgucaacgucggaaaauccacaacuaacaucaugaucaccaccaucauuaucgucaucauaguuauacuccuccuccucauagccgucggccucuuccuauacugcaaagcucgcuaaggacuagucccuguucccagagcccacuuuuuuuucuuuuuuugaaauaaaauagccugucuuucagaucuaaaaaaaaaaaaaaaaaaaaaaaaaaaaaaaaaaaaaaaaaaaaaaaaaaaaaaaaaaaaaaaaugcaucccccccccccccccccccccccccccccccaaaggcucuuuucagagccaccagaauu

SEQ ID NO: 18136 - RNA, 1898 nt, Artificial Sequence
  mRNA product Design d-2 comprising derived and/or modified sequence from HRSV(Memphis-37)__AIY60640.1__F-del_DSCav1_mut6 (opt1)
gggagagcggcucggccauuuugucccagucaguccggaggcugcggcugcagaaguaccgccugcggaguaacugcaaagaagcuuaccauggagcugcccauccucaagaccaacgccaucaccacgauccuggccgcggugacccugugcuucgccagcucccagaacaucaccgaggaguucuaccagagcacgugcuccgccgucagcaagggcuaccucggcgcccugcgcaccgggugguacaccagcgugaucaccaucgagcuguccaacaucaaggagaacaagugcaacggcaccgacgccaaggugaagcucaucaagcaggagcuggacaaguacaagaacgcggucacggaccugcagaugcugaugugcagcaccccggccgccggcuccgggagcgcgaucgccuccggcaucgccgucugcaaggugcugcaccucgagggcgaggugaacaagaucaagaacgcccugcuguccaccaacaaggccgucgugagccucuccaacggggugagcguccugaccuucaaggugcuggaccucaagaacuacaucgacaagcagcugcugcccauccugaacaagcagagcugcuccauccccaaccccgagaccgucauggaguuccagcagaagaacaaccgccuccuggagaucacgcgggaguucagcgugaacgcgggcgugaccacccccgucuccaccuacaugcugacgaacagcgagcuccugucccugaucaacgacaugccgaucaccaacgaccagaagaagcucaugagcaacaacgugcagaucgugcgccagcaguccuacagcaucaugugcaucaucaaggaggagguccuggccuacguggugcagcugccccucuacggggucaucgacacccccugcuggaagcugcacaccagcccccugugcacgaccaacaccaaggagggcuccaacaucugccucacccggacggaccgcgggugguacugcgacaacgccggcagcguguccuucuucccgcaggccgagaccugcaaggucugcagcaaccggguguucugcgacaccaugaacucccugacccugcccagcgaggugaaccucugcaacaucgacaucuucaaccccaaguacgacugcaagaucaugacguccaagaccgacgucagcuccagcgugaucaccucccugggcgccaucgugagcugcuacgggaagaccaagugcacggcgagcaacaagaacaagggcaucaucaagaccuucuccaacgggugcgacuacgucagcaacaagggcguggacaccguguccgucggcaacacccuguacuacgugaacaagcaggagggccagagccucuacgugaagggggagcccaucaucaacuucuacgacccgcuggucuuccccuccgacgaguucgacgccagcaucucccaggugaacgagaagaucaaccagagccuggccuucauccggaaguccgacgagcuccugcacaacgugaacgucggcaagagcaccacgaacaucaugaucaccaccaucaucaucgugaucaucgugauccugcugcuccugaucgccgucgggcuguuccucuacugcaaggcccgcugaggacuaguaauaaggaaacuguaugaaugucugugggcaggaagugaagagauccuucuguaaagguuuuuggaauuaugucugcugaauaauaaacuuuuuugaaauaauaaaucugguagaaaaaugagaucuaaaaaaaaaaaaaaaaaaaaaaaaaaaaaaaaaaaaaaaaaaaaaaaaaaaaaaaaaaaaaaaaugcaucccccccccccccccccccccccccccccccaaaggcucuuuucagagccaccagaauu

SEQ ID NO: 18137 - RNA, 1898 nt, Artificial Sequence
  mRNA product Design d-2 comprising derived and/or modified sequence from HRSV(Memphis-37)__AIY60640.1__F-del_DSCav1_mut6 (opt1)
gggagagcggcucggccauuuugucccagucaguccggaggcugcggcugcagaaguaccgccugcggaguaacugcaaagaagcuuaccauggagcugcccauccucaagaccaacgccaucaccacgauccuggccgcggugacccugugcuucgccagcucccagaacaucaccgaggaguucuaccagagcacgugcuccgccgucagcaagggcuaccucggggcccugcgcaccggcugguacaccuccgugaucaccaucgagcugagcaacaucaaggagaacaagugcaacgggaccgacgccaaggugaagcucaucaagcaggagcuggacaaguacaagaacgcggucacggaccugcagaugcucaugugcuccaccccggccgccggcagcggguccgccaucgcgagcggcaucgccgugugcaaggugcugcaccuggagggcgaggucaacaagaucaagaacgcccuccuguccaccaacaaggccguggugagccuguccaacggggucagcgugcucaccuucaaggugcuggaccugaagaacuacaucgacaagcagcuccugcccauccugaacaagcaguccugcagcauccccaaccccgagacggucauggaguuccagcagaagaacaaccggcuccuggagaucacccgcgaguucuccgugaacgccggcgugaccaccccggucagcacguacaugcugaccaacuccgagcuccugagccugaucaacgacaugcccaucaccaacgaccagaagaagcucaugagcaacaacgugcagaucgugcggcagcaguccuacagcaucaugugcaucaucaaggaggagguccuggcguacguggugcagcugccccucuacggggucaucgacacccccugcuggaagcugcacacguccccgcugugcaccaccaacaccaaggagggcagcaacaucugccucacgcgcaccgaccgggggugguacugcgacaacgccggcuccgugagcuucuucccccaggccgagaccugcaaggugugcuccaaccgcgucuucugcgacaccaugaacagccugacgcugcccuccgaggugaaccucugcaacaucgacaucuucaaccccaaguacgacugcaagaucaugaccagcaagaccgacgucuccagcuccgugaucaccagccugggcgccaucguguccugcuacgggaagacgaagugcaccgccagcaacaagaacaagggcaucaucaagaccuucuccaacgggugcgacuacgucagcaacaagggcguggacaccguguccgucggcaacacgcuguacuacgugaacaagcaggaggggcagagccucuacgugaagggcgagccgaucaucaacuucuacgacccccuggucuuccccagcgacgaguucgacgcguccaucagccaggugaacgagaagaucaaccagucccuggccuucauccgcaagagcgacgagcuccugcacaacgugaacgucgggaaguccaccaccaacaucaugaucaccaccaucaucaucgugaucaucgugauccugcuccugcugaucgccgucggccucuuccuguacugcaaggcccggugaggacuaguaauaaggaaacuguaugaaugucugugggcaggaagugaagagauccuucuguaaagguuuuuggaauuaugucugcugaauaauaaacuuuuuugaaauaauaaaucugguagaaaaaugagaucuaaaaaaaaaaaaaaaaaaaaaaaaaaaaaaaaaaaaaaaaaaaaaaaaaaaaaaaaaaaaaaaaugcaucccccccccccccccccccccccccccccccaaaggcucuuuucagagccaccagaauu

SEQ ID NO: 18138 - RNA, 1898 nt, Artificial Sequence
  mRNA product Design d-2 comprising derived and/or modified sequence from HRSV(Memphis-37)__AIY60640.1__F-del_DSCav1_mut6 (opt2)
gggagagcggcucggccauuuugucccagucaguccggaggcugcggcugcagaaguaccgccugcggaguaacugcaaagaagcuuaccauggagcuccccauccucaagaccaacgccaucaccaccauccucgccgccgucacccucugcuucgccuccucccagaacaucaccgaggaguucuaccaguccaccugcuccgccgucuccaagggcuaccucggcgcccuccgcaccggcugguacaccuccgucaucaccaucgagcucuccaacaucaaggagaacaagugcaacggcaccgacgccaaggucaagcucaucaagcaggagcucgacaaguacaagaacgccgucaccgaccuccagaugcucaugugcuccacccccgccgccggcuccggcuccgccaucgccuccggcaucgccgucugcaagguccuccaccucgagggcgaggucaacaagaucaagaacgcccuccucuccaccaacaaggccgucgucucccucuccaacggcgucuccguccucaccuucaagguccucgaccucaagaacuacaucgacaagcagcuccuccccauccucaacaagcaguccugcuccauccccaaccccgagaccgucauggaguuccagcagaagaacaaccgccuccucgagaucacccgcgaguucuccgucaacgccggcgucaccacccccgucuccaccuacaugcucaccaacuccgagcuccucucccucaucaacgacaugcccaucaccaacgaccagaagaagcucauguccaacaacguccagaucguccgccagcaguccuacuccaucaugugcaucaucaaggaggagguccucgccuacgucguccagcucccccucuacggcgucaucgacacccccugcuggaagcuccacaccuccccccucugcaccaccaacaccaaggagggcuccaacaucugccucacccgcaccgaccgcggcugguacugcgacaacgccggcuccgucuccuucuucccccaggccgagaccugcaaggucugcuccaaccgcgucuucugcgacaccaugaacucccucacccuccccuccgaggucaaccucugcaacaucgacaucuucaaccccaaguacgacugcaagaucaugaccuccaagaccgacgucuccuccuccgucaucaccucccucggcgccaucgucuccugcuacggcaagaccaagugcaccgccuccaacaagaacaagggcaucaucaagaccuucuccaacggcugcgacuacgucuccaacaagggcgucgacaccgucuccgucggcaacacccucuacuacgucaacaagcaggagggccagucccucuacgucaagggcgagcccaucaucaacuucuacgacccccucgucuuccccuccgacgaguucgacgccuccaucucccaggucaacgagaagaucaaccagucccucgccuucauccgcaaguccgacgagcuccuccacaacgucaacgucggcaaguccaccaccaacaucaugaucaccaccaucaucaucgucaucaucgucauccuccuccuccucaucgccgucggccucuuccucuacugcaaggcccgcugaggacuaguaauaaggaaacuguaugaaugucugugggcaggaagugaagagauccuucuguaaagguuuuuggaauuaugucugcugaauaauaaacuuuuuugaaauaauaaaucugguagaaaaaugagaucuaaaaaaaaaaaaaaaaaaaaaaaaaaaaaaaaaaaaaaaaaaaaaaaaaaaaaaaaaaaaaaaaugcaucccccccccccccccccccccccccccccccaaaggcucuuuucagagccaccagaauu

SEQ ID NO: 18139 - RNA, 1898 nt, Artificial Sequence
  mRNA product Design d-2 comprising derived and/or modified sequence from HRSV(Memphis-37)__AIY60640.1__F-del_DSCav1_mut6 (opt3)
gggagagcggcucggccauuuugucccagucaguccggaggcugcggcugcagaaguaccgccugcggaguaacugcaaagaagcuuaccauggagcugcccauccucaagaccaacgccauuacaacuauacuugcugcagugacgcugugcuucgccagcucccagaauaucaccgaagaguuuuaccaaucuacauguucagcggucaguaaaggcuauuugggggcuuuaagaacuggaugguacaccagcguuauuacaaucgaacuguccaacauuaaggagaauaaaugcaacgguaccgacgccaaggugaaacuaaucaagcaggaacucgauaaguauaaaaaugcaguaacugaccugcagaugcuuauguguucuacuccugccgcuggcucggggucagcaauagccagcggaaucgcugugugcaagguccugcacuuggagggcgaggugaacaaaauuaagaaugcccuccugaguaccaacaaagcgguugugucccugucuaauggugucagcgugcucacguucaagguauuagaucugaagaacuacaucgacaaacagcuuuugccaauucugaauaagcaauccuguucaaucccgaaccccgaaacuguuauggaguuucagcagaaaaauaacaggcuacucgaaauaacccgggaguucagugugaaugcaggggucacaacuccugugagcaccuauaugcugacaaacucugagcuucuguccuugauuaacgauaugccaaucaccaaugaccagaagaaacucaugucaaacaaugugcaaauuguccgccagcagagcuacaguaucaugugcaucauuaaggaagagguucuggccuaugugguacaguuaccccuguacggagugauagauacgccuuguuggaaacuccauacuucuccacuuugcacaaccaacacuaaggaaggcuccaauaucugucugacacgaaccgaccguggcugguacugcgauaacgcugggagcgucucguuuuucccccaagccgagacguguaaggugugcucuaauagaguuuucugcgacaccaugaacuccuugacacuaccuucagaagugaaucuguguaacauugauaucuucaauccaaaauaugacugcaagauaaugacaaguaaaaccgaugucagcuccucugugauuacaagccucggagcaaucguaucauguuacgguaagacuaaaugcaccgcuaguaacaagaauaagggcaucauuaaaacauuuuccaacgggugugacuauguuagcaauaagggaguggacaccgucucugugggcaacacucuguacuaugucaacaaacaggagggucagucacuuuacgugaagggggagccgaucauuaauuucuaugauccccugguuuuuccuagugacgaauuugaugccagcauaucccaagugaacgagaaaaucaaucagucuuuggcguuuauuaggaagucggacgaacuccugcacaacguaaaugucggaaagagcacgacaaacaucaugaucaccacuauuauaaucgugauuaucguuauuuuacugcuacucaucgccgugggccuguuccuuuacugcaaagcacggugaggacuaguaauaaggaaacuguaugaaugucugugggcaggaagugaagagauccuucuguaaagguuuuuggaauuaugucugcugaauaauaaacuuuuuugaaauaauaaaucugguagaaaaaugagaucuaaaaaaaaaaaaaaaaaaaaaaaaaaaaaaaaaaaaaaaaaaaaaaaaaaaaaaaaaaaaaaaaugcaucccccccccccccccccccccccccccccccaaaggcucuuuucagagccaccagaauu

SEQ ID NO: 18140 - RNA, 1898 nt, Artificial Sequence
  mRNA product Design d-2 comprising derived and/or modified sequence from HRSV(Memphis-37)__AIY60640.1__F-del_DSCav1_mut6 (opt4)
gggagagcggcucggccauuuugucccagucaguccggaggcugcggcugcagaaguaccgccugcggaguaacugcaaagaagcuuaccauggagcugcccauccugaagaccaacgccaucaccaccauccuggccgccgugacccugugcuucgccagcagccagaacaucaccgaggaguucuaccagagcaccugcagcgccgugagcaagggcuaccugggcgcccugagaaccggcugguacaccagcgugaucaccaucgagcugagcaacaucaaggagaacaagugcaacggcaccgacgccaaggugaagcugaucaagcaggagcuggacaaguacaagaacgccgugaccgaccugcagaugcugaugugcagcacccccgccgccggcagcggcagcgccaucgccagcggcaucgccgugugcaaggugcugcaccuggagggcgaggugaacaagaucaagaacgcccugcugagcaccaacaaggccguggugagccugagcaacggcgugagcgugcugaccuucaaggugcuggaccugaagaacuacaucgacaagcagcugcugcccauccugaacaagcagagcugcagcauccccaaccccgagaccgugauggaguuccagcagaagaacaacagacugcuggagaucaccagagaguucagcgugaacgccggcgugaccacccccgugagcaccuacaugcugaccaacagcgagcugcugagccugaucaacgacaugcccaucaccaacgaccagaagaagcugaugagcaacaacgugcagaucgugagacagcagagcuacagcaucaugugcaucaucaaggaggaggugcuggccuacguggugcagcugccccuguacggcgugaucgacacccccugcuggaagcugcacaccagcccccugugcaccaccaacaccaaggagggcagcaacaucugccugaccagaaccgacagaggcugguacugcgacaacgccggcagcgugagcuucuucccccaggccgagaccugcaaggugugcagcaacagaguguucugcgacaccaugaacagccugacccugcccagcgaggugaaccugugcaacaucgacaucuucaaccccaaguacgacugcaagaucaugaccagcaagaccgacgugagcagcagcgugaucaccagccugggcgccaucgugagcugcuacggcaagaccaagugcaccgccagcaacaagaacaagggcaucaucaagaccuucagcaacggcugcgacuacgugagcaacaagggcguggacaccgugagcgugggcaacacccuguacuacgugaacaagcaggagggccagagccuguacgugaagggcgagcccaucaucaacuucuacgacccccugguguuccccagcgacgaguucgacgccagcaucagccaggugaacgagaagaucaaccagagccuggccuucaucagaaagagcgacgagcugcugcacaacgugaacgugggcaagagcaccaccaacaucaugaucaccaccaucaucaucgugaucaucgugauccugcugcugcugaucgccgugggccuguuccuguacugcaaggccagaugaggacuaguaauaaggaaacuguaugaaugucugugggcaggaagugaagagauccuucuguaaagguuuuuggaauuaugucugcugaauaauaaacuuuuuugaaauaauaaaucugguagaaaaaugagaucuaaaaaaaaaaaaaaaaaaaaaaaaaaaaaaaaaaaaaaaaaaaaaaaaaaaaaaaaaaaaaaaaugcaucccccccccccccccccccccccccccccccaaaggcucuuuucagagccaccagaauu

SEQ ID NO: 18141 - RNA, 1898 nt, Artificial Sequence
  mRNA product Design d-2 comprising derived and/or modified sequence from HRSV(Memphis-37)__AIY60640.1__F-del_DSCav1_mut6 (opt5)
gggagagcggcucggccauuuugucccagucaguccggaggcugcggcugcagaaguaccgccugcggaguaacugcaaagaagcuuaccauggagcugcccauccucaagaccaacgccauuacaacgauccuggcugccgugacccuuugcuucgcgagcucccagaauauuacagaagaguuuuaccaaucuaccuguagcgcugucuccaaaggcuaucugggggcccucagaacaggaugguacaccucuguuaucacaauugaacugagcaacaucaaggagaauaaaugcaacggcaccgacgccaaggugaaacuuaucaagcaggaacuggauaaguauaaaaaugcugugacggaccuccagaugcugauguguuccaccccugccgcugggucuggaagcgccauugcguccggcaucgccgucugcaaggugcugcaccucgagggggagguuaacaaaauuaagaaugcucugcuuagcacaaacaaagccguggucucucuguccaauggagugagcguucucaccuucaaggugcuggaucuuaagaacuacaucgacaaacagcugcucccgauucugaauaagcaaucuuguuccauccccaacccugaaacagucauggaguuucagcagaaaaauaaccggcugcucgaaauuacccgcgaguucagcgugaaugcuggcgugacgacacccgucucuaccuauaugcugacaaacuccgagcuucugagccucaucaacgauaugccuaucaccaaugaccagaagaaacugauguccaacaauguucaaauugugagacagcagucuuacagcaucaugugcauuaucaaggaagaggugcuugccuaugucgugcagcugccccucuacggcguuauugauaccccuuguuggaaacugcauacauccccgcugugcacgaccaacacaaaggaagggagcaauaucugucucacccggacagaccgcggaugguacugcgauaacgcgggcucuguguccuuuuucccccaagccgagaccuguaaggucugcagcaauagaguguuuugcgacacgaugaacucucugacacuuccuagcgaaguuaaucuguguaacaucgauauuuucaaucccaaauaugacugcaagaucaugaccuccaaaaccgaugugucuagcuccgucauuacaagccucggggcuaucgugucuuguuacggaaagaccaaaugcacagccuccaacaagaauaagggcauuaucaaaacguuuagcaacgggugugacuaugucucuaauaagggaguggacaccguuuccgugggcaacacacuguacuaugucaacaaacaggagggccagagccuuuacgugaagggggagccuaucauuaauuucuaugauccccugguuuuuccguccgacgaauuugaugcuucuaucagccaagugaacgagaaaauuaaucagucccucgccuucauccggaagucugacgaacugcugcacaacgucaaugugggaaagagcaccacaaacauuaugaucaccacgauuaucaucgugauuaucguuauucuccugcuucugaucgccgucggccucuuccuguacugcaaagcucgcugaggacuaguaauaaggaaacuguaugaaugucugugggcaggaagugaagagauccuucuguaaagguuuuuggaauuaugucugcugaauaauaaacuuuuuugaaauaauaaaucugguagaaaaaugagaucuaaaaaaaaaaaaaaaaaaaaaaaaaaaaaaaaaaaaaaaaaaaaaaaaaaaaaaaaaaaaaaaaugcaucccccccccccccccccccccccccccccccaaaggcucuuuucagagccaccagaauu

SEQ ID NO: 18142 - RNA, 1898 nt, Artificial Sequence
  mRNA product Design d-2 comprising derived and/or modified sequence from HRSV(Memphis-37)__AIY60640.1__F-del_DSCav1_mut6 (opt6)
gggagagcggcucggccauuuugucccagucaguccggaggcugcggcugcagaaguaccgccugcggaguaacugcaaagaagcuuaccauggaacuaccuauacuaaaaaccaacgccauaacaacaauacuagccgcaguuacacucugcuuugcauccucacaaaacaucacagaggaauuuuaccaaucuacuugcuccgcaguaucaaaaggauaccuaggagcacuccguacaggaugguacacaucagucauaacaauugaauuaucuaacaucaaagaaaacaaauguaaugguacagacgccaaaguaaaauuaauaaaacaagaacuagacaaauacaaaaacgccguaacagaccuacaaaugcuaaugugcucaacccccgccgcaggaucuggaucagcaauugccucaggcauagcaguaugcaaaguccuacaccuagaaggagaagucaacaaaauaaaaaacgcucuccucucaaccaauaaagcaguaguaucccucucaaacggaguaucaguacuaacauucaaaguacuagaccucaaaaauuauauagacaagcaacuacucccaauauuaaauaaacaauccugcucaauacccaauccagaaacagucauggaauuucaacaaaaaaacaaccgacucuuagaaauaacaagagaauuuucagucaaugccggcgucacaaccccaguaucaacauacaugcuaacaaacucagaacuacuaucacuaaucaacgauaugcccauaaccaacgaccaaaaaaaacuaaugucaaacaauguacaaauuguaagacaacagucuuauucaauaaugugcauaauaaaagaagaagucuuagcauauguaguacaacuaccacuauacggaguaauagacacaccauguuggaaauuacacacauccccacuauguaccaccaacacaaaagaaggaucuaacauaugccuaaccagaacagaccgaggcugguauugcgacaaugcaggaucaguauccuucuuuccacaagcagaaacaugcaaagucugcucuaacagaguauucugcgauacuaugaacucacuuaccuuaccaucagaaguaaaucuauguaauaucgacauauucaaucccaaauaugauugcaaaauaaugaccucaaaaacagauguaucaucaucagucauaacaucacuaggagcaauagucagcugcuaugggaaaacaaaaugcacagcuuccaacaaaaacaaaggaaucauaaaaacauucucaaaugguugugacuacguauccaacaaaggaguagauacaguaucuguaggcaacacauuauacuauguaaauaaacaagaaggacaaagccuauacgucaaaggagaacccaucauaaauuucuaugacccauuaguuuucccaucugacgaauuugacgcuuccaucucccaaguaaaugaaaaaaucaaccaaagccucgcauucauucgcaaaucugacgaauuacuccacaacguaaacguaggaaaauccacaacaaacauuaugaucaccaccauaauaaucguaauaauagucauauuacuacuccucauagcaguaggacuauuccuauacuguaaagcuagauaaggacuaguaauaaggaaacuguaugaaugucugugggcaggaagugaagagauccuucuguaaagguuuuuggaauuaugucugcugaauaauaaacuuuuuugaaauaauaaaucugguagaaaaaugagaucuaaaaaaaaaaaaaaaaaaaaaaaaaaaaaaaaaaaaaaaaaaaaaaaaaaaaaaaaaaaaaaaaugcaucccccccccccccccccccccccccccccccaaaggcucuuuucagagccaccagaauu

SEQ ID NO: 18143 - RNA, 1898 nt, Artificial Sequence
  mRNA product Design d-2 comprising derived and/or modified sequence from HRSV(Memphis-37)__AIY60640.1__F-del_DSCav1_mut6 (opt11)
gggagagcggcucggccauuuugucccagucaguccggaggcugcggcugcagaaguaccgccugcggaguaacugcaaagaagcuuaccauggaauuaccaauccucaaaacuaacgccaucaccaccauccucgcugccgucacccucugcuucgccuccagccaaaacaucacagaagaguucuaccaaagcacaugcuccgcugucuccaaaggcuaccuuggcgcccuccgcaccggcugguacaccucaguaauuaccauugaacuaagcaacaucaaagaaaauaaaugcaacggcaccgacgccaaaguuaaacucauaaaacaggaacucgacaaauacaaaaacgccguaacagaccuccaaaugcucaugugcuccacccccgccgccggcucaggcuccgccaucgcaagcggaauagcaguuugcaaaguccuccaccuagaaggcgaggucaacaagauuaaaaacgcacuucucucaaccaacaaggccgucguaucacucucaaacggcgucuccguccucaccuucaaaguucuggaccucaaaaacuacaucgauaaacaacuacucccaauacuuaacaaacaaucaugcuccaucccaaaccccgaaaccgucauggaguuccaacagaaaaacaaccgccuacuggaaaucacacgcgaguucagcguaaacgcuggcgucacuacacccgucuccaccuacaugcucaccaauucugaacuccuaucacucauaaacgacaugcccauuaccaacgaccaaaagaaacuaaugucaaacaacguccaaaucguaagacaacaaucguauuccaucaugugcauaauuaaagaagaaguucucgccuacgugguccaacuaccccucuacggagucauagacacuccuuguuggaaacuccacaccucuccccucugcacuaccaacacaaaagaaggcuccaacaucugccucacccgaaccgacagaggcugguacugcgacaacgccggcuccgucuccuucuucccccaagccgaaaccugcaaagucugcuccaaccgcguuuucugcgacaccaugaacucccucacacuccccuccgaagucaaccuauguaacauagacauauucaacccaaaauacgacugcaaaaucaugacauccaaaaccgacgugucuuccucggucaucaccucccucggcgccaucgucucaugcuacggcaaaacuaaaugcaccgcauccaacaaaaacaaaggcauaaucaaaacauucuccaacggcugcgacuacguuucuaacaaaggcgucgauaccgucuccgucggaaacacccucuacuacguaaacaagcaagaaggccagucccuauacguaaaaggagaaccaauuaucaacuucuacgacccccuagucuuccccuccgacgaguucgacgccuccauaucccaagucaacgagaaaaucaaccaaucccuagccuucauccgcaaaucagacgaacuccuccacaacgucaacgucggaaaauccacaacuaacaucaugaucaccaccaucauuaucgucaucauaguuauacuccuccuccucauagccgucggccucuuccuauacugcaaagcucgcuaaggacuaguaauaaggaaacuguaugaaugucugugggcaggaagugaagagauccuucuguaaagguuuuuggaauuaugucugcugaauaauaaacuuuuuugaaauaauaaaucugguagaaaaaugagaucuaaaaaaaaaaaaaaaaaaaaaaaaaaaaaaaaaaaaaaaaaaaaaaaaaaaaaaaaaaaaaaaaugcaucccccccccccccccccccccccccccccccaaaggcucuuuucagagccaccagaauu

SEQ ID NO: 18144 - RNA, 2214 nt, Artificial Sequence
  mRNA product Design d-3 comprising derived and/or modified sequence from HRSV(Memphis-37)__AIY60640.1__F-del_DSCav1_mut6 (opt1)
gggagagggcgcuuggcuugcaaggacccugagcugcggcauugaagcacacccaacccaacucgacugaagucagccucacugaaccggaucugagaaucuucucucucugggcuugccagggcucuccgaaccuagcuagcauccucuucaauuccaacuagaaagcuuaccauggagcugcccauccucaagaccaacgccaucaccacgauccuggccgcggugacccugugcuucgccagcucccagaacaucaccgaggaguucuaccagagcacgugcuccgccgucagcaagggcuaccucggcgcccugcgcaccgggugguacaccagcgugaucaccaucgagcuguccaacaucaaggagaacaagugcaacggcaccgacgccaaggugaagcucaucaagcaggagcuggacaaguacaagaacgcggucacggaccugcagaugcugaugugcagcaccccggccgccggcuccgggagcgcgaucgccuccggcaucgccgucugcaaggugcugcaccucgagggcgaggugaacaagaucaagaacgcccugcuguccaccaacaaggccgucgugagccucuccaacggggugagcguccugaccuucaaggugcuggaccucaagaacuacaucgacaagcagcugcugcccauccugaacaagcagagcugcuccauccccaaccccgagaccgucauggaguuccagcagaagaacaaccgccuccuggagaucacgcgggaguucagcgugaacgcgggcgugaccacccccgucuccaccuacaugcugacgaacagcgagcuccugucccugaucaacgacaugccgaucaccaacgaccagaagaagcucaugagcaacaacgugcagaucgugcgccagcaguccuacagcaucaugugcaucaucaaggaggagguccuggccuacguggugcagcugccccucuacggggucaucgacacccccugcuggaagcugcacaccagcccccugugcacgaccaacaccaaggagggcuccaacaucugccucacccggacggaccgcgggugguacugcgacaacgccggcagcguguccuucuucccgcaggccgagaccugcaaggucugcagcaaccggguguucugcgacaccaugaacucccugacccugcccagcgaggugaaccucugcaacaucgacaucuucaaccccaaguacgacugcaagaucaugacguccaagaccgacgucagcuccagcgugaucaccucccugggcgccaucgugagcugcuacgggaagaccaagugcacggcgagcaacaagaacaagggcaucaucaagaccuucuccaacgggugcgacuacgucagcaacaagggcguggacaccguguccgucggcaacacccuguacuacgugaacaagcaggagggccagagccucuacgugaagggggagcccaucaucaacuucuacgacccgcuggucuuccccuccgacgaguucgacgccagcaucucccaggugaacgagaagaucaaccagagccuggccuucauccggaaguccgacgagcuccugcacaacgugaacgucggcaagagcaccacgaacaucaugaucaccaccaucaucaucgugaucaucgugauccugcugcuccugaucgccgucgggcuguuccucuacugcaaggcccgcugaggacuagugaagggaacacccaaauuuaauucagccuuaagcacaauuaauuaagagugaaacguaauuguacaagcaguuggucacccaccauagggcaugaucaacaccgcaaccuuuccuuuuucccccagugauucugaaaaaccccucuucccuucagcuugcuuagauguuccaaauuuaguaagcuuaaggcggccuacagaagaaaaagaaaaaaaaggccacaaaaguucccucucacuuucaguaaauaaaauaaaagcagcaacagaaauaaagaaauaaaugaaauucaaaaugaaauaaauauuguguugugcagcauuaaaaaaucaauaaaaauuaaaaaugagcaagaucuaaaaaaaaaaaaaaaaaaaaaaaaaaaaaaaaaaaaaaaaaaaaaaaaaaaaaaaaaaaaaaaaugcaucccccccccccccccccccccccccccccccaaaggcucuuuucagagccaccagaauu

SEQ ID NO: 18145 - RNA, 2214 nt, Artificial Sequence
  mRNA product Design d-3 comprising derived and/or modified sequence from HRSV(Memphis-37)__AIY60640.1__F-del_DSCav1_mut6 (opt1)
gggagagggcgcuuggcuugcaaggacccugagcugcggcauugaagcacacccaacccaacucgacugaagucagccucacugaaccggaucugagaaucuucucucucugggcuugccagggcucuccgaaccuagcuagcauccucuucaauuccaacuagaaagcuuaccauggagcugcccauccucaagaccaacgccaucaccacgauccuggccgcggugacccugugcuucgccagcucccagaacaucaccgaggaguucuaccagagcacgugcuccgccgucagcaagggcuaccucggggcccugcgcaccggcugguacaccuccgugaucaccaucgagcugagcaacaucaaggagaacaagugcaacgggaccgacgccaaggugaagcucaucaagcaggagcuggacaaguacaagaacgcggucacggaccugcagaugcucaugugcuccaccccggccgccggcagcggguccgccaucgcgagcggcaucgccgugugcaaggugcugcaccuggagggcgaggucaacaagaucaagaacgcccuccuguccaccaacaaggccguggugagccuguccaacggggucagcgugcucaccuucaaggugcuggaccugaagaacuacaucgacaagcagcuccugcccauccugaacaagcaguccugcagcauccccaaccccgagacggucauggaguuccagcagaagaacaaccggcuccuggagaucacccgcgaguucuccgugaacgccggcgugaccaccccggucagcacguacaugcugaccaacuccgagcuccugagccugaucaacgacaugcccaucaccaacgaccagaagaagcucaugagcaacaacgugcagaucgugcggcagcaguccuacagcaucaugugcaucaucaaggaggagguccuggcguacguggugcagcugccccucuacggggucaucgacacccccugcuggaagcugcacacguccccgcugugcaccaccaacaccaaggagggcagcaacaucugccucacgcgcaccgaccgggggugguacugcgacaacgccggcuccgugagcuucuucccccaggccgagaccugcaaggugugcuccaaccgcgucuucugcgacaccaugaacagccugacgcugcccuccgaggugaaccucugcaacaucgacaucuucaaccccaaguacgacugcaagaucaugaccagcaagaccgacgucuccagcuccgugaucaccagccugggcgccaucguguccugcuacgggaagacgaagugcaccgccagcaacaagaacaagggcaucaucaagaccuucuccaacgggugcgacuacgucagcaacaagggcguggacaccguguccgucggcaacacgcuguacuacgugaacaagcaggaggggcagagccucuacgugaagggcgagccgaucaucaacuucuacgacccccuggucuuccccagcgacgaguucgacgcguccaucagccaggugaacgagaagaucaaccagucccuggccuucauccgcaagagcgacgagcuccugcacaacgugaacgucgggaaguccaccaccaacaucaugaucaccaccaucaucaucgugaucaucgugauccugcuccugcugaucgccgucggccucuuccuguacugcaaggcccggugaggacuagugaagggaacacccaaauuuaauucagccuuaagcacaauuaauuaagagugaaacguaauuguacaagcaguuggucacccaccauagggcaugaucaacaccgcaaccuuuccuuuuucccccagugauucugaaaaaccccucuucccuucagcuugcuuagauguuccaaauuuaguaagcuuaaggcggccuacagaagaaaaagaaaaaaaaggccacaaaaguucccucucacuuucaguaaauaaaauaaaagcagcaacagaaauaaagaaauaaaugaaauucaaaaugaaauaaauauuguguugugcagcauuaaaaaaucaauaaaaauuaaaaaugagcaagaucuaaaaaaaaaaaaaaaaaaaaaaaaaaaaaaaaaaaaaaaaaaaaaaaaaaaaaaaaaaaaaaaaugcaucccccccccccccccccccccccccccccccaaaggcucuuuucagagccaccagaauu

SEQ ID NO: 18146 - RNA, 2214 nt, Artificial Sequence
  mRNA product Design d-3 comprising derived and/or modified sequence from HRSV(Memphis-37)__AIY60640.1__F-del_DSCav1_mut6 (opt2)
gggagagggcgcuuggcuugcaaggacccugagcugcggcauugaagcacacccaacccaacucgacugaagucagccucacugaaccggaucugagaaucuucucucucugggcuugccagggcucuccgaaccuagcuagcauccucuucaauuccaacuagaaagcuuaccauggagcuccccauccucaagaccaacgccaucaccaccauccucgccgccgucacccucugcuucgccuccucccagaacaucaccgaggaguucuaccaguccaccugcuccgccgucuccaagggcuaccucggcgcccuccgcaccggcugguacaccuccgucaucaccaucgagcucuccaacaucaaggagaacaagugcaacggcaccgacgccaaggucaagcucaucaagcaggagcucgacaaguacaagaacgccgucaccgaccuccagaugcucaugugcuccacccccgccgccggcuccggcuccgccaucgccuccggcaucgccgucugcaagguccuccaccucgagggcgaggucaacaagaucaagaacgcccuccucuccaccaacaaggccgucgucucccucuccaacggcgucuccguccucaccuucaagguccucgaccucaagaacuacaucgacaagcagcuccuccccauccucaacaagcaguccugcuccauccccaaccccgagaccgucauggaguuccagcagaagaacaaccgccuccucgagaucacccgcgaguucuccgucaacgccggcgucaccacccccgucuccaccuacaugcucaccaacuccgagcuccucucccucaucaacgacaugcccaucaccaacgaccagaagaagcucauguccaacaacguccagaucguccgccagcaguccuacuccaucaugugcaucaucaaggaggagguccucgccuacgucguccagcucccccucuacggcgucaucgacacccccugcuggaagcuccacaccuccccccucugcaccaccaacaccaaggagggcuccaacaucugccucacccgcaccgaccgcggcugguacugcgacaacgccggcuccgucuccuucuucccccaggccgagaccugcaaggucugcuccaaccgcgucuucugcgacaccaugaacucccucacccuccccuccgaggucaaccucugcaacaucgacaucuucaaccccaaguacgacugcaagaucaugaccuccaagaccgacgucuccuccuccgucaucaccucccucggcgccaucgucuccugcuacggcaagaccaagugcaccgccuccaacaagaacaagggcaucaucaagaccuucuccaacggcugcgacuacgucuccaacaagggcgucgacaccgucuccgucggcaacacccucuacuacgucaacaagcaggagggccagucccucuacgucaagggcgagcccaucaucaacuucuacgacccccucgucuuccccuccgacgaguucgacgccuccaucucccaggucaacgagaagaucaaccagucccucgccuucauccgcaaguccgacgagcuccuccacaacgucaacgucggcaaguccaccaccaacaucaugaucaccaccaucaucaucgucaucaucgucauccuccuccuccucaucgccgucggccucuuccucuacugcaaggcccgcugaggacuagugaagggaacacccaaauuuaauucagccuuaagcacaauuaauuaagagugaaacguaauuguacaagcaguuggucacccaccauagggcaugaucaacaccgcaaccuuuccuuuuucccccagugauucugaaaaaccccucuucccuucagcuugcuuagauguuccaaauuuaguaagcuuaaggcggccuacagaagaaaaagaaaaaaaaggccacaaaaguucccucucacuuucaguaaauaaaauaaaagcagcaacagaaauaaagaaauaaaugaaauucaaaaugaaauaaauauuguguugugcagcauuaaaaaaucaauaaaaauuaaaaaugagcaagaucuaaaaaaaaaaaaaaaaaaaaaaaaaaaaaaaaaaaaaaaaaaaaaaaaaaaaaaaaaaaaaaaaugcaucccccccccccccccccccccccccccccccaaaggcucuuuucagagccaccagaauu

SEQ ID NO: 18147 - RNA, 2214 nt, Artificial Sequence
  mRNA product Design d-3 comprising derived and/or modified sequence from HRSV(Memphis-37)__AIY60640.1__F-del_DSCav1_mut6 (opt3)
gggagagggcgcuuggcuugcaaggacccugagcugcggcauugaagcacacccaacccaacucgacugaagucagccucacugaaccggaucugagaaucuucucucucugggcuugccagggcucuccgaaccuagcuagcauccucuucaauuccaacuagaaagcuuaccauggagcugcccauccucaagaccaacgccauuacaacuauacuugcugcagugacgcugugcuucgccagcucccagaauaucaccgaagaguuuuaccaaucuacauguucagcggucaguaaaggcuauuugggggcuuuaagaacuggaugguacaccagcguuauuacaaucgaacuguccaacauuaaggagaauaaaugcaacgguaccgacgccaaggugaaacuaaucaagcaggaacucgauaaguauaaaaaugcaguaacugaccugcagaugcuuauguguucuacuccugccgcuggcucggggucagcaauagccagcggaaucgcugugugcaagguccugcacuuggagggcgaggugaacaaaauuaagaaugcccuccugaguaccaacaaagcgguugugucccugucuaauggugucagcgugcucacguucaagguauuagaucugaagaacuacaucgacaaacagcuuuugccaauucugaauaagcaauccuguucaaucccgaaccccgaaacuguuauggaguuucagcagaaaaauaacaggcuacucgaaauaacccgggaguucagugugaaugcaggggucacaacuccugugagcaccuauaugcugacaaacucugagcuucuguccuugauuaacgauaugccaaucaccaaugaccagaagaaacucaugucaaacaaugugcaaauuguccgccagcagagcuacaguaucaugugcaucauuaaggaagagguucuggccuaugugguacaguuaccccuguacggagugauagauacgccuuguuggaaacuccauacuucuccacuuugcacaaccaacacuaaggaaggcuccaauaucugucugacacgaaccgaccguggcugguacugcgauaacgcugggagcgucucguuuuucccccaagccgagacguguaaggugugcucuaauagaguuuucugcgacaccaugaacuccuugacacuaccuucagaagugaaucuguguaacauugauaucuucaauccaaaauaugacugcaagauaaugacaaguaaaaccgaugucagcuccucugugauuacaagccucggagcaaucguaucauguuacgguaagacuaaaugcaccgcuaguaacaagaauaagggcaucauuaaaacauuuuccaacgggugugacuauguuagcaauaagggaguggacaccgucucugugggcaacacucuguacuaugucaacaaacaggagggucagucacuuuacgugaagggggagccgaucauuaauuucuaugauccccugguuuuuccuagugacgaauuugaugccagcauaucccaagugaacgagaaaaucaaucagucuuuggcguuuauuaggaagucggacgaacuccugcacaacguaaaugucggaaagagcacgacaaacaucaugaucaccacuauuauaaucgugauuaucguuauuuuacugcuacucaucgccgugggccuguuccuuuacugcaaagcacggugaggacuagugaagggaacacccaaauuuaauucagccuuaagcacaauuaauuaagagugaaacguaauuguacaagcaguuggucacccaccauagggcaugaucaacaccgcaaccuuuccuuuuucccccagugauucugaaaaaccccucuucccuucagcuugcuuagauguuccaaauuuaguaagcuuaaggcggccuacagaagaaaaagaaaaaaaaggccacaaaaguucccucucacuuucaguaaauaaaauaaaagcagcaacagaaauaaagaaauaaaugaaauucaaaaugaaauaaauauuguguugugcagcauuaaaaaaucaauaaaaauuaaaaaugagcaagaucuaaaaaaaaaaaaaaaaaaaaaaaaaaaaaaaaaaaaaaaaaaaaaaaaaaaaaaaaaaaaaaaaugcaucccccccccccccccccccccccccccccccaaaggcucuuuucagagccaccagaauu

SEQ ID NO: 18148 - RNA, 2214 nt, Artificial Sequence
  mRNA product Design d-3 comprising derived and/or modified sequence from HRSV(Memphis-37)__AIY60640.1__F-del_DSCav1_mut6 (opt4)
gggagagggcgcuuggcuugcaaggacccugagcugcggcauugaagcacacccaacccaacucgacugaagucagccucacugaaccggaucugagaaucuucucucucugggcuugccagggcucuccgaaccuagcuagcauccucuucaauuccaacuagaaagcuuaccauggagcugcccauccugaagaccaacgccaucaccaccauccuggccgccgugacccugugcuucgccagcagccagaacaucaccgaggaguucuaccagagcaccugcagcgccgugagcaagggcuaccugggcgcccugagaaccggcugguacaccagcgugaucaccaucgagcugagcaacaucaaggagaacaagugcaacggcaccgacgccaaggugaagcugaucaagcaggagcuggacaaguacaagaacgccgugaccgaccugcagaugcugaugugcagcacccccgccgccggcagcggcagcgccaucgccagcggcaucgccgugugcaaggugcugcaccuggagggcgaggugaacaagaucaagaacgcccugcugagcaccaacaaggccguggugagccugagcaacggcgugagcgugcugaccuucaaggugcuggaccugaagaacuacaucgacaagcagcugcugcccauccugaacaagcagagcugcagcauccccaaccccgagaccgugauggaguuccagcagaagaacaacagacugcuggagaucaccagagaguucagcgugaacgccggcgugaccacccccgugagcaccuacaugcugaccaacagcgagcugcugagccugaucaacgacaugcccaucaccaacgaccagaagaagcugaugagcaacaacgugcagaucgugagacagcagagcuacagcaucaugugcaucaucaaggaggaggugcuggccuacguggugcagcugccccuguacggcgugaucgacacccccugcuggaagcugcacaccagcccccugugcaccaccaacaccaaggagggcagcaacaucugccugaccagaaccgacagaggcugguacugcgacaacgccggcagcgugagcuucuucccccaggccgagaccugcaaggugugcagcaacagaguguucugcgacaccaugaacagccugacccugcccagcgaggugaaccugugcaacaucgacaucuucaaccccaaguacgacugcaagaucaugaccagcaagaccgacgugagcagcagcgugaucaccagccugggcgccaucgugagcugcuacggcaagaccaagugcaccgccagcaacaagaacaagggcaucaucaagaccuucagcaacggcugcgacuacgugagcaacaagggcguggacaccgugagcgugggcaacacccuguacuacgugaacaagcaggagggccagagccuguacgugaagggcgagcccaucaucaacuucuacgacccccugguguuccccagcgacgaguucgacgccagcaucagccaggugaacgagaagaucaaccagagccuggccuucaucagaaagagcgacgagcugcugcacaacgugaacgugggcaagagcaccaccaacaucaugaucaccaccaucaucaucgugaucaucgugauccugcugcugcugaucgccgugggccuguuccuguacugcaaggccagaugaggacuagugaagggaacacccaaauuuaauucagccuuaagcacaauuaauuaagagugaaacguaauuguacaagcaguuggucacccaccauagggcaugaucaacaccgcaaccuuuccuuuuucccccagugauucugaaaaaccccucuucccuucagcuugcuuagauguuccaaauuuaguaagcuuaaggcggccuacagaagaaaaagaaaaaaaaggccacaaaaguucccucucacuuucaguaaauaaaauaaaagcagcaacagaaauaaagaaauaaaugaaauucaaaaugaaauaaauauuguguugugcagcauuaaaaaaucaauaaaaauuaaaaaugagcaagaucuaaaaaaaaaaaaaaaaaaaaaaaaaaaaaaaaaaaaaaaaaaaaaaaaaaaaaaaaaaaaaaaaugcaucccccccccccccccccccccccccccccccaaaggcucuuuucagagccaccagaauu

SEQ ID NO: 18149 - RNA, 2214 nt, Artificial Sequence
  mRNA product Design d-3 comprising derived and/or modified sequence from HRSV(Memphis-37)__AIY60640.1__F-del_DSCav1_mut6 (opt5)
gggagagggcgcuuggcuugcaaggacccugagcugcggcauugaagcacacccaacccaacucgacugaagucagccucacugaaccggaucugagaaucuucucucucugggcuugccagggcucuccgaaccuagcuagcauccucuucaauuccaacuagaaagcuuaccauggagcugcccauccucaagaccaacgccauuacaacgauccuggcugccgugacccuuugcuucgcgagcucccagaauauuacagaagaguuuuaccaaucuaccuguagcgcugucuccaaaggcuaucugggggcccucagaacaggaugguacaccucuguuaucacaauugaacugagcaacaucaaggagaauaaaugcaacggcaccgacgccaaggugaaacuuaucaagcaggaacuggauaaguauaaaaaugcugugacggaccuccagaugcugauguguuccaccccugccgcugggucuggaagcgccauugcguccggcaucgccgucugcaaggugcugcaccucgagggggagguuaacaaaauuaagaaugcucugcuuagcacaaacaaagccguggucucucuguccaauggagugagcguucucaccuucaaggugcuggaucuuaagaacuacaucgacaaacagcugcucccgauucugaauaagcaaucuuguuccauccccaacccugaaacagucauggaguuucagcagaaaaauaaccggcugcucgaaauuacccgcgaguucagcgugaaugcuggcgugacgacacccgucucuaccuauaugcugacaaacuccgagcuucugagccucaucaacgauaugccuaucaccaaugaccagaagaaacugauguccaacaauguucaaauugugagacagcagucuuacagcaucaugugcauuaucaaggaagaggugcuugccuaugucgugcagcugccccucuacggcguuauugauaccccuuguuggaaacugcauacauccccgcugugcacgaccaacacaaaggaagggagcaauaucugucucacccggacagaccgcggaugguacugcgauaacgcgggcucuguguccuuuuucccccaagccgagaccuguaaggucugcagcaauagaguguuuugcgacacgaugaacucucugacacuuccuagcgaaguuaaucuguguaacaucgauauuuucaaucccaaauaugacugcaagaucaugaccuccaaaaccgaugugucuagcuccgucauuacaagccucggggcuaucgugucuuguuacggaaagaccaaaugcacagccuccaacaagaauaagggcauuaucaaaacguuuagcaacgggugugacuaugucucuaauaagggaguggacaccguuuccgugggcaacacacuguacuaugucaacaaacaggagggccagagccuuuacgugaagggggagccuaucauuaauuucuaugauccccugguuuuuccguccgacgaauuugaugcuucuaucagccaagugaacgagaaaauuaaucagucccucgccuucauccggaagucugacgaacugcugcacaacgucaaugugggaaagagcaccacaaacauuaugaucaccacgauuaucaucgugauuaucguuauucuccugcuucugaucgccgucggccucuuccuguacugcaaagcucgcugaggacuagugaagggaacacccaaauuuaauucagccuuaagcacaauuaauuaagagugaaacguaauuguacaagcaguuggucacccaccauagggcaugaucaacaccgcaaccuuuccuuuuucccccagugauucugaaaaaccccucuucccuucagcuugcuuagauguuccaaauuuaguaagcuuaaggcggccuacagaagaaaaagaaaaaaaaggccacaaaaguucccucucacuuucaguaaauaaaauaaaagcagcaacagaaauaaagaaauaaaugaaauucaaaaugaaauaaauauuguguugugcagcauuaaaaaaucaauaaaaauuaaaaaugagcaagaucuaaaaaaaaaaaaaaaaaaaaaaaaaaaaaaaaaaaaaaaaaaaaaaaaaaaaaaaaaaaaaaaaugcaucccccccccccccccccccccccccccccccaaaggcucuuuucagagccaccagaauu

SEQ ID NO: 18150 - RNA, 2214 nt, Artificial Sequence
  mRNA product Design d-3 comprising derived and/or modified sequence from HRSV(Memphis-37)__AIY60640.1__F-del_DSCav1_mut6 (opt6)
gggagagggcgcuuggcuugcaaggacccugagcugcggcauugaagcacacccaacccaacucgacugaagucagccucacugaaccggaucugagaaucuucucucucugggcuugccagggcucuccgaaccuagcuagcauccucuucaauuccaacuagaaagcuuaccauggaacuaccuauacuaaaaaccaacgccauaacaacaauacuagccgcaguuacacucugcuuugcauccucacaaaacaucacagaggaauuuuaccaaucuacuugcuccgcaguaucaaaaggauaccuaggagcacuccguacaggaugguacacaucagucauaacaauugaauuaucuaacaucaaagaaaacaaauguaaugguacagacgccaaaguaaaauuaauaaaacaagaacuagacaaauacaaaaacgccguaacagaccuacaaaugcuaaugugcucaacccccgccgcaggaucuggaucagcaauugccucaggcauagcaguaugcaaaguccuacaccuagaaggagaagucaacaaaauaaaaaacgcucuccucucaaccaauaaagcaguaguaucccucucaaacggaguaucaguacuaacauucaaaguacuagaccucaaaaauuauauagacaagcaacuacucccaauauuaaauaaacaauccugcucaauacccaauccagaaacagucauggaauuucaacaaaaaaacaaccgacucuuagaaauaacaagagaauuuucagucaaugccggcgucacaaccccaguaucaacauacaugcuaacaaacucagaacuacuaucacuaaucaacgauaugcccauaaccaacgaccaaaaaaaacuaaugucaaacaauguacaaauuguaagacaacagucuuauucaauaaugugcauaauaaaagaagaagucuuagcauauguaguacaacuaccacuauacggaguaauagacacaccauguuggaaauuacacacauccccacuauguaccaccaacacaaaagaaggaucuaacauaugccuaaccagaacagaccgaggcugguauugcgacaaugcaggaucaguauccuucuuuccacaagcagaaacaugcaaagucugcucuaacagaguauucugcgauacuaugaacucacuuaccuuaccaucagaaguaaaucuauguaauaucgacauauucaaucccaaauaugauugcaaaauaaugaccucaaaaacagauguaucaucaucagucauaacaucacuaggagcaauagucagcugcuaugggaaaacaaaaugcacagcuuccaacaaaaacaaaggaaucauaaaaacauucucaaaugguugugacuacguauccaacaaaggaguagauacaguaucuguaggcaacacauuauacuauguaaauaaacaagaaggacaaagccuauacgucaaaggagaacccaucauaaauuucuaugacccauuaguuuucccaucugacgaauuugacgcuuccaucucccaaguaaaugaaaaaaucaaccaaagccucgcauucauucgcaaaucugacgaauuacuccacaacguaaacguaggaaaauccacaacaaacauuaugaucaccaccauaauaaucguaauaauagucauauuacuacuccucauagcaguaggacuauuccuauacuguaaagcuagauaaggacuagugaagggaacacccaaauuuaauucagccuuaagcacaauuaauuaagagugaaacguaauuguacaagcaguuggucacccaccauagggcaugaucaacaccgcaaccuuuccuuuuucccccagugauucugaaaaaccccucuucccuucagcuugcuuagauguuccaaauuuaguaagcuuaaggcggccuacagaagaaaaagaaaaaaaaggccacaaaaguucccucucacuuucaguaaauaaaauaaaagcagcaacagaaauaaagaaauaaaugaaauucaaaaugaaauaaauauuguguugugcagcauuaaaaaaucaauaaaaauuaaaaaugagcaagaucuaaaaaaaaaaaaaaaaaaaaaaaaaaaaaaaaaaaaaaaaaaaaaaaaaaaaaaaaaaaaaaaaugcaucccccccccccccccccccccccccccccccaaaggcucuuuucagagccaccagaauu

SEQ ID NO: 18151 - RNA, 2214 nt, Artificial Sequence
  mRNA product Design d-3 comprising derived and/or modified sequence from HRSV(Memphis-37)__AIY60640.1__F-del_DSCav1_mut6 (opt11)
gggagagggcgcuuggcuugcaaggacccugagcugcggcauugaagcacacccaacccaacucgacugaagucagccucacugaaccggaucugagaaucuucucucucugggcuugccagggcucuccgaaccuagcuagcauccucuucaauuccaacuagaaagcuuaccauggaauuaccaauccucaaaacuaacgccaucaccaccauccucgcugccgucacccucugcuucgccuccagccaaaacaucacagaagaguucuaccaaagcacaugcuccgcugucuccaaaggcuaccuuggcgcccuccgcaccggcugguacaccucaguaauuaccauugaacuaagcaacaucaaagaaaauaaaugcaacggcaccgacgccaaaguuaaacucauaaaacaggaacucgacaaauacaaaaacgccguaacagaccuccaaaugcucaugugcuccacccccgccgccggcucaggcuccgccaucgcaagcggaauagcaguuugcaaaguccuccaccuagaaggcgaggucaacaagauuaaaaacgcacuucucucaaccaacaaggccgucguaucacucucaaacggcgucuccguccucaccuucaaaguucuggaccucaaaaacuacaucgauaaacaacuacucccaauacuuaacaaacaaucaugcuccaucccaaaccccgaaaccgucauggaguuccaacagaaaaacaaccgccuacuggaaaucacacgcgaguucagcguaaacgcuggcgucacuacacccgucuccaccuacaugcucaccaauucugaacuccuaucacucauaaacgacaugcccauuaccaacgaccaaaagaaacuaaugucaaacaacguccaaaucguaagacaacaaucguauuccaucaugugcauaauuaaagaagaaguucucgccuacgugguccaacuaccccucuacggagucauagacacuccuuguuggaaacuccacaccucuccccucugcacuaccaacacaaaagaaggcuccaacaucugccucacccgaaccgacagaggcugguacugcgacaacgccggcuccgucuccuucuucccccaagccgaaaccugcaaagucugcuccaaccgcguuuucugcgacaccaugaacucccucacacuccccuccgaagucaaccuauguaacauagacauauucaacccaaaauacgacugcaaaaucaugacauccaaaaccgacgugucuuccucggucaucaccucccucggcgccaucgucucaugcuacggcaaaacuaaaugcaccgcauccaacaaaaacaaaggcauaaucaaaacauucuccaacggcugcgacuacguuucuaacaaaggcgucgauaccgucuccgucggaaacacccucuacuacguaaacaagcaagaaggccagucccuauacguaaaaggagaaccaauuaucaacuucuacgacccccuagucuuccccuccgacgaguucgacgccuccauaucccaagucaacgagaaaaucaaccaaucccuagccuucauccgcaaaucagacgaacuccuccacaacgucaacgucggaaaauccacaacuaacaucaugaucaccaccaucauuaucgucaucauaguuauacuccuccuccucauagccgucggccucuuccuauacugcaaagcucgcuaaggacuagugaagggaacacccaaauuuaauucagccuuaagcacaauuaauuaagagugaaacguaauuguacaagcaguuggucacccaccauagggcaugaucaacaccgcaaccuuuccuuuuucccccagugauucugaaaaaccccucuucccuucagcuugcuuagauguuccaaauuuaguaagcuuaaggcggccuacagaagaaaaagaaaaaaaaggccacaaaaguucccucucacuuucaguaaauaaaauaaaagcagcaacagaaauaaagaaauaaaugaaauucaaaaugaaauaaauauuguguugugcagcauuaaaaaaucaauaaaaauuaaaaaugagcaagaucuaaaaaaaaaaaaaaaaaaaaaaaaaaaaaaaaaaaaaaaaaaaaaaaaaaaaaaaaaaaaaaaaugcaucccccccccccccccccccccccccccccccaaaggcucuuuucagagccaccagaauu

SEQ ID NO: 18152 - RNA, 1897 nt, Artificial Sequence
  mRNA product Design d-4 comprising derived and/or modified sequence from HRSV(Memphis-37)__AIY60640.1__F-del_DSCav1_mut6 (opt1)
gggagagucccgcagucggcguccagcggcucugcuuguucgugugugugucguugcaggccuuauucaagcuuaccauggagcugcccauccucaagaccaacgccaucaccacgauccuggccgcggugacccugugcuucgccagcucccagaacaucaccgaggaguucuaccagagcacgugcuccgccgucagcaagggcuaccucggcgcccugcgcaccgggugguacaccagcgugaucaccaucgagcuguccaacaucaaggagaacaagugcaacggcaccgacgccaaggugaagcucaucaagcaggagcuggacaaguacaagaacgcggucacggaccugcagaugcugaugugcagcaccccggccgccggcuccgggagcgcgaucgccuccggcaucgccgucugcaaggugcugcaccucgagggcgaggugaacaagaucaagaacgcccugcuguccaccaacaaggccgucgugagccucuccaacggggugagcguccugaccuucaaggugcuggaccucaagaacuacaucgacaagcagcugcugcccauccugaacaagcagagcugcuccauccccaaccccgagaccgucauggaguuccagcagaagaacaaccgccuccuggagaucacgcgggaguucagcgugaacgcgggcgugaccacccccgucuccaccuacaugcugacgaacagcgagcuccugucccugaucaacgacaugccgaucaccaacgaccagaagaagcucaugagcaacaacgugcagaucgugcgccagcaguccuacagcaucaugugcaucaucaaggaggagguccuggccuacguggugcagcugccccucuacggggucaucgacacccccugcuggaagcugcacaccagcccccugugcacgaccaacaccaaggagggcuccaacaucugccucacccggacggaccgcgggugguacugcgacaacgccggcagcguguccuucuucccgcaggccgagaccugcaaggucugcagcaaccggguguucugcgacaccaugaacucccugacccugcccagcgaggugaaccucugcaacaucgacaucuucaaccccaaguacgacugcaagaucaugacguccaagaccgacgucagcuccagcgugaucaccucccugggcgccaucgugagcugcuacgggaagaccaagugcacggcgagcaacaagaacaagggcaucaucaagaccuucuccaacgggugcgacuacgucagcaacaagggcguggacaccguguccgucggcaacacccuguacuacgugaacaagcaggagggccagagccucuacgugaagggggagcccaucaucaacuucuacgacccgcuggucuuccccuccgacgaguucgacgccagcaucucccaggugaacgagaagaucaaccagagccuggccuucauccggaaguccgacgagcuccugcacaacgugaacgucggcaagagcaccacgaacaucaugaucaccaccaucaucaucgugaucaucgugauccugcugcuccugaucgccgucgggcuguuccucuacugcaaggcccgcugaggacuaguggaagcauuuuccuggcugauuaaaagaaauuacucagcuauggucaucuguuccuguuagaaggcuaugcagcauauuauauacuaugcgcauguuaugaaaugcauaauaaaaaauuuuaaaaaaucuaaaagaucuaaaaaaaaaaaaaaaaaaaaaaaaaaaaaaaaaaaaaaaaaaaaaaaaaaaaaaaaaaaaaaaaugcaucccccccccccccccccccccccccccccccaaaggcucuuuucagagccaccagaauu

SEQ ID NO: 18153 - RNA, 1897 nt, Artificial Sequence
  mRNA product Design d-4 comprising derived and/or modified sequence from HRSV(Memphis-37)__AIY60640.1__F-del_DSCav1_mut6 (opt1)
gggagagucccgcagucggcguccagcggcucugcuuguucgugugugugucguugcaggccuuauucaagcuuaccauggagcugcccauccucaagaccaacgccaucaccacgauccuggccgcggugacccugugcuucgccagcucccagaacaucaccgaggaguucuaccagagcacgugcuccgccgucagcaagggcuaccucggggcccugcgcaccggcugguacaccuccgugaucaccaucgagcugagcaacaucaaggagaacaagugcaacgggaccgacgccaaggugaagcucaucaagcaggagcuggacaaguacaagaacgcggucacggaccugcagaugcucaugugcuccaccccggccgccggcagcggguccgccaucgcgagcggcaucgccgugugcaaggugcugcaccuggagggcgaggucaacaagaucaagaacgcccuccuguccaccaacaaggccguggugagccuguccaacggggucagcgugcucaccuucaaggugcuggaccugaagaacuacaucgacaagcagcuccugcccauccugaacaagcaguccugcagcauccccaaccccgagacggucauggaguuccagcagaagaacaaccggcuccuggagaucacccgcgaguucuccgugaacgccggcgugaccaccccggucagcacguacaugcugaccaacuccgagcuccugagccugaucaacgacaugcccaucaccaacgaccagaagaagcucaugagcaacaacgugcagaucgugcggcagcaguccuacagcaucaugugcaucaucaaggaggagguccuggcguacguggugcagcugccccucuacggggucaucgacacccccugcuggaagcugcacacguccccgcugugcaccaccaacaccaaggagggcagcaacaucugccucacgcgcaccgaccgggggugguacugcgacaacgccggcuccgugagcuucuucccccaggccgagaccugcaaggugugcuccaaccgcgucuucugcgacaccaugaacagccugacgcugcccuccgaggugaaccucugcaacaucgacaucuucaaccccaaguacgacugcaagaucaugaccagcaagaccgacgucuccagcuccgugaucaccagccugggcgccaucguguccugcuacgggaagacgaagugcaccgccagcaacaagaacaagggcaucaucaagaccuucuccaacgggugcgacuacgucagcaacaagggcguggacaccguguccgucggcaacacgcuguacuacgugaacaagcaggaggggcagagccucuacgugaagggcgagccgaucaucaacuucuacgacccccuggucuuccccagcgacgaguucgacgcguccaucagccaggugaacgagaagaucaaccagucccuggccuucauccgcaagagcgacgagcuccugcacaacgugaacgucgggaaguccaccaccaacaucaugaucaccaccaucaucaucgugaucaucgugauccugcuccugcugaucgccgucggccucuuccuguacugcaaggcccggugaggacuaguggaagcauuuuccuggcugauuaaaagaaauuacucagcuauggucaucuguuccuguuagaaggcuaugcagcauauuauauacuaugcgcauguuaugaaaugcauaauaaaaaauuuuaaaaaaucuaaaagaucuaaaaaaaaaaaaaaaaaaaaaaaaaaaaaaaaaaaaaaaaaaaaaaaaaaaaaaaaaaaaaaaaugcaucccccccccccccccccccccccccccccccaaaggcucuuuucagagccaccagaauu

SEQ ID NO: 18154 - RNA, 1897 nt, Artificial Sequence
  mRNA product Design d-4 comprising derived and/or modified sequence from HRSV(Memphis-37)__AIY60640.1__F-del_DSCav1_mut6 (opt2)
gggagagucccgcagucggcguccagcggcucugcuuguucgugugugugucguugcaggccuuauucaagcuuaccauggagcuccccauccucaagaccaacgccaucaccaccauccucgccgccgucacccucugcuucgccuccucccagaacaucaccgaggaguucuaccaguccaccugcuccgccgucuccaagggcuaccucggcgcccuccgcaccggcugguacaccuccgucaucaccaucgagcucuccaacaucaaggagaacaagugcaacggcaccgacgccaaggucaagcucaucaagcaggagcucgacaaguacaagaacgccgucaccgaccuccagaugcucaugugcuccacccccgccgccggcuccggcuccgccaucgccuccggcaucgccgucugcaagguccuccaccucgagggcgaggucaacaagaucaagaacgcccuccucuccaccaacaaggccgucgucucccucuccaacggcgucuccguccucaccuucaagguccucgaccucaagaacuacaucgacaagcagcuccuccccauccucaacaagcaguccugcuccauccccaaccccgagaccgucauggaguuccagcagaagaacaaccgccuccucgagaucacccgcgaguucuccgucaacgccggcgucaccacccccgucuccaccuacaugcucaccaacuccgagcuccucucccucaucaacgacaugcccaucaccaacgaccagaagaagcucauguccaacaacguccagaucguccgccagcaguccuacuccaucaugugcaucaucaaggaggagguccucgccuacgucguccagcucccccucuacggcgucaucgacacccccugcuggaagcuccacaccuccccccucugcaccaccaacaccaaggagggcuccaacaucugccucacccgcaccgaccgcggcugguacugcgacaacgccggcuccgucuccuucuucccccaggccgagaccugcaaggucugcuccaaccgcgucuucugcgacaccaugaacucccucacccuccccuccgaggucaaccucugcaacaucgacaucuucaaccccaaguacgacugcaagaucaugaccuccaagaccgacgucuccuccuccgucaucaccucccucggcgccaucgucuccugcuacggcaagaccaagugcaccgccuccaacaagaacaagggcaucaucaagaccuucuccaacggcugcgacuacgucuccaacaagggcgucgacaccgucuccgucggcaacacccucuacuacgucaacaagcaggagggccagucccucuacgucaagggcgagcccaucaucaacuucuacgacccccucgucuuccccuccgacgaguucgacgccuccaucucccaggucaacgagaagaucaaccagucccucgccuucauccgcaaguccgacgagcuccuccacaacgucaacgucggcaaguccaccaccaacaucaugaucaccaccaucaucaucgucaucaucgucauccuccuccuccucaucgccgucggccucuuccucuacugcaaggcccgcugaggacuaguggaagcauuuuccuggcugauuaaaagaaauuacucagcuauggucaucuguuccuguuagaaggcuaugcagcauauuauauacuaugcgcauguuaugaaaugcauaauaaaaaauuuuaaaaaaucuaaaagaucuaaaaaaaaaaaaaaaaaaaaaaaaaaaaaaaaaaaaaaaaaaaaaaaaaaaaaaaaaaaaaaaaugcaucccccccccccccccccccccccccccccccaaaggcucuuuucagagccaccagaauu

SEQ ID NO: 18155 - RNA, 1897 nt, Artificial Sequence
  mRNA product Design d-4 comprising derived and/or modified sequence from HRSV(Memphis-37)__AIY60640.1__F-del_DSCav1_mut6 (opt3)
gggagagucccgcagucggcguccagcggcucugcuuguucgugugugugucguugcaggccuuauucaagcuuaccauggagcugcccauccucaagaccaacgccauuacaacuauacuugcugcagugacgcugugcuucgccagcucccagaauaucaccgaagaguuuuaccaaucuacauguucagcggucaguaaaggcuauuugggggcuuuaagaacuggaugguacaccagcguuauuacaaucgaacuguccaacauuaaggagaauaaaugcaacgguaccgacgccaaggugaaacuaaucaagcaggaacucgauaaguauaaaaaugcaguaacugaccugcagaugcuuauguguucuacuccugccgcuggcucggggucagcaauagccagcggaaucgcugugugcaagguccugcacuuggagggcgaggugaacaaaauuaagaaugcccuccugaguaccaacaaagcgguugugucccugucuaauggugucagcgugcucacguucaagguauuagaucugaagaacuacaucgacaaacagcuuuugccaauucugaauaagcaauccuguucaaucccgaaccccgaaacuguuauggaguuucagcagaaaaauaacaggcuacucgaaauaacccgggaguucagugugaaugcaggggucacaacuccugugagcaccuauaugcugacaaacucugagcuucuguccuugauuaacgauaugccaaucaccaaugaccagaagaaacucaugucaaacaaugugcaaauuguccgccagcagagcuacaguaucaugugcaucauuaaggaagagguucuggccuaugugguacaguuaccccuguacggagugauagauacgccuuguuggaaacuccauacuucuccacuuugcacaaccaacacuaaggaaggcuccaauaucugucugacacgaaccgaccguggcugguacugcgauaacgcugggagcgucucguuuuucccccaagccgagacguguaaggugugcucuaauagaguuuucugcgacaccaugaacuccuugacacuaccuucagaagugaaucuguguaacauugauaucuucaauccaaaauaugacugcaagauaaugacaaguaaaaccgaugucagcuccucugugauuacaagccucggagcaaucguaucauguuacgguaagacuaaaugcaccgcuaguaacaagaauaagggcaucauuaaaacauuuuccaacgggugugacuauguuagcaauaagggaguggacaccgucucugugggcaacacucuguacuaugucaacaaacaggagggucagucacuuuacgugaagggggagccgaucauuaauuucuaugauccccugguuuuuccuagugacgaauuugaugccagcauaucccaagugaacgagaaaaucaaucagucuuuggcguuuauuaggaagucggacgaacuccugcacaacguaaaugucggaaagagcacgacaaacaucaugaucaccacuauuauaaucgugauuaucguuauuuuacugcuacucaucgccgugggccuguuccuuuacugcaaagcacggugaggacuaguggaagcauuuuccuggcugauuaaaagaaauuacucagcuauggucaucuguuccuguuagaaggcuaugcagcauauuauauacuaugcgcauguuaugaaaugcauaauaaaaaauuuuaaaaaaucuaaaagaucuaaaaaaaaaaaaaaaaaaaaaaaaaaaaaaaaaaaaaaaaaaaaaaaaaaaaaaaaaaaaaaaaugcaucccccccccccccccccccccccccccccccaaaggcucuuuucagagccaccagaauu

SEQ ID NO: 18156 - RNA, 1897 nt, Artificial Sequence
  mRNA product Design d-4 comprising derived and/or modified sequence from HRSV(Memphis-37)__AIY60640.1__F-del_DSCav1_mut6 (opt4)
gggagagucccgcagucggcguccagcggcucugcuuguucgugugugugucguugcaggccuuauucaagcuuaccauggagcugcccauccugaagaccaacgccaucaccaccauccuggccgccgugacccugugcuucgccagcagccagaacaucaccgaggaguucuaccagagcaccugcagcgccgugagcaagggcuaccugggcgcccugagaaccggcugguacaccagcgugaucaccaucgagcugagcaacaucaaggagaacaagugcaacggcaccgacgccaaggugaagcugaucaagcaggagcuggacaaguacaagaacgccgugaccgaccugcagaugcugaugugcagcacccccgccgccggcagcggcagcgccaucgccagcggcaucgccgugugcaaggugcugcaccuggagggcgaggugaacaagaucaagaacgcccugcugagcaccaacaaggccguggugagccugagcaacggcgugagcgugcugaccuucaaggugcuggaccugaagaacuacaucgacaagcagcugcugcccauccugaacaagcagagcugcagcauccccaaccccgagaccgugauggaguuccagcagaagaacaacagacugcuggagaucaccagagaguucagcgugaacgccggcgugaccacccccgugagcaccuacaugcugaccaacagcgagcugcugagccugaucaacgacaugcccaucaccaacgaccagaagaagcugaugagcaacaacgugcagaucgugagacagcagagcuacagcaucaugugcaucaucaaggaggaggugcuggccuacguggugcagcugccccuguacggcgugaucgacacccccugcuggaagcugcacaccagcccccugugcaccaccaacaccaaggagggcagcaacaucugccugaccagaaccgacagaggcugguacugcgacaacgccggcagcgugagcuucuucccccaggccgagaccugcaaggugugcagcaacagaguguucugcgacaccaugaacagccugacccugcccagcgaggugaaccugugcaacaucgacaucuucaaccccaaguacgacugcaagaucaugaccagcaagaccgacgugagcagcagcgugaucaccagccugggcgccaucgugagcugcuacggcaagaccaagugcaccgccagcaacaagaacaagggcaucaucaagaccuucagcaacggcugcgacuacgugagcaacaagggcguggacaccgugagcgugggcaacacccuguacuacgugaacaagcaggagggccagagccuguacgugaagggcgagcccaucaucaacuucuacgacccccugguguuccccagcgacgaguucgacgccagcaucagccaggugaacgagaagaucaaccagagccuggccuucaucagaaagagcgacgagcugcugcacaacgugaacgugggcaagagcaccaccaacaucaugaucaccaccaucaucaucgugaucaucgugauccugcugcugcugaucgccgugggccuguuccuguacugcaaggccagaugaggacuaguggaagcauuuuccuggcugauuaaaagaaauuacucagcuauggucaucuguuccuguuagaaggcuaugcagcauauuauauacuaugcgcauguuaugaaaugcauaauaaaaaauuuuaaaaaaucuaaaagaucuaaaaaaaaaaaaaaaaaaaaaaaaaaaaaaaaaaaaaaaaaaaaaaaaaaaaaaaaaaaaaaaaugcaucccccccccccccccccccccccccccccccaaaggcucuuuucagagccaccagaauu

SEQ ID NO: 18157 - RNA, 1897 nt, Artificial Sequence
  mRNA product Design d-4 comprising derived and/or modified sequence from HRSV(Memphis-37)__AIY60640.1__F-del_DSCav1_mut6 (opt5)
gggagagucccgcagucggcguccagcggcucugcuuguucgugugugugucguugcaggccuuauucaagcuuaccauggagcugcccauccucaagaccaacgccauuacaacgauccuggcugccgugacccuuugcuucgcgagcucccagaauauuacagaagaguuuuaccaaucuaccuguagcgcugucuccaaaggcuaucugggggcccucagaacaggaugguacaccucuguuaucacaauugaacugagcaacaucaaggagaauaaaugcaacggcaccgacgccaaggugaaacuuaucaagcaggaacuggauaaguauaaaaaugcugugacggaccuccagaugcugauguguuccaccccugccgcugggucuggaagcgccauugcguccggcaucgccgucugcaaggugcugcaccucgagggggagguuaacaaaauuaagaaugcucugcuuagcacaaacaaagccguggucucucuguccaauggagugagcguucucaccuucaaggugcuggaucuuaagaacuacaucgacaaacagcugcucccgauucugaauaagcaaucuuguuccauccccaacccugaaacagucauggaguuucagcagaaaaauaaccggcugcucgaaauuacccgcgaguucagcgugaaugcuggcgugacgacacccgucucuaccuauaugcugacaaacuccgagcuucugagccucaucaacgauaugccuaucaccaaugaccagaagaaacugauguccaacaauguucaaauugugagacagcagucuuacagcaucaugugcauuaucaaggaagaggugcuugccuaugucgugcagcugccccucuacggcguuauugauaccccuuguuggaaacugcauacauccccgcugugcacgaccaacacaaaggaagggagcaauaucugucucacccggacagaccgcggaugguacugcgauaacgcgggcucuguguccuuuuucccccaagccgagaccuguaaggucugcagcaauagaguguuuugcgacacgaugaacucucugacacuuccuagcgaaguuaaucuguguaacaucgauauuuucaaucccaaauaugacugcaagaucaugaccuccaaaaccgaugugucuagcuccgucauuacaagccucggggcuaucgugucuuguuacggaaagaccaaaugcacagccuccaacaagaauaagggcauuaucaaaacguuuagcaacgggugugacuaugucucuaauaagggaguggacaccguuuccgugggcaacacacuguacuaugucaacaaacaggagggccagagccuuuacgugaagggggagccuaucauuaauuucuaugauccccugguuuuuccguccgacgaauuugaugcuucuaucagccaagugaacgagaaaauuaaucagucccucgccuucauccggaagucugacgaacugcugcacaacgucaaugugggaaagagcaccacaaacauuaugaucaccacgauuaucaucgugauuaucguuauucuccugcuucugaucgccgucggccucuuccuguacugcaaagcucgcugaggacuaguggaagcauuuuccuggcugauuaaaagaaauuacucagcuauggucaucuguuccuguuagaaggcuaugcagcauauuauauacuaugcgcauguuaugaaaugcauaauaaaaaauuuuaaaaaaucuaaaagaucuaaaaaaaaaaaaaaaaaaaaaaaaaaaaaaaaaaaaaaaaaaaaaaaaaaaaaaaaaaaaaaaaugcaucccccccccccccccccccccccccccccccaaaggcucuuuucagagccaccagaauu

SEQ ID NO: 18158 - RNA, 1897 nt, Artificial Sequence
  mRNA product Design d-4 comprising derived and/or modified sequence from HRSV(Memphis-37)__AIY60640.1__F-del_DSCav1_mut6 (opt6)
gggagagucccgcagucggcguccagcggcucugcuuguucgugugugugucguugcaggccuuauucaagcuuaccauggaacuaccuauacuaaaaaccaacgccauaacaacaauacuagccgcaguuacacucugcuuugcauccucacaaaacaucacagaggaauuuuaccaaucuacuugcuccgcaguaucaaaaggauaccuaggagcacuccguacaggaugguacacaucagucauaacaauugaauuaucuaacaucaaagaaaacaaauguaaugguacagacgccaaaguaaaauuaauaaaacaagaacuagacaaauacaaaaacgccguaacagaccuacaaaugcuaaugugcucaacccccgccgcaggaucuggaucagcaauugccucaggcauagcaguaugcaaaguccuacaccuagaaggagaagucaacaaaauaaaaaacgcucuccucucaaccaauaaagcaguaguaucccucucaaacggaguaucaguacuaacauucaaaguacuagaccucaaaaauuauauagacaagcaacuacucccaauauuaaauaaacaauccugcucaauacccaauccagaaacagucauggaauuucaacaaaaaaacaaccgacucuuagaaauaacaagagaauuuucagucaaugccggcgucacaaccccaguaucaacauacaugcuaacaaacucagaacuacuaucacuaaucaacgauaugcccauaaccaacgaccaaaaaaaacuaaugucaaacaauguacaaauuguaagacaacagucuuauucaauaaugugcauaauaaaagaagaagucuuagcauauguaguacaacuaccacuauacggaguaauagacacaccauguuggaaauuacacacauccccacuauguaccaccaacacaaaagaaggaucuaacauaugccuaaccagaacagaccgaggcugguauugcgacaaugcaggaucaguauccuucuuuccacaagcagaaacaugcaaagucugcucuaacagaguauucugcgauacuaugaacucacuuaccuuaccaucagaaguaaaucuauguaauaucgacauauucaaucccaaauaugauugcaaaauaaugaccucaaaaacagauguaucaucaucagucauaacaucacuaggagcaauagucagcugcuaugggaaaacaaaaugcacagcuuccaacaaaaacaaaggaaucauaaaaacauucucaaaugguugugacuacguauccaacaaaggaguagauacaguaucuguaggcaacacauuauacuauguaaauaaacaagaaggacaaagccuauacgucaaaggagaacccaucauaaauuucuaugacccauuaguuuucccaucugacgaauuugacgcuuccaucucccaaguaaaugaaaaaaucaaccaaagccucgcauucauucgcaaaucugacgaauuacuccacaacguaaacguaggaaaauccacaacaaacauuaugaucaccaccauaauaaucguaauaauagucauauuacuacuccucauagcaguaggacuauuccuauacuguaaagcuagauaaggacuaguggaagcauuuuccuggcugauuaaaagaaauuacucagcuauggucaucuguuccuguuagaaggcuaugcagcauauuauauacuaugcgcauguuaugaaaugcauaauaaaaaauuuuaaaaaaucuaaaagaucuaaaaaaaaaaaaaaaaaaaaaaaaaaaaaaaaaaaaaaaaaaaaaaaaaaaaaaaaaaaaaaaaugcaucccccccccccccccccccccccccccccccaaaggcucuuuucagagccaccagaauu

SEQ ID NO: 18159 - RNA, 1897 nt, Artificial Sequence
  mRNA product Design d-4 comprising derived and/or modified sequence from HRSV(Memphis-37)__AIY60640.1__F-del_DSCav1_mut6 (opt11)
gggagagucccgcagucggcguccagcggcucugcuuguucgugugugugucguugcaggccuuauucaagcuuaccauggaauuaccaauccucaaaacuaacgccaucaccaccauccucgcugccgucacccucugcuucgccuccagccaaaacaucacagaagaguucuaccaaagcacaugcuccgcugucuccaaaggcuaccuuggcgcccuccgcaccggcugguacaccucaguaauuaccauugaacuaagcaacaucaaagaaaauaaaugcaacggcaccgacgccaaaguuaaacucauaaaacaggaacucgacaaauacaaaaacgccguaacagaccuccaaaugcucaugugcuccacccccgccgccggcucaggcuccgccaucgcaagcggaauagcaguuugcaaaguccuccaccuagaaggcgaggucaacaagauuaaaaacgcacuucucucaaccaacaaggccgucguaucacucucaaacggcgucuccguccucaccuucaaaguucuggaccucaaaaacuacaucgauaaacaacuacucccaauacuuaacaaacaaucaugcuccaucccaaaccccgaaaccgucauggaguuccaacagaaaaacaaccgccuacuggaaaucacacgcgaguucagcguaaacgcuggcgucacuacacccgucuccaccuacaugcucaccaauucugaacuccuaucacucauaaacgacaugcccauuaccaacgaccaaaagaaacuaaugucaaacaacguccaaaucguaagacaacaaucguauuccaucaugugcauaauuaaagaagaaguucucgccuacgugguccaacuaccccucuacggagucauagacacuccuuguuggaaacuccacaccucuccccucugcacuaccaacacaaaagaaggcuccaacaucugccucacccgaaccgacagaggcugguacugcgacaacgccggcuccgucuccuucuucccccaagccgaaaccugcaaagucugcuccaaccgcguuuucugcgacaccaugaacucccucacacuccccuccgaagucaaccuauguaacauagacauauucaacccaaaauacgacugcaaaaucaugacauccaaaaccgacgugucuuccucggucaucaccucccucggcgccaucgucucaugcuacggcaaaacuaaaugcaccgcauccaacaaaaacaaaggcauaaucaaaacauucuccaacggcugcgacuacguuucuaacaaaggcgucgauaccgucuccgucggaaacacccucuacuacguaaacaagcaagaaggccagucccuauacguaaaaggagaaccaauuaucaacuucuacgacccccuagucuuccccuccgacgaguucgacgccuccauaucccaagucaacgagaaaaucaaccaaucccuagccuucauccgcaaaucagacgaacuccuccacaacgucaacgucggaaaauccacaacuaacaucaugaucaccaccaucauuaucgucaucauaguuauacuccuccuccucauagccgucggccucuuccuauacugcaaagcucgcuaaggacuaguggaagcauuuuccuggcugauuaaaagaaauuacucagcuauggucaucuguuccuguuagaaggcuaugcagcauauuauauacuaugcgcauguuaugaaaugcauaauaaaaaauuuuaaaaaaucuaaaagaucuaaaaaaaaaaaaaaaaaaaaaaaaaaaaaaaaaaaaaaaaaaaaaaaaaaaaaaaaaaaaaaaaugcaucccccccccccccccccccccccccccccccaaaggcucuuuucagagccaccagaauu

SEQ ID NO: 18160 - RNA, 1994 nt, Artificial Sequence
  mRNA product Design d-5 comprising derived and/or modified sequence from HRSV(Memphis-37)__AIY60640.1__F-del_DSCav1_mut6 (opt1)
gggagagggcgcuuggcuugcaaggacccugagcugcggcauugaagcacacccaacccaacucgacugaagucagccucacugaaccggaucugagaaucuucucucucugggcuugccagggcucuccgaaccuagcuagcauccucuucaauuccaacuagaaagcuuaccauggagcugcccauccucaagaccaacgccaucaccacgauccuggccgcggugacccugugcuucgccagcucccagaacaucaccgaggaguucuaccagagcacgugcuccgccgucagcaagggcuaccucggcgcccugcgcaccgggugguacaccagcgugaucaccaucgagcuguccaacaucaaggagaacaagugcaacggcaccgacgccaaggugaagcucaucaagcaggagcuggacaaguacaagaacgcggucacggaccugcagaugcugaugugcagcaccccggccgccggcuccgggagcgcgaucgccuccggcaucgccgucugcaaggugcugcaccucgagggcgaggugaacaagaucaagaacgcccugcuguccaccaacaaggccgucgugagccucuccaacggggugagcguccugaccuucaaggugcuggaccucaagaacuacaucgacaagcagcugcugcccauccugaacaagcagagcugcuccauccccaaccccgagaccgucauggaguuccagcagaagaacaaccgccuccuggagaucacgcgggaguucagcgugaacgcgggcgugaccacccccgucuccaccuacaugcugacgaacagcgagcuccugucccugaucaacgacaugccgaucaccaacgaccagaagaagcucaugagcaacaacgugcagaucgugcgccagcaguccuacagcaucaugugcaucaucaaggaggagguccuggccuacguggugcagcugccccucuacggggucaucgacacccccugcuggaagcugcacaccagcccccugugcacgaccaacaccaaggagggcuccaacaucugccucacccggacggaccgcgggugguacugcgacaacgccggcagcguguccuucuucccgcaggccgagaccugcaaggucugcagcaaccggguguucugcgacaccaugaacucccugacccugcccagcgaggugaaccucugcaacaucgacaucuucaaccccaaguacgacugcaagaucaugacguccaagaccgacgucagcuccagcgugaucaccucccugggcgccaucgugagcugcuacgggaagaccaagugcacggcgagcaacaagaacaagggcaucaucaagaccuucuccaacgggugcgacuacgucagcaacaagggcguggacaccguguccgucggcaacacccuguacuacgugaacaagcaggagggccagagccucuacgugaagggggagcccaucaucaacuucuacgacccgcuggucuuccccuccgacgaguucgacgccagcaucucccaggugaacgagaagaucaaccagagccuggccuucauccggaaguccgacgagcuccugcacaacgugaacgucggcaagagcaccacgaacaucaugaucaccaccaucaucaucgugaucaucgugauccugcugcuccugaucgccgucgggcuguuccucuacugcaaggcccgcugaggacuaguggaagcauuuuccuggcugauuaaaagaaauuacucagcuauggucaucuguuccuguuagaaggcuaugcagcauauuauauacuaugcgcauguuaugaaaugcauaauaaaaaauuuuaaaaaaucuaaaagaucuaaaaaaaaaaaaaaaaaaaaaaaaaaaaaaaaaaaaaaaaaaaaaaaaaaaaaaaaaaaaaaaaugcaucccccccccccccccccccccccccccccccaaaggcucuuuucagagccaccagaauu

SEQ ID NO: 18161 - RNA, 1994 nt, Artificial Sequence
  mRNA product Design d-5 comprising derived and/or modified sequence from HRSV(Memphis-37)__AIY60640.1__F-del_DSCav1_mut6 (opt1)
gggagagggcgcuuggcuugcaaggacccugagcugcggcauugaagcacacccaacccaacucgacugaagucagccucacugaaccggaucugagaaucuucucucucugggcuugccagggcucuccgaaccuagcuagcauccucuucaauuccaacuagaaagcuuaccauggagcugcccauccucaagaccaacgccaucaccacgauccuggccgcggugacccugugcuucgccagcucccagaacaucaccgaggaguucuaccagagcacgugcuccgccgucagcaagggcuaccucggggcccugcgcaccggcugguacaccuccgugaucaccaucgagcugagcaacaucaaggagaacaagugcaacgggaccgacgccaaggugaagcucaucaagcaggagcuggacaaguacaagaacgcggucacggaccugcagaugcucaugugcuccaccccggccgccggcagcggguccgccaucgcgagcggcaucgccgugugcaaggugcugcaccuggagggcgaggucaacaagaucaagaacgcccuccuguccaccaacaaggccguggugagccuguccaacggggucagcgugcucaccuucaaggugcuggaccugaagaacuacaucgacaagcagcuccugcccauccugaacaagcaguccugcagcauccccaaccccgagacggucauggaguuccagcagaagaacaaccggcuccuggagaucacccgcgaguucuccgugaacgccggcgugaccaccccggucagcacguacaugcugaccaacuccgagcuccugagccugaucaacgacaugcccaucaccaacgaccagaagaagcucaugagcaacaacgugcagaucgugcggcagcaguccuacagcaucaugugcaucaucaaggaggagguccuggcguacguggugcagcugccccucuacggggucaucgacacccccugcuggaagcugcacacguccccgcugugcaccaccaacaccaaggagggcagcaacaucugccucacgcgcaccgaccgggggugguacugcgacaacgccggcuccgugagcuucuucccccaggccgagaccugcaaggugugcuccaaccgcgucuucugcgacaccaugaacagccugacgcugcccuccgaggugaaccucugcaacaucgacaucuucaaccccaaguacgacugcaagaucaugaccagcaagaccgacgucuccagcuccgugaucaccagccugggcgccaucguguccugcuacgggaagacgaagugcaccgccagcaacaagaacaagggcaucaucaagaccuucuccaacgggugcgacuacgucagcaacaagggcguggacaccguguccgucggcaacacgcuguacuacgugaacaagcaggaggggcagagccucuacgugaagggcgagccgaucaucaacuucuacgacccccuggucuuccccagcgacgaguucgacgcguccaucagccaggugaacgagaagaucaaccagucccuggccuucauccgcaagagcgacgagcuccugcacaacgugaacgucgggaaguccaccaccaacaucaugaucaccaccaucaucaucgugaucaucgugauccugcuccugcugaucgccgucggccucuuccuguacugcaaggcccggugaggacuaguggaagcauuuuccuggcugauuaaaagaaauuacucagcuauggucaucuguuccuguuagaaggcuaugcagcauauuauauacuaugcgcauguuaugaaaugcauaauaaaaaauuuuaaaaaaucuaaaagaucuaaaaaaaaaaaaaaaaaaaaaaaaaaaaaaaaaaaaaaaaaaaaaaaaaaaaaaaaaaaaaaaaugcaucccccccccccccccccccccccccccccccaaaggcucuuuucagagccaccagaauu

SEQ ID NO: 18162 - RNA, 1994 nt, Artificial Sequence
  mRNA product Design d-5 comprising derived and/or modified sequence from HRSV(Memphis-37)__AIY60640.1__F-del_DSCav1_mut6 (opt2)
gggagagggcgcuuggcuugcaaggacccugagcugcggcauugaagcacacccaacccaacucgacugaagucagccucacugaaccggaucugagaaucuucucucucugggcuugccagggcucuccgaaccuagcuagcauccucuucaauuccaacuagaaagcuuaccauggagcuccccauccucaagaccaacgccaucaccaccauccucgccgccgucacccucugcuucgccuccucccagaacaucaccgaggaguucuaccaguccaccugcuccgccgucuccaagggcuaccucggcgcccuccgcaccggcugguacaccuccgucaucaccaucgagcucuccaacaucaaggagaacaagugcaacggcaccgacgccaaggucaagcucaucaagcaggagcucgacaaguacaagaacgccgucaccgaccuccagaugcucaugugcuccacccccgccgccggcuccggcuccgccaucgccuccggcaucgccgucugcaagguccuccaccucgagggcgaggucaacaagaucaagaacgcccuccucuccaccaacaaggccgucgucucccucuccaacggcgucuccguccucaccuucaagguccucgaccucaagaacuacaucgacaagcagcuccuccccauccucaacaagcaguccugcuccauccccaaccccgagaccgucauggaguuccagcagaagaacaaccgccuccucgagaucacccgcgaguucuccgucaacgccggcgucaccacccccgucuccaccuacaugcucaccaacuccgagcuccucucccucaucaacgacaugcccaucaccaacgaccagaagaagcucauguccaacaacguccagaucguccgccagcaguccuacuccaucaugugcaucaucaaggaggagguccucgccuacgucguccagcucccccucuacggcgucaucgacacccccugcuggaagcuccacaccuccccccucugcaccaccaacaccaaggagggcuccaacaucugccucacccgcaccgaccgcggcugguacugcgacaacgccggcuccgucuccuucuucccccaggccgagaccugcaaggucugcuccaaccgcgucuucugcgacaccaugaacucccucacccuccccuccgaggucaaccucugcaacaucgacaucuucaaccccaaguacgacugcaagaucaugaccuccaagaccgacgucuccuccuccgucaucaccucccucggcgccaucgucuccugcuacggcaagaccaagugcaccgccuccaacaagaacaagggcaucaucaagaccuucuccaacggcugcgacuacgucuccaacaagggcgucgacaccgucuccgucggcaacacccucuacuacgucaacaagcaggagggccagucccucuacgucaagggcgagcccaucaucaacuucuacgacccccucgucuuccccuccgacgaguucgacgccuccaucucccaggucaacgagaagaucaaccagucccucgccuucauccgcaaguccgacgagcuccuccacaacgucaacgucggcaaguccaccaccaacaucaugaucaccaccaucaucaucgucaucaucgucauccuccuccuccucaucgccgucggccucuuccucuacugcaaggcccgcugaggacuaguggaagcauuuuccuggcugauuaaaagaaauuacucagcuauggucaucuguuccuguuagaaggcuaugcagcauauuauauacuaugcgcauguuaugaaaugcauaauaaaaaauuuuaaaaaaucuaaaagaucuaaaaaaaaaaaaaaaaaaaaaaaaaaaaaaaaaaaaaaaaaaaaaaaaaaaaaaaaaaaaaaaaugcaucccccccccccccccccccccccccccccccaaaggcucuuuucagagccaccagaauu

SEQ ID NO: 18163 - RNA, 1994 nt, Artificial Sequence
  mRNA product Design d-5 comprising derived and/or modified sequence from HRSV(Memphis-37)__AIY60640.1__F-del_DSCav1_mut6 (opt3)
gggagagggcgcuuggcuugcaaggacccugagcugcggcauugaagcacacccaacccaacucgacugaagucagccucacugaaccggaucugagaaucuucucucucugggcuugccagggcucuccgaaccuagcuagcauccucuucaauuccaacuagaaagcuuaccauggagcugcccauccucaagaccaacgccauuacaacuauacuugcugcagugacgcugugcuucgccagcucccagaauaucaccgaagaguuuuaccaaucuacauguucagcggucaguaaaggcuauuugggggcuuuaagaacuggaugguacaccagcguuauuacaaucgaacuguccaacauuaaggagaauaaaugcaacgguaccgacgccaaggugaaacuaaucaagcaggaacucgauaaguauaaaaaugcaguaacugaccugcagaugcuuauguguucuacuccugccgcuggcucggggucagcaauagccagcggaaucgcugugugcaagguccugcacuuggagggcgaggugaacaaaauuaagaaugcccuccugaguaccaacaaagcgguugugucccugucuaauggugucagcgugcucacguucaagguauuagaucugaagaacuacaucgacaaacagcuuuugccaauucugaauaagcaauccuguucaaucccgaaccccgaaacuguuauggaguuucagcagaaaaauaacaggcuacucgaaauaacccgggaguucagugugaaugcaggggucacaacuccugugagcaccuauaugcugacaaacucugagcuucuguccuugauuaacgauaugccaaucaccaaugaccagaagaaacucaugucaaacaaugugcaaauuguccgccagcagagcuacaguaucaugugcaucauuaaggaagagguucuggccuaugugguacaguuaccccuguacggagugauagauacgccuuguuggaaacuccauacuucuccacuuugcacaaccaacacuaaggaaggcuccaauaucugucugacacgaaccgaccguggcugguacugcgauaacgcugggagcgucucguuuuucccccaagccgagacguguaaggugugcucuaauagaguuuucugcgacaccaugaacuccuugacacuaccuucagaagugaaucuguguaacauugauaucuucaauccaaaauaugacugcaagauaaugacaaguaaaaccgaugucagcuccucugugauuacaagccucggagcaaucguaucauguuacgguaagacuaaaugcaccgcuaguaacaagaauaagggcaucauuaaaacauuuuccaacgggugugacuauguuagcaauaagggaguggacaccgucucugugggcaacacucuguacuaugucaacaaacaggagggucagucacuuuacgugaagggggagccgaucauuaauuucuaugauccccugguuuuuccuagugacgaauuugaugccagcauaucccaagugaacgagaaaaucaaucagucuuuggcguuuauuaggaagucggacgaacuccugcacaacguaaaugucggaaagagcacgacaaacaucaugaucaccacuauuauaaucgugauuaucguuauuuuacugcuacucaucgccgugggccuguuccuuuacugcaaagcacggugaggacuaguggaagcauuuuccuggcugauuaaaagaaauuacucagcuauggucaucuguuccuguuagaaggcuaugcagcauauuauauacuaugcgcauguuaugaaaugcauaauaaaaaauuuuaaaaaaucuaaaagaucuaaaaaaaaaaaaaaaaaaaaaaaaaaaaaaaaaaaaaaaaaaaaaaaaaaaaaaaaaaaaaaaaugcaucccccccccccccccccccccccccccccccaaaggcucuuuucagagccaccagaauu

SEQ ID NO: 18164 - RNA, 1994 nt, Artificial Sequence
  mRNA product Design d-5 comprising derived and/or modified sequence from HRSV(Memphis-37)__AIY60640.1__F-del_DSCav1_mut6 (opt4)
gggagagggcgcuuggcuugcaaggacccugagcugcggcauugaagcacacccaacccaacucgacugaagucagccucacugaaccggaucugagaaucuucucucucugggcuugccagggcucuccgaaccuagcuagcauccucuucaauuccaacuagaaagcuuaccauggagcugcccauccugaagaccaacgccaucaccaccauccuggccgccgugacccugugcuucgccagcagccagaacaucaccgaggaguucuaccagagcaccugcagcgccgugagcaagggcuaccugggcgcccugagaaccggcugguacaccagcgugaucaccaucgagcugagcaacaucaaggagaacaagugcaacggcaccgacgccaaggugaagcugaucaagcaggagcuggacaaguacaagaacgccgugaccgaccugcagaugcugaugugcagcacccccgccgccggcagcggcagcgccaucgccagcggcaucgccgugugcaaggugcugcaccuggagggcgaggugaacaagaucaagaacgcccugcugagcaccaacaaggccguggugagccugagcaacggcgugagcgugcugaccuucaaggugcuggaccugaagaacuacaucgacaagcagcugcugcccauccugaacaagcagagcugcagcauccccaaccccgagaccgugauggaguuccagcagaagaacaacagacugcuggagaucaccagagaguucagcgugaacgccggcgugaccacccccgugagcaccuacaugcugaccaacagcgagcugcugagccugaucaacgacaugcccaucaccaacgaccagaagaagcugaugagcaacaacgugcagaucgugagacagcagagcuacagcaucaugugcaucaucaaggaggaggugcuggccuacguggugcagcugccccuguacggcgugaucgacacccccugcuggaagcugcacaccagcccccugugcaccaccaacaccaaggagggcagcaacaucugccugaccagaaccgacagaggcugguacugcgacaacgccggcagcgugagcuucuucccccaggccgagaccugcaaggugugcagcaacagaguguucugcgacaccaugaacagccugacccugcccagcgaggugaaccugugcaacaucgacaucuucaaccccaaguacgacugcaagaucaugaccagcaagaccgacgugagcagcagcgugaucaccagccugggcgccaucgugagcugcuacggcaagaccaagugcaccgccagcaacaagaacaagggcaucaucaagaccuucagcaacggcugcgacuacgugagcaacaagggcguggacaccgugagcgugggcaacacccuguacuacgugaacaagcaggagggccagagccuguacgugaagggcgagcccaucaucaacuucuacgacccccugguguuccccagcgacgaguucgacgccagcaucagccaggugaacgagaagaucaaccagagccuggccuucaucagaaagagcgacgagcugcugcacaacgugaacgugggcaagagcaccaccaacaucaugaucaccaccaucaucaucgugaucaucgugauccugcugcugcugaucgccgugggccuguuccuguacugcaaggccagaugaggacuaguggaagcauuuuccuggcugauuaaaagaaauuacucagcuauggucaucuguuccuguuagaaggcuaugcagcauauuauauacuaugcgcauguuaugaaaugcauaauaaaaaauuuuaaaaaaucuaaaagaucuaaaaaaaaaaaaaaaaaaaaaaaaaaaaaaaaaaaaaaaaaaaaaaaaaaaaaaaaaaaaaaaaugcaucccccccccccccccccccccccccccccccaaaggcucuuuucagagccaccagaauu

SEQ ID NO: 18165 - RNA, 1994 nt, Artificial Sequence
  mRNA product Design d-5 comprising derived and/or modified sequence from HRSV(Memphis-37)__AIY60640.1__F-del_DSCav1_mut6 (opt5)
gggagagggcgcuuggcuugcaaggacccugagcugcggcauugaagcacacccaacccaacucgacugaagucagccucacugaaccggaucugagaaucuucucucucugggcuugccagggcucuccgaaccuagcuagcauccucuucaauuccaacuagaaagcuuaccauggagcugcccauccucaagaccaacgccauuacaacgauccuggcugccgugacccuuugcuucgcgagcucccagaauauuacagaagaguuuuaccaaucuaccuguagcgcugucuccaaaggcuaucugggggcccucagaacaggaugguacaccucuguuaucacaauugaacugagcaacaucaaggagaauaaaugcaacggcaccgacgccaaggugaaacuuaucaagcaggaacuggauaaguauaaaaaugcugugacggaccuccagaugcugauguguuccaccccugccgcugggucuggaagcgccauugcguccggcaucgccgucugcaaggugcugcaccucgagggggagguuaacaaaauuaagaaugcucugcuuagcacaaacaaagccguggucucucuguccaauggagugagcguucucaccuucaaggugcuggaucuuaagaacuacaucgacaaacagcugcucccgauucugaauaagcaaucuuguuccauccccaacccugaaacagucauggaguuucagcagaaaaauaaccggcugcucgaaauuacccgcgaguucagcgugaaugcuggcgugacgacacccgucucuaccuauaugcugacaaacuccgagcuucugagccucaucaacgauaugccuaucaccaaugaccagaagaaacugauguccaacaauguucaaauugugagacagcagucuuacagcaucaugugcauuaucaaggaagaggugcuugccuaugucgugcagcugccccucuacggcguuauugauaccccuuguuggaaacugcauacauccccgcugugcacgaccaacacaaaggaagggagcaauaucugucucacccggacagaccgcggaugguacugcgauaacgcgggcucuguguccuuuuucccccaagccgagaccuguaaggucugcagcaauagaguguuuugcgacacgaugaacucucugacacuuccuagcgaaguuaaucuguguaacaucgauauuuucaaucccaaauaugacugcaagaucaugaccuccaaaaccgaugugucuagcuccgucauuacaagccucggggcuaucgugucuuguuacggaaagaccaaaugcacagccuccaacaagaauaagggcauuaucaaaacguuuagcaacgggugugacuaugucucuaauaagggaguggacaccguuuccgugggcaacacacuguacuaugucaacaaacaggagggccagagccuuuacgugaagggggagccuaucauuaauuucuaugauccccugguuuuuccguccgacgaauuugaugcuucuaucagccaagugaacgagaaaauuaaucagucccucgccuucauccggaagucugacgaacugcugcacaacgucaaugugggaaagagcaccacaaacauuaugaucaccacgauuaucaucgugauuaucguuauucuccugcuucugaucgccgucggccucuuccuguacugcaaagcucgcugaggacuaguggaagcauuuuccuggcugauuaaaagaaauuacucagcuauggucaucuguuccuguuagaaggcuaugcagcauauuauauacuaugcgcauguuaugaaaugcauaauaaaaaauuuuaaaaaaucuaaaagaucuaaaaaaaaaaaaaaaaaaaaaaaaaaaaaaaaaaaaaaaaaaaaaaaaaaaaaaaaaaaaaaaaugcaucccccccccccccccccccccccccccccccaaaggcucuuuucagagccaccagaauu

SEQ ID NO: 18166 - RNA, 1994 nt, Artificial Sequence
  mRNA product Design d-5 comprising derived and/or modified sequence from HRSV(Memphis-37)__AIY60640.1__F-del_DSCav1_mut6 (opt6)
gggagagggcgcuuggcuugcaaggacccugagcugcggcauugaagcacacccaacccaacucgacugaagucagccucacugaaccggaucugagaaucuucucucucugggcuugccagggcucuccgaaccuagcuagcauccucuucaauuccaacuagaaagcuuaccauggaacuaccuauacuaaaaaccaacgccauaacaacaauacuagccgcaguuacacucugcuuugcauccucacaaaacaucacagaggaauuuuaccaaucuacuugcuccgcaguaucaaaaggauaccuaggagcacuccguacaggaugguacacaucagucauaacaauugaauuaucuaacaucaaagaaaacaaauguaaugguacagacgccaaaguaaaauuaauaaaacaagaacuagacaaauacaaaaacgccguaacagaccuacaaaugcuaaugugcucaacccccgccgcaggaucuggaucagcaauugccucaggcauagcaguaugcaaaguccuacaccuagaaggagaagucaacaaaauaaaaaacgcucuccucucaaccaauaaagcaguaguaucccucucaaacggaguaucaguacuaacauucaaaguacuagaccucaaaaauuauauagacaagcaacuacucccaauauuaaauaaacaauccugcucaauacccaauccagaaacagucauggaauuucaacaaaaaaacaaccgacucuuagaaauaacaagagaauuuucagucaaugccggcgucacaaccccaguaucaacauacaugcuaacaaacucagaacuacuaucacuaaucaacgauaugcccauaaccaacgaccaaaaaaaacuaaugucaaacaauguacaaauuguaagacaacagucuuauucaauaaugugcauaauaaaagaagaagucuuagcauauguaguacaacuaccacuauacggaguaauagacacaccauguuggaaauuacacacauccccacuauguaccaccaacacaaaagaaggaucuaacauaugccuaaccagaacagaccgaggcugguauugcgacaaugcaggaucaguauccuucuuuccacaagcagaaacaugcaaagucugcucuaacagaguauucugcgauacuaugaacucacuuaccuuaccaucagaaguaaaucuauguaauaucgacauauucaaucccaaauaugauugcaaaauaaugaccucaaaaacagauguaucaucaucagucauaacaucacuaggagcaauagucagcugcuaugggaaaacaaaaugcacagcuuccaacaaaaacaaaggaaucauaaaaacauucucaaaugguugugacuacguauccaacaaaggaguagauacaguaucuguaggcaacacauuauacuauguaaauaaacaagaaggacaaagccuauacgucaaaggagaacccaucauaaauuucuaugacccauuaguuuucccaucugacgaauuugacgcuuccaucucccaaguaaaugaaaaaaucaaccaaagccucgcauucauucgcaaaucugacgaauuacuccacaacguaaacguaggaaaauccacaacaaacauuaugaucaccaccauaauaaucguaauaauagucauauuacuacuccucauagcaguaggacuauuccuauacuguaaagcuagauaaggacuaguggaagcauuuuccuggcugauuaaaagaaauuacucagcuauggucaucuguuccuguuagaaggcuaugcagcauauuauauacuaugcgcauguuaugaaaugcauaauaaaaaauuuuaaaaaaucuaaaagaucuaaaaaaaaaaaaaaaaaaaaaaaaaaaaaaaaaaaaaaaaaaaaaaaaaaaaaaaaaaaaaaaaugcaucccccccccccccccccccccccccccccccaaaggcucuuuucagagccaccagaauu

SEQ ID NO: 18167 - RNA, 1994 nt, Artificial Sequence
  mRNA product Design d-5 comprising derived and/or modified sequence from HRSV(Memphis-37)__AIY60640.1__F-del_DSCav1_mut6 (opt11)
gggagagggcgcuuggcuugcaaggacccugagcugcggcauugaagcacacccaacccaacucgacugaagucagccucacugaaccggaucugagaaucuucucucucugggcuugccagggcucuccgaaccuagcuagcauccucuucaauuccaacuagaaagcuuaccauggaauuaccaauccucaaaacuaacgccaucaccaccauccucgcugccgucacccucugcuucgccuccagccaaaacaucacagaagaguucuaccaaagcacaugcuccgcugucuccaaaggcuaccuuggcgcccuccgcaccggcugguacaccucaguaauuaccauugaacuaagcaacaucaaagaaaauaaaugcaacggcaccgacgccaaaguuaaacucauaaaacaggaacucgacaaauacaaaaacgccguaacagaccuccaaaugcucaugugcuccacccccgccgccggcucaggcuccgccaucgcaagcggaauagcaguuugcaaaguccuccaccuagaaggcgaggucaacaagauuaaaaacgcacuucucucaaccaacaaggccgucguaucacucucaaacggcgucuccguccucaccuucaaaguucuggaccucaaaaacuacaucgauaaacaacuacucccaauacuuaacaaacaaucaugcuccaucccaaaccccgaaaccgucauggaguuccaacagaaaaacaaccgccuacuggaaaucacacgcgaguucagcguaaacgcuggcgucacuacacccgucuccaccuacaugcucaccaauucugaacuccuaucacucauaaacgacaugcccauuaccaacgaccaaaagaaacuaaugucaaacaacguccaaaucguaagacaacaaucguauuccaucaugugcauaauuaaagaagaaguucucgccuacgugguccaacuaccccucuacggagucauagacacuccuuguuggaaacuccacaccucuccccucugcacuaccaacacaaaagaaggcuccaacaucugccucacccgaaccgacagaggcugguacugcgacaacgccggcuccgucuccuucuucccccaagccgaaaccugcaaagucugcuccaaccgcguuuucugcgacaccaugaacucccucacacuccccuccgaagucaaccuauguaacauagacauauucaacccaaaauacgacugcaaaaucaugacauccaaaaccgacgugucuuccucggucaucaccucccucggcgccaucgucucaugcuacggcaaaacuaaaugcaccgcauccaacaaaaacaaaggcauaaucaaaacauucuccaacggcugcgacuacguuucuaacaaaggcgucgauaccgucuccgucggaaacacccucuacuacguaaacaagcaagaaggccagucccuauacguaaaaggagaaccaauuaucaacuucuacgacccccuagucuuccccuccgacgaguucgacgccuccauaucccaagucaacgagaaaaucaaccaaucccuagccuucauccgcaaaucagacgaacuccuccacaacgucaacgucggaaaauccacaacuaacaucaugaucaccaccaucauuaucgucaucauaguuauacuccuccuccucauagccgucggccucuuccuauacugcaaagcucgcuaaggacuaguggaagcauuuuccuggcugauuaaaagaaauuacucagcuauggucaucuguuccuguuagaaggcuaugcagcauauuauauacuaugcgcauguuaugaaaugcauaauaaaaaauuuuaaaaaaucuaaaagaucuaaaaaaaaaaaaaaaaaaaaaaaaaaaaaaaaaaaaaaaaaaaaaaaaaaaaaaaaaaaaaaaaugcaucccccccccccccccccccccccccccccccaaaggcucuuuucagagccaccagaauu

SEQ ID NO: 18168 - RNA, 1874 nt, Artificial Sequence
  mRNA product Design e-1 comprising derived and/or modified sequence from HRSV(Memphis-37)__AIY60640.1__F-del_DSCav1_mut6 (opt1)
gggagaauauaagcguuggcggagcgucgguuguagcacucugcgcgcccgcucuucugcugcuguuugucuacuuccuccugcuuccccgccgccgccgccgccaucaagcuuaccauggagcugcccauccucaagaccaacgccaucaccacgauccuggccgcggugacccugugcuucgccagcucccagaacaucaccgaggaguucuaccagagcacgugcuccgccgucagcaagggcuaccucggcgcccugcgcaccgggugguacaccagcgugaucaccaucgagcuguccaacaucaaggagaacaagugcaacggcaccgacgccaaggugaagcucaucaagcaggagcuggacaaguacaagaacgcggucacggaccugcagaugcugaugugcagcaccccggccgccggcuccgggagcgcgaucgccuccggcaucgccgucugcaaggugcugcaccucgagggcgaggugaacaagaucaagaacgcccugcuguccaccaacaaggccgucgugagccucuccaacggggugagcguccugaccuucaaggugcuggaccucaagaacuacaucgacaagcagcugcugcccauccugaacaagcagagcugcuccauccccaaccccgagaccgucauggaguuccagcagaagaacaaccgccuccuggagaucacgcgggaguucagcgugaacgcgggcgugaccacccccgucuccaccuacaugcugacgaacagcgagcuccugucccugaucaacgacaugccgaucaccaacgaccagaagaagcucaugagcaacaacgugcagaucgugcgccagcaguccuacagcaucaugugcaucaucaaggaggagguccuggccuacguggugcagcugccccucuacggggucaucgacacccccugcuggaagcugcacaccagcccccugugcacgaccaacaccaaggagggcuccaacaucugccucacccggacggaccgcgggugguacugcgacaacgccggcagcguguccuucuucccgcaggccgagaccugcaaggucugcagcaaccggguguucugcgacaccaugaacucccugacccugcccagcgaggugaaccucugcaacaucgacaucuucaaccccaaguacgacugcaagaucaugacguccaagaccgacgucagcuccagcgugaucaccucccugggcgccaucgugagcugcuacgggaagaccaagugcacggcgagcaacaagaacaagggcaucaucaagaccuucuccaacgggugcgacuacgucagcaacaagggcguggacaccguguccgucggcaacacccuguacuacgugaacaagcaggagggccagagccucuacgugaagggggagcccaucaucaacuucuacgacccgcuggucuuccccuccgacgaguucgacgccagcaucucccaggugaacgagaagaucaaccagagccuggccuucauccggaaguccgacgagcuccugcacaacgugaacgucggcaagagcaccacgaacaucaugaucaccaccaucaucaucgugaucaucgugauccugcugcuccugaucgccgucgggcuguuccucuacugcaaggcccgcugaggacuaguguccaccugucccuccugggcugcuggauugucucguuuuccugccaaauaaacaggaucagcgcuuuacagaucuaaaaaaaaaaaaaaaaaaaaaaaaaaaaaaaaaaaaaaaaaaaaaaaaaaaaaaaaaaaaaaaaugcaucccccccccccccccccccccccccccccccaaaggcucuuuucagagccaccagaauu

SEQ ID NO: 18169 - RNA, 1874 nt, Artificial Sequence
  mRNA product Design e-1 comprising derived and/or modified sequence from HRSV(Memphis-37)__AIY60640.1__F-del_DSCav1_mut6 (opt1)
gggagaauauaagcguuggcggagcgucgguuguagcacucugcgcgcccgcucuucugcugcuguuugucuacuuccuccugcuuccccgccgccgccgccgccaucaagcuuaccauggagcugcccauccucaagaccaacgccaucaccacgauccuggccgcggugacccugugcuucgccagcucccagaacaucaccgaggaguucuaccagagcacgugcuccgccgucagcaagggcuaccucggggcccugcgcaccggcugguacaccuccgugaucaccaucgagcugagcaacaucaaggagaacaagugcaacgggaccgacgccaaggugaagcucaucaagcaggagcuggacaaguacaagaacgcggucacggaccugcagaugcucaugugcuccaccccggccgccggcagcggguccgccaucgcgagcggcaucgccgugugcaaggugcugcaccuggagggcgaggucaacaagaucaagaacgcccuccuguccaccaacaaggccguggugagccuguccaacggggucagcgugcucaccuucaaggugcuggaccugaagaacuacaucgacaagcagcuccugcccauccugaacaagcaguccugcagcauccccaaccccgagacggucauggaguuccagcagaagaacaaccggcuccuggagaucacccgcgaguucuccgugaacgccggcgugaccaccccggucagcacguacaugcugaccaacuccgagcuccugagccugaucaacgacaugcccaucaccaacgaccagaagaagcucaugagcaacaacgugcagaucgugcggcagcaguccuacagcaucaugugcaucaucaaggaggagguccuggcguacguggugcagcugccccucuacggggucaucgacacccccugcuggaagcugcacacguccccgcugugcaccaccaacaccaaggagggcagcaacaucugccucacgcgcaccgaccgggggugguacugcgacaacgccggcuccgugagcuucuucccccaggccgagaccugcaaggugugcuccaaccgcgucuucugcgacaccaugaacagccugacgcugcccuccgaggugaaccucugcaacaucgacaucuucaaccccaaguacgacugcaagaucaugaccagcaagaccgacgucuccagcuccgugaucaccagccugggcgccaucguguccugcuacgggaagacgaagugcaccgccagcaacaagaacaagggcaucaucaagaccuucuccaacgggugcgacuacgucagcaacaagggcguggacaccguguccgucggcaacacgcuguacuacgugaacaagcaggaggggcagagccucuacgugaagggcgagccgaucaucaacuucuacgacccccuggucuuccccagcgacgaguucgacgcguccaucagccaggugaacgagaagaucaaccagucccuggccuucauccgcaagagcgacgagcuccugcacaacgugaacgucgggaaguccaccaccaacaucaugaucaccaccaucaucaucgugaucaucgugauccugcuccugcugaucgccgucggccucuuccuguacugcaaggcccggugaggacuaguguccaccugucccuccugggcugcuggauugucucguuuuccugccaaauaaacaggaucagcgcuuuacagaucuaaaaaaaaaaaaaaaaaaaaaaaaaaaaaaaaaaaaaaaaaaaaaaaaaaaaaaaaaaaaaaaaugcaucccccccccccccccccccccccccccccccaaaggcucuuuucagagccaccagaauu

SEQ ID NO: 18170 - RNA, 1874 nt, Artificial Sequence
  mRNA product Design e-1 comprising derived and/or modified sequence from HRSV(Memphis-37)__AIY60640.1__F-del_DSCav1_mut6 (opt2)
gggagaauauaagcguuggcggagcgucgguuguagcacucugcgcgcccgcucuucugcugcuguuugucuacuuccuccugcuuccccgccgccgccgccgccaucaagcuuaccauggagcuccccauccucaagaccaacgccaucaccaccauccucgccgccgucacccucugcuucgccuccucccagaacaucaccgaggaguucuaccaguccaccugcuccgccgucuccaagggcuaccucggcgcccuccgcaccggcugguacaccuccgucaucaccaucgagcucuccaacaucaaggagaacaagugcaacggcaccgacgccaaggucaagcucaucaagcaggagcucgacaaguacaagaacgccgucaccgaccuccagaugcucaugugcuccacccccgccgccggcuccggcuccgccaucgccuccggcaucgccgucugcaagguccuccaccucgagggcgaggucaacaagaucaagaacgcccuccucuccaccaacaaggccgucgucucccucuccaacggcgucuccguccucaccuucaagguccucgaccucaagaacuacaucgacaagcagcuccuccccauccucaacaagcaguccugcuccauccccaaccccgagaccgucauggaguuccagcagaagaacaaccgccuccucgagaucacccgcgaguucuccgucaacgccggcgucaccacccccgucuccaccuacaugcucaccaacuccgagcuccucucccucaucaacgacaugcccaucaccaacgaccagaagaagcucauguccaacaacguccagaucguccgccagcaguccuacuccaucaugugcaucaucaaggaggagguccucgccuacgucguccagcucccccucuacggcgucaucgacacccccugcuggaagcuccacaccuccccccucugcaccaccaacaccaaggagggcuccaacaucugccucacccgcaccgaccgcggcugguacugcgacaacgccggcuccgucuccuucuucccccaggccgagaccugcaaggucugcuccaaccgcgucuucugcgacaccaugaacucccucacccuccccuccgaggucaaccucugcaacaucgacaucuucaaccccaaguacgacugcaagaucaugaccuccaagaccgacgucuccuccuccgucaucaccucccucggcgccaucgucuccugcuacggcaagaccaagugcaccgccuccaacaagaacaagggcaucaucaagaccuucuccaacggcugcgacuacgucuccaacaagggcgucgacaccgucuccgucggcaacacccucuacuacgucaacaagcaggagggccagucccucuacgucaagggcgagcccaucaucaacuucuacgacccccucgucuuccccuccgacgaguucgacgccuccaucucccaggucaacgagaagaucaaccagucccucgccuucauccgcaaguccgacgagcuccuccacaacgucaacgucggcaaguccaccaccaacaucaugaucaccaccaucaucaucgucaucaucgucauccuccuccuccucaucgccgucggccucuuccucuacugcaaggcccgcugaggacuaguguccaccugucccuccugggcugcuggauugucucguuuuccugccaaauaaacaggaucagcgcuuuacagaucuaaaaaaaaaaaaaaaaaaaaaaaaaaaaaaaaaaaaaaaaaaaaaaaaaaaaaaaaaaaaaaaaugcaucccccccccccccccccccccccccccccccaaaggcucuuuucagagccaccagaauu

SEQ ID NO: 18171 - RNA, 1874 nt, Artificial Sequence
  mRNA product Design e-1 comprising derived and/or modified sequence from HRSV(Memphis-37)__AIY60640.1__F-del_DSCav1_mut6 (opt3)
gggagaauauaagcguuggcggagcgucgguuguagcacucugcgcgcccgcucuucugcugcuguuugucuacuuccuccugcuuccccgccgccgccgccgccaucaagcuuaccauggagcugcccauccucaagaccaacgccauuacaacuauacuugcugcagugacgcugugcuucgccagcucccagaauaucaccgaagaguuuuaccaaucuacauguucagcggucaguaaaggcuauuugggggcuuuaagaacuggaugguacaccagcguuauuacaaucgaacuguccaacauuaaggagaauaaaugcaacgguaccgacgccaaggugaaacuaaucaagcaggaacucgauaaguauaaaaaugcaguaacugaccugcagaugcuuauguguucuacuccugccgcuggcucggggucagcaauagccagcggaaucgcugugugcaagguccugcacuuggagggcgaggugaacaaaauuaagaaugcccuccugaguaccaacaaagcgguugugucccugucuaauggugucagcgugcucacguucaagguauuagaucugaagaacuacaucgacaaacagcuuuugccaauucugaauaagcaauccuguucaaucccgaaccccgaaacuguuauggaguuucagcagaaaaauaacaggcuacucgaaauaacccgggaguucagugugaaugcaggggucacaacuccugugagcaccuauaugcugacaaacucugagcuucuguccuugauuaacgauaugccaaucaccaaugaccagaagaaacucaugucaaacaaugugcaaauuguccgccagcagagcuacaguaucaugugcaucauuaaggaagagguucuggccuaugugguacaguuaccccuguacggagugauagauacgccuuguuggaaacuccauacuucuccacuuugcacaaccaacacuaaggaaggcuccaauaucugucugacacgaaccgaccguggcugguacugcgauaacgcugggagcgucucguuuuucccccaagccgagacguguaaggugugcucuaauagaguuuucugcgacaccaugaacuccuugacacuaccuucagaagugaaucuguguaacauugauaucuucaauccaaaauaugacugcaagauaaugacaaguaaaaccgaugucagcuccucugugauuacaagccucggagcaaucguaucauguuacgguaagacuaaaugcaccgcuaguaacaagaauaagggcaucauuaaaacauuuuccaacgggugugacuauguuagcaauaagggaguggacaccgucucugugggcaacacucuguacuaugucaacaaacaggagggucagucacuuuacgugaagggggagccgaucauuaauuucuaugauccccugguuuuuccuagugacgaauuugaugccagcauaucccaagugaacgagaaaaucaaucagucuuuggcguuuauuaggaagucggacgaacuccugcacaacguaaaugucggaaagagcacgacaaacaucaugaucaccacuauuauaaucgugauuaucguuauuuuacugcuacucaucgccgugggccuguuccuuuacugcaaagcacggugaggacuaguguccaccugucccuccugggcugcuggauugucucguuuuccugccaaauaaacaggaucagcgcuuuacagaucuaaaaaaaaaaaaaaaaaaaaaaaaaaaaaaaaaaaaaaaaaaaaaaaaaaaaaaaaaaaaaaaaugcaucccccccccccccccccccccccccccccccaaaggcucuuuucagagccaccagaauu

SEQ ID NO: 18172 - RNA, 1874 nt, Artificial Sequence
  mRNA product Design e-1 comprising derived and/or modified sequence from HRSV(Memphis-37)__AIY60640.1__F-del_DSCav1_mut6 (opt4)
gggagaauauaagcguuggcggagcgucgguuguagcacucugcgcgcccgcucuucugcugcuguuugucuacuuccuccugcuuccccgccgccgccgccgccaucaagcuuaccauggagcugcccauccugaagaccaacgccaucaccaccauccuggccgccgugacccugugcuucgccagcagccagaacaucaccgaggaguucuaccagagcaccugcagcgccgugagcaagggcuaccugggcgcccugagaaccggcugguacaccagcgugaucaccaucgagcugagcaacaucaaggagaacaagugcaacggcaccgacgccaaggugaagcugaucaagcaggagcuggacaaguacaagaacgccgugaccgaccugcagaugcugaugugcagcacccccgccgccggcagcggcagcgccaucgccagcggcaucgccgugugcaaggugcugcaccuggagggcgaggugaacaagaucaagaacgcccugcugagcaccaacaaggccguggugagccugagcaacggcgugagcgugcugaccuucaaggugcuggaccugaagaacuacaucgacaagcagcugcugcccauccugaacaagcagagcugcagcauccccaaccccgagaccgugauggaguuccagcagaagaacaacagacugcuggagaucaccagagaguucagcgugaacgccggcgugaccacccccgugagcaccuacaugcugaccaacagcgagcugcugagccugaucaacgacaugcccaucaccaacgaccagaagaagcugaugagcaacaacgugcagaucgugagacagcagagcuacagcaucaugugcaucaucaaggaggaggugcuggccuacguggugcagcugccccuguacggcgugaucgacacccccugcuggaagcugcacaccagcccccugugcaccaccaacaccaaggagggcagcaacaucugccugaccagaaccgacagaggcugguacugcgacaacgccggcagcgugagcuucuucccccaggccgagaccugcaaggugugcagcaacagaguguucugcgacaccaugaacagccugacccugcccagcgaggugaaccugugcaacaucgacaucuucaaccccaaguacgacugcaagaucaugaccagcaagaccgacgugagcagcagcgugaucaccagccugggcgccaucgugagcugcuacggcaagaccaagugcaccgccagcaacaagaacaagggcaucaucaagaccuucagcaacggcugcgacuacgugagcaacaagggcguggacaccgugagcgugggcaacacccuguacuacgugaacaagcaggagggccagagccuguacgugaagggcgagcccaucaucaacuucuacgacccccugguguuccccagcgacgaguucgacgccagcaucagccaggugaacgagaagaucaaccagagccuggccuucaucagaaagagcgacgagcugcugcacaacgugaacgugggcaagagcaccaccaacaucaugaucaccaccaucaucaucgugaucaucgugauccugcugcugcugaucgccgugggccuguuccuguacugcaaggccagaugaggacuaguguccaccugucccuccugggcugcuggauugucucguuuuccugccaaauaaacaggaucagcgcuuuacagaucuaaaaaaaaaaaaaaaaaaaaaaaaaaaaaaaaaaaaaaaaaaaaaaaaaaaaaaaaaaaaaaaaugcaucccccccccccccccccccccccccccccccaaaggcucuuuucagagccaccagaauu

SEQ ID NO: 18173 - RNA, 1874 nt, Artificial Sequence
  mRNA product Design e-1 comprising derived and/or modified sequence from HRSV(Memphis-37)__AIY60640.1__F-del_DSCav1_mut6 (opt5)
gggagaauauaagcguuggcggagcgucgguuguagcacucugcgcgcccgcucuucugcugcuguuugucuacuuccuccugcuuccccgccgccgccgccgccaucaagcuuaccauggagcugcccauccucaagaccaacgccauuacaacgauccuggcugccgugacccuuugcuucgcgagcucccagaauauuacagaagaguuuuaccaaucuaccuguagcgcugucuccaaaggcuaucugggggcccucagaacaggaugguacaccucuguuaucacaauugaacugagcaacaucaaggagaauaaaugcaacggcaccgacgccaaggugaaacuuaucaagcaggaacuggauaaguauaaaaaugcugugacggaccuccagaugcugauguguuccaccccugccgcugggucuggaagcgccauugcguccggcaucgccgucugcaaggugcugcaccucgagggggagguuaacaaaauuaagaaugcucugcuuagcacaaacaaagccguggucucucuguccaauggagugagcguucucaccuucaaggugcuggaucuuaagaacuacaucgacaaacagcugcucccgauucugaauaagcaaucuuguuccauccccaacccugaaacagucauggaguuucagcagaaaaauaaccggcugcucgaaauuacccgcgaguucagcgugaaugcuggcgugacgacacccgucucuaccuauaugcugacaaacuccgagcuucugagccucaucaacgauaugccuaucaccaaugaccagaagaaacugauguccaacaauguucaaauugugagacagcagucuuacagcaucaugugcauuaucaaggaagaggugcuugccuaugucgugcagcugccccucuacggcguuauugauaccccuuguuggaaacugcauacauccccgcugugcacgaccaacacaaaggaagggagcaauaucugucucacccggacagaccgcggaugguacugcgauaacgcgggcucuguguccuuuuucccccaagccgagaccuguaaggucugcagcaauagaguguuuugcgacacgaugaacucucugacacuuccuagcgaaguuaaucuguguaacaucgauauuuucaaucccaaauaugacugcaagaucaugaccuccaaaaccgaugugucuagcuccgucauuacaagccucggggcuaucgugucuuguuacggaaagaccaaaugcacagccuccaacaagaauaagggcauuaucaaaacguuuagcaacgggugugacuaugucucuaauaagggaguggacaccguuuccgugggcaacacacuguacuaugucaacaaacaggagggccagagccuuuacgugaagggggagccuaucauuaauuucuaugauccccugguuuuuccguccgacgaauuugaugcuucuaucagccaagugaacgagaaaauuaaucagucccucgccuucauccggaagucugacgaacugcugcacaacgucaaugugggaaagagcaccacaaacauuaugaucaccacgauuaucaucgugauuaucguuauucuccugcuucugaucgccgucggccucuuccuguacugcaaagcucgcugaggacuaguguccaccugucccuccugggcugcuggauugucucguuuuccugccaaauaaacaggaucagcgcuuuacagaucuaaaaaaaaaaaaaaaaaaaaaaaaaaaaaaaaaaaaaaaaaaaaaaaaaaaaaaaaaaaaaaaaugcaucccccccccccccccccccccccccccccccaaaggcucuuuucagagccaccagaauu

SEQ ID NO: 18174 - RNA, 1874 nt, Artificial Sequence
  mRNA product Design e-1 comprising derived and/or modified sequence from HRSV(Memphis-37)__AIY60640.1__F-del_DSCav1_mut6 (opt6)
gggagaauauaagcguuggcggagcgucgguuguagcacucugcgcgcccgcucuucugcugcuguuugucuacuuccuccugcuuccccgccgccgccgccgccaucaagcuuaccauggaacuaccuauacuaaaaaccaacgccauaacaacaauacuagccgcaguuacacucugcuuugcauccucacaaaacaucacagaggaauuuuaccaaucuacuugcuccgcaguaucaaaaggauaccuaggagcacuccguacaggaugguacacaucagucauaacaauugaauuaucuaacaucaaagaaaacaaauguaaugguacagacgccaaaguaaaauuaauaaaacaagaacuagacaaauacaaaaacgccguaacagaccuacaaaugcuaaugugcucaacccccgccgcaggaucuggaucagcaauugccucaggcauagcaguaugcaaaguccuacaccuagaaggagaagucaacaaaauaaaaaacgcucuccucucaaccaauaaagcaguaguaucccucucaaacggaguaucaguacuaacauucaaaguacuagaccucaaaaauuauauagacaagcaacuacucccaauauuaaauaaacaauccugcucaauacccaauccagaaacagucauggaauuucaacaaaaaaacaaccgacucuuagaaauaacaagagaauuuucagucaaugccggcgucacaaccccaguaucaacauacaugcuaacaaacucagaacuacuaucacuaaucaacgauaugcccauaaccaacgaccaaaaaaaacuaaugucaaacaauguacaaauuguaagacaacagucuuauucaauaaugugcauaauaaaagaagaagucuuagcauauguaguacaacuaccacuauacggaguaauagacacaccauguuggaaauuacacacauccccacuauguaccaccaacacaaaagaaggaucuaacauaugccuaaccagaacagaccgaggcugguauugcgacaaugcaggaucaguauccuucuuuccacaagcagaaacaugcaaagucugcucuaacagaguauucugcgauacuaugaacucacuuaccuuaccaucagaaguaaaucuauguaauaucgacauauucaaucccaaauaugauugcaaaauaaugaccucaaaaacagauguaucaucaucagucauaacaucacuaggagcaauagucagcugcuaugggaaaacaaaaugcacagcuuccaacaaaaacaaaggaaucauaaaaacauucucaaaugguugugacuacguauccaacaaaggaguagauacaguaucuguaggcaacacauuauacuauguaaauaaacaagaaggacaaagccuauacgucaaaggagaacccaucauaaauuucuaugacccauuaguuuucccaucugacgaauuugacgcuuccaucucccaaguaaaugaaaaaaucaaccaaagccucgcauucauucgcaaaucugacgaauuacuccacaacguaaacguaggaaaauccacaacaaacauuaugaucaccaccauaauaaucguaauaauagucauauuacuacuccucauagcaguaggacuauuccuauacuguaaagcuagauaaggacuaguguccaccugucccuccugggcugcuggauugucucguuuuccugccaaauaaacaggaucagcgcuuuacagaucuaaaaaaaaaaaaaaaaaaaaaaaaaaaaaaaaaaaaaaaaaaaaaaaaaaaaaaaaaaaaaaaaugcaucccccccccccccccccccccccccccccccaaaggcucuuuucagagccaccagaauu

SEQ ID NO: 18175 - RNA, 1874 nt, Artificial Sequence
  mRNA product Design e-1 comprising derived and/or modified sequence from HRSV(Memphis-37)__AIY60640.1__F-del_DSCav1_mut6 (opt11)
gggagaauauaagcguuggcggagcgucgguuguagcacucugcgcgcccgcucuucugcugcuguuugucuacuuccuccugcuuccccgccgccgccgccgccaucaagcuuaccauggaauuaccaauccucaaaacuaacgccaucaccaccauccucgcugccgucacccucugcuucgccuccagccaaaacaucacagaagaguucuaccaaagcacaugcuccgcugucuccaaaggcuaccuuggcgcccuccgcaccggcugguacaccucaguaauuaccauugaacuaagcaacaucaaagaaaauaaaugcaacggcaccgacgccaaaguuaaacucauaaaacaggaacucgacaaauacaaaaacgccguaacagaccuccaaaugcucaugugcuccacccccgccgccggcucaggcuccgccaucgcaagcggaauagcaguuugcaaaguccuccaccuagaaggcgaggucaacaagauuaaaaacgcacuucucucaaccaacaaggccgucguaucacucucaaacggcgucuccguccucaccuucaaaguucuggaccucaaaaacuacaucgauaaacaacuacucccaauacuuaacaaacaaucaugcuccaucccaaaccccgaaaccgucauggaguuccaacagaaaaacaaccgccuacuggaaaucacacgcgaguucagcguaaacgcuggcgucacuacacccgucuccaccuacaugcucaccaauucugaacuccuaucacucauaaacgacaugcccauuaccaacgaccaaaagaaacuaaugucaaacaacguccaaaucguaagacaacaaucguauuccaucaugugcauaauuaaagaagaaguucucgccuacgugguccaacuaccccucuacggagucauagacacuccuuguuggaaacuccacaccucuccccucugcacuaccaacacaaaagaaggcuccaacaucugccucacccgaaccgacagaggcugguacugcgacaacgccggcuccgucuccuucuucccccaagccgaaaccugcaaagucugcuccaaccgcguuuucugcgacaccaugaacucccucacacuccccuccgaagucaaccuauguaacauagacauauucaacccaaaauacgacugcaaaaucaugacauccaaaaccgacgugucuuccucggucaucaccucccucggcgccaucgucucaugcuacggcaaaacuaaaugcaccgcauccaacaaaaacaaaggcauaaucaaaacauucuccaacggcugcgacuacguuucuaacaaaggcgucgauaccgucuccgucggaaacacccucuacuacguaaacaagcaagaaggccagucccuauacguaaaaggagaaccaauuaucaacuucuacgacccccuagucuuccccuccgacgaguucgacgccuccauaucccaagucaacgagaaaaucaaccaaucccuagccuucauccgcaaaucagacgaacuccuccacaacgucaacgucggaaaauccacaacuaacaucaugaucaccaccaucauuaucgucaucauaguuauacuccuccuccucauagccgucggccucuuccuauacugcaaagcucgcuaaggacuaguguccaccugucccuccugggcugcuggauugucucguuuuccugccaaauaaacaggaucagcgcuuuacagaucuaaaaaaaaaaaaaaaaaaaaaaaaaaaaaaaaaaaaaaaaaaaaaaaaaaaaaaaaaaaaaaaaugcaucccccccccccccccccccccccccccccccaaaggcucuuuucagagccaccagaauu

SEQ ID NO: 18176 - RNA, 1856 nt, Artificial Sequence
  mRNA product Design e-2 comprising derived and/or modified sequence from HRSV(Memphis-37)__AIY60640.1__F-del_DSCav1_mut6 (opt1)
gggagacccgugacccggaaguuguacggcuacgcgacuuucccucccacaaacccucgcgcccuuccuuuccuacuugggcccggcagaaagcuuaccauggagcugcccauccucaagaccaacgccaucaccacgauccuggccgcggugacccugugcuucgccagcucccagaacaucaccgaggaguucuaccagagcacgugcuccgccgucagcaagggcuaccucggcgcccugcgcaccgggugguacaccagcgugaucaccaucgagcuguccaacaucaaggagaacaagugcaacggcaccgacgccaaggugaagcucaucaagcaggagcuggacaaguacaagaacgcggucacggaccugcagaugcugaugugcagcaccccggccgccggcuccgggagcgcgaucgccuccggcaucgccgucugcaaggugcugcaccucgagggcgaggugaacaagaucaagaacgcccugcuguccaccaacaaggccgucgugagccucuccaacggggugagcguccugaccuucaaggugcuggaccucaagaacuacaucgacaagcagcugcugcccauccugaacaagcagagcugcuccauccccaaccccgagaccgucauggaguuccagcagaagaacaaccgccuccuggagaucacgcgggaguucagcgugaacgcgggcgugaccacccccgucuccaccuacaugcugacgaacagcgagcuccugucccugaucaacgacaugccgaucaccaacgaccagaagaagcucaugagcaacaacgugcagaucgugcgccagcaguccuacagcaucaugugcaucaucaaggaggagguccuggccuacguggugcagcugccccucuacggggucaucgacacccccugcuggaagcugcacaccagcccccugugcacgaccaacaccaaggagggcuccaacaucugccucacccggacggaccgcgggugguacugcgacaacgccggcagcguguccuucuucccgcaggccgagaccugcaaggucugcagcaaccggguguucugcgacaccaugaacucccugacccugcccagcgaggugaaccucugcaacaucgacaucuucaaccccaaguacgacugcaagaucaugacguccaagaccgacgucagcuccagcgugaucaccucccugggcgccaucgugagcugcuacgggaagaccaagugcacggcgagcaacaagaacaagggcaucaucaagaccuucuccaacgggugcgacuacgucagcaacaagggcguggacaccguguccgucggcaacacccuguacuacgugaacaagcaggagggccagagccucuacgugaagggggagcccaucaucaacuucuacgacccgcuggucuuccccuccgacgaguucgacgccagcaucucccaggugaacgagaagaucaaccagagccuggccuucauccggaaguccgacgagcuccugcacaacgugaacgucggcaagagcaccacgaacaucaugaucaccaccaucaucaucgugaucaucgugauccugcugcuccugaucgccgucgggcuguuccucuacugcaaggcccgcugaggacuaguguccaccugucccuccugggcugcuggauugucucguuuuccugccaaauaaacaggaucagcgcuuuacagaucuaaaaaaaaaaaaaaaaaaaaaaaaaaaaaaaaaaaaaaaaaaaaaaaaaaaaaaaaaaaaaaaaugcaucccccccccccccccccccccccccccccccaaaggcucuuuucagagccaccagaauu

SEQ ID NO: 18177 - RNA, 1856 nt, Artificial Sequence
  mRNA product Design e-2 comprising derived and/or modified sequence from HRSV(Memphis-37)__AIY60640.1__F-del_DSCav1_mut6 (opt1)
gggagacccgugacccggaaguuguacggcuacgcgacuuucccucccacaaacccucgcgcccuuccuuuccuacuugggcccggcagaaagcuuaccauggagcugcccauccucaagaccaacgccaucaccacgauccuggccgcggugacccugugcuucgccagcucccagaacaucaccgaggaguucuaccagagcacgugcuccgccgucagcaagggcuaccucggggcccugcgcaccggcugguacaccuccgugaucaccaucgagcugagcaacaucaaggagaacaagugcaacgggaccgacgccaaggugaagcucaucaagcaggagcuggacaaguacaagaacgcggucacggaccugcagaugcucaugugcuccaccccggccgccggcagcggguccgccaucgcgagcggcaucgccgugugcaaggugcugcaccuggagggcgaggucaacaagaucaagaacgcccuccuguccaccaacaaggccguggugagccuguccaacggggucagcgugcucaccuucaaggugcuggaccugaagaacuacaucgacaagcagcuccugcccauccugaacaagcaguccugcagcauccccaaccccgagacggucauggaguuccagcagaagaacaaccggcuccuggagaucacccgcgaguucuccgugaacgccggcgugaccaccccggucagcacguacaugcugaccaacuccgagcuccugagccugaucaacgacaugcccaucaccaacgaccagaagaagcucaugagcaacaacgugcagaucgugcggcagcaguccuacagcaucaugugcaucaucaaggaggagguccuggcguacguggugcagcugccccucuacggggucaucgacacccccugcuggaagcugcacacguccccgcugugcaccaccaacaccaaggagggcagcaacaucugccucacgcgcaccgaccgggggugguacugcgacaacgccggcuccgugagcuucuucccccaggccgagaccugcaaggugugcuccaaccgcgucuucugcgacaccaugaacagccugacgcugcccuccgaggugaaccucugcaacaucgacaucuucaaccccaaguacgacugcaagaucaugaccagcaagaccgacgucuccagcuccgugaucaccagccugggcgccaucguguccugcuacgggaagacgaagugcaccgccagcaacaagaacaagggcaucaucaagaccuucuccaacgggugcgacuacgucagcaacaagggcguggacaccguguccgucggcaacacgcuguacuacgugaacaagcaggaggggcagagccucuacgugaagggcgagccgaucaucaacuucuacgacccccuggucuuccccagcgacgaguucgacgcguccaucagccaggugaacgagaagaucaaccagucccuggccuucauccgcaagagcgacgagcuccugcacaacgugaacgucgggaaguccaccaccaacaucaugaucaccaccaucaucaucgugaucaucgugauccugcuccugcugaucgccgucggccucuuccuguacugcaaggcccggugaggacuaguguccaccugucccuccugggcugcuggauugucucguuuuccugccaaauaaacaggaucagcgcuuuacagaucuaaaaaaaaaaaaaaaaaaaaaaaaaaaaaaaaaaaaaaaaaaaaaaaaaaaaaaaaaaaaaaaaugcaucccccccccccccccccccccccccccccccaaaggcucuuuucagagccaccagaauu

SEQ ID NO: 18178 - RNA, 1856 nt, Artificial Sequence
  mRNA product Design e-2 comprising derived and/or modified sequence from HRSV(Memphis-37)__AIY60640.1__F-del_DSCav1_mut6 (opt2)
gggagacccgugacccggaaguuguacggcuacgcgacuuucccucccacaaacccucgcgcccuuccuuuccuacuugggcccggcagaaagcuuaccauggagcuccccauccucaagaccaacgccaucaccaccauccucgccgccgucacccucugcuucgccuccucccagaacaucaccgaggaguucuaccaguccaccugcuccgccgucuccaagggcuaccucggcgcccuccgcaccggcugguacaccuccgucaucaccaucgagcucuccaacaucaaggagaacaagugcaacggcaccgacgccaaggucaagcucaucaagcaggagcucgacaaguacaagaacgccgucaccgaccuccagaugcucaugugcuccacccccgccgccggcuccggcuccgccaucgccuccggcaucgccgucugcaagguccuccaccucgagggcgaggucaacaagaucaagaacgcccuccucuccaccaacaaggccgucgucucccucuccaacggcgucuccguccucaccuucaagguccucgaccucaagaacuacaucgacaagcagcuccuccccauccucaacaagcaguccugcuccauccccaaccccgagaccgucauggaguuccagcagaagaacaaccgccuccucgagaucacccgcgaguucuccgucaacgccggcgucaccacccccgucuccaccuacaugcucaccaacuccgagcuccucucccucaucaacgacaugcccaucaccaacgaccagaagaagcucauguccaacaacguccagaucguccgccagcaguccuacuccaucaugugcaucaucaaggaggagguccucgccuacgucguccagcucccccucuacggcgucaucgacacccccugcuggaagcuccacaccuccccccucugcaccaccaacaccaaggagggcuccaacaucugccucacccgcaccgaccgcggcugguacugcgacaacgccggcuccgucuccuucuucccccaggccgagaccugcaaggucugcuccaaccgcgucuucugcgacaccaugaacucccucacccuccccuccgaggucaaccucugcaacaucgacaucuucaaccccaaguacgacugcaagaucaugaccuccaagaccgacgucuccuccuccgucaucaccucccucggcgccaucgucuccugcuacggcaagaccaagugcaccgccuccaacaagaacaagggcaucaucaagaccuucuccaacggcugcgacuacgucuccaacaagggcgucgacaccgucuccgucggcaacacccucuacuacgucaacaagcaggagggccagucccucuacgucaagggcgagcccaucaucaacuucuacgacccccucgucuuccccuccgacgaguucgacgccuccaucucccaggucaacgagaagaucaaccagucccucgccuucauccgcaaguccgacgagcuccuccacaacgucaacgucggcaaguccaccaccaacaucaugaucaccaccaucaucaucgucaucaucgucauccuccuccuccucaucgccgucggccucuuccucuacugcaaggcccgcugaggacuaguguccaccugucccuccugggcugcuggauugucucguuuuccugccaaauaaacaggaucagcgcuuuacagaucuaaaaaaaaaaaaaaaaaaaaaaaaaaaaaaaaaaaaaaaaaaaaaaaaaaaaaaaaaaaaaaaaugcaucccccccccccccccccccccccccccccccaaaggcucuuuucagagccaccagaauu

SEQ ID NO: 18179 - RNA, 1856 nt, Artificial Sequence
  mRNA product Design e-2 comprising derived and/or modified sequence from HRSV(Memphis-37)__AIY60640.1__F-del_DSCav1_mut6 (opt3)
gggagacccgugacccggaaguuguacggcuacgcgacuuucccucccacaaacccucgcgcccuuccuuuccuacuugggcccggcagaaagcuuaccauggagcugcccauccucaagaccaacgccauuacaacuauacuugcugcagugacgcugugcuucgccagcucccagaauaucaccgaagaguuuuaccaaucuacauguucagcggucaguaaaggcuauuugggggcuuuaagaacuggaugguacaccagcguuauuacaaucgaacuguccaacauuaaggagaauaaaugcaacgguaccgacgccaaggugaaacuaaucaagcaggaacucgauaaguauaaaaaugcaguaacugaccugcagaugcuuauguguucuacuccugccgcuggcucggggucagcaauagccagcggaaucgcugugugcaagguccugcacuuggagggcgaggugaacaaaauuaagaaugcccuccugaguaccaacaaagcgguugugucccugucuaauggugucagcgugcucacguucaagguauuagaucugaagaacuacaucgacaaacagcuuuugccaauucugaauaagcaauccuguucaaucccgaaccccgaaacuguuauggaguuucagcagaaaaauaacaggcuacucgaaauaacccgggaguucagugugaaugcaggggucacaacuccugugagcaccuauaugcugacaaacucugagcuucuguccuugauuaacgauaugccaaucaccaaugaccagaagaaacucaugucaaacaaugugcaaauuguccgccagcagagcuacaguaucaugugcaucauuaaggaagagguucuggccuaugugguacaguuaccccuguacggagugauagauacgccuuguuggaaacuccauacuucuccacuuugcacaaccaacacuaaggaaggcuccaauaucugucugacacgaaccgaccguggcugguacugcgauaacgcugggagcgucucguuuuucccccaagccgagacguguaaggugugcucuaauagaguuuucugcgacaccaugaacuccuugacacuaccuucagaagugaaucuguguaacauugauaucuucaauccaaaauaugacugcaagauaaugacaaguaaaaccgaugucagcuccucugugauuacaagccucggagcaaucguaucauguuacgguaagacuaaaugcaccgcuaguaacaagaauaagggcaucauuaaaacauuuuccaacgggugugacuauguuagcaauaagggaguggacaccgucucugugggcaacacucuguacuaugucaacaaacaggagggucagucacuuuacgugaagggggagccgaucauuaauuucuaugauccccugguuuuuccuagugacgaauuugaugccagcauaucccaagugaacgagaaaaucaaucagucuuuggcguuuauuaggaagucggacgaacuccugcacaacguaaaugucggaaagagcacgacaaacaucaugaucaccacuauuauaaucgugauuaucguuauuuuacugcuacucaucgccgugggccuguuccuuuacugcaaagcacggugaggacuaguguccaccugucccuccugggcugcuggauugucucguuuuccugccaaauaaacaggaucagcgcuuuacagaucuaaaaaaaaaaaaaaaaaaaaaaaaaaaaaaaaaaaaaaaaaaaaaaaaaaaaaaaaaaaaaaaaugcaucccccccccccccccccccccccccccccccaaaggcucuuuucagagccaccagaauu

SEQ ID NO: 18180 - RNA, 1856 nt, Artificial Sequence
  mRNA product Design e-2 comprising derived and/or modified sequence from HRSV(Memphis-37)__AIY60640.1__F-del_DSCav1_mut6 (opt4)
gggagacccgugacccggaaguuguacggcuacgcgacuuucccucccacaaacccucgcgcccuuccuuuccuacuugggcccggcagaaagcuuaccauggagcugcccauccugaagaccaacgccaucaccaccauccuggccgccgugacccugugcuucgccagcagccagaacaucaccgaggaguucuaccagagcaccugcagcgccgugagcaagggcuaccugggcgcccugagaaccggcugguacaccagcgugaucaccaucgagcugagcaacaucaaggagaacaagugcaacggcaccgacgccaaggugaagcugaucaagcaggagcuggacaaguacaagaacgccgugaccgaccugcagaugcugaugugcagcacccccgccgccggcagcggcagcgccaucgccagcggcaucgccgugugcaaggugcugcaccuggagggcgaggugaacaagaucaagaacgcccugcugagcaccaacaaggccguggugagccugagcaacggcgugagcgugcugaccuucaaggugcuggaccugaagaacuacaucgacaagcagcugcugcccauccugaacaagcagagcugcagcauccccaaccccgagaccgugauggaguuccagcagaagaacaacagacugcuggagaucaccagagaguucagcgugaacgccggcgugaccacccccgugagcaccuacaugcugaccaacagcgagcugcugagccugaucaacgacaugcccaucaccaacgaccagaagaagcugaugagcaacaacgugcagaucgugagacagcagagcuacagcaucaugugcaucaucaaggaggaggugcuggccuacguggugcagcugccccuguacggcgugaucgacacccccugcuggaagcugcacaccagcccccugugcaccaccaacaccaaggagggcagcaacaucugccugaccagaaccgacagaggcugguacugcgacaacgccggcagcgugagcuucuucccccaggccgagaccugcaaggugugcagcaacagaguguucugcgacaccaugaacagccugacccugcccagcgaggugaaccugugcaacaucgacaucuucaaccccaaguacgacugcaagaucaugaccagcaagaccgacgugagcagcagcgugaucaccagccugggcgccaucgugagcugcuacggcaagaccaagugcaccgccagcaacaagaacaagggcaucaucaagaccuucagcaacggcugcgacuacgugagcaacaagggcguggacaccgugagcgugggcaacacccuguacuacgugaacaagcaggagggccagagccuguacgugaagggcgagcccaucaucaacuucuacgacccccugguguuccccagcgacgaguucgacgccagcaucagccaggugaacgagaagaucaaccagagccuggccuucaucagaaagagcgacgagcugcugcacaacgugaacgugggcaagagcaccaccaacaucaugaucaccaccaucaucaucgugaucaucgugauccugcugcugcugaucgccgugggccuguuccuguacugcaaggccagaugaggacuaguguccaccugucccuccugggcugcuggauugucucguuuuccugccaaauaaacaggaucagcgcuuuacagaucuaaaaaaaaaaaaaaaaaaaaaaaaaaaaaaaaaaaaaaaaaaaaaaaaaaaaaaaaaaaaaaaaugcaucccccccccccccccccccccccccccccccaaaggcucuuuucagagccaccagaauu

SEQ ID NO: 18181 - RNA, 1856 nt, Artificial Sequence
  mRNA product Design e-2 comprising derived and/or modified sequence from HRSV(Memphis-37)__AIY60640.1__F-del_DSCav1_mut6 (opt5)
gggagacccgugacccggaaguuguacggcuacgcgacuuucccucccacaaacccucgcgcccuuccuuuccuacuugggcccggcagaaagcuuaccauggagcugcccauccucaagaccaacgccauuacaacgauccuggcugccgugacccuuugcuucgcgagcucccagaauauuacagaagaguuuuaccaaucuaccuguagcgcugucuccaaaggcuaucugggggcccucagaacaggaugguacaccucuguuaucacaauugaacugagcaacaucaaggagaauaaaugcaacggcaccgacgccaaggugaaacuuaucaagcaggaacuggauaaguauaaaaaugcugugacggaccuccagaugcugauguguuccaccccugccgcugggucuggaagcgccauugcguccggcaucgccgucugcaaggugcugcaccucgagggggagguuaacaaaauuaagaaugcucugcuuagcacaaacaaagccguggucucucuguccaauggagugagcguucucaccuucaaggugcuggaucuuaagaacuacaucgacaaacagcugcucccgauucugaauaagcaaucuuguuccauccccaacccugaaacagucauggaguuucagcagaaaaauaaccggcugcucgaaauuacccgcgaguucagcgugaaugcuggcgugacgacacccgucucuaccuauaugcugacaaacuccgagcuucugagccucaucaacgauaugccuaucaccaaugaccagaagaaacugauguccaacaauguucaaauugugagacagcagucuuacagcaucaugugcauuaucaaggaagaggugcuugccuaugucgugcagcugccccucuacggcguuauugauaccccuuguuggaaacugcauacauccccgcugugcacgaccaacacaaaggaagggagcaauaucugucucacccggacagaccgcggaugguacugcgauaacgcgggcucuguguccuuuuucccccaagccgagaccuguaaggucugcagcaauagaguguuuugcgacacgaugaacucucugacacuuccuagcgaaguuaaucuguguaacaucgauauuuucaaucccaaauaugacugcaagaucaugaccuccaaaaccgaugugucuagcuccgucauuacaagccucggggcuaucgugucuuguuacggaaagaccaaaugcacagccuccaacaagaauaagggcauuaucaaaacguuuagcaacgggugugacuaugucucuaauaagggaguggacaccguuuccgugggcaacacacuguacuaugucaacaaacaggagggccagagccuuuacgugaagggggagccuaucauuaauuucuaugauccccugguuuuuccguccgacgaauuugaugcuucuaucagccaagugaacgagaaaauuaaucagucccucgccuucauccggaagucugacgaacugcugcacaacgucaaugugggaaagagcaccacaaacauuaugaucaccacgauuaucaucgugauuaucguuauucuccugcuucugaucgccgucggccucuuccuguacugcaaagcucgcugaggacuaguguccaccugucccuccugggcugcuggauugucucguuuuccugccaaauaaacaggaucagcgcuuuacagaucuaaaaaaaaaaaaaaaaaaaaaaaaaaaaaaaaaaaaaaaaaaaaaaaaaaaaaaaaaaaaaaaaugcaucccccccccccccccccccccccccccccccaaaggcucuuuucagagccaccagaauu

SEQ ID NO: 18182 - RNA, 1856 nt, Artificial Sequence
  mRNA product Design e-2 comprising derived and/or modified sequence from HRSV(Memphis-37)__AIY60640.1__F-del_DSCav1_mut6 (opt6)
gggagacccgugacccggaaguuguacggcuacgcgacuuucccucccacaaacccucgcgcccuuccuuuccuacuugggcccggcagaaagcuuaccauggaacuaccuauacuaaaaaccaacgccauaacaacaauacuagccgcaguuacacucugcuuugcauccucacaaaacaucacagaggaauuuuaccaaucuacuugcuccgcaguaucaaaaggauaccuaggagcacuccguacaggaugguacacaucagucauaacaauugaauuaucuaacaucaaagaaaacaaauguaaugguacagacgccaaaguaaaauuaauaaaacaagaacuagacaaauacaaaaacgccguaacagaccuacaaaugcuaaugugcucaacccccgccgcaggaucuggaucagcaauugccucaggcauagcaguaugcaaaguccuacaccuagaaggagaagucaacaaaauaaaaaacgcucuccucucaaccaauaaagcaguaguaucccucucaaacggaguaucaguacuaacauucaaaguacuagaccucaaaaauuauauagacaagcaacuacucccaauauuaaauaaacaauccugcucaauacccaauccagaaacagucauggaauuucaacaaaaaaacaaccgacucuuagaaauaacaagagaauuuucagucaaugccggcgucacaaccccaguaucaacauacaugcuaacaaacucagaacuacuaucacuaaucaacgauaugcccauaaccaacgaccaaaaaaaacuaaugucaaacaauguacaaauuguaagacaacagucuuauucaauaaugugcauaauaaaagaagaagucuuagcauauguaguacaacuaccacuauacggaguaauagacacaccauguuggaaauuacacacauccccacuauguaccaccaacacaaaagaaggaucuaacauaugccuaaccagaacagaccgaggcugguauugcgacaaugcaggaucaguauccuucuuuccacaagcagaaacaugcaaagucugcucuaacagaguauucugcgauacuaugaacucacuuaccuuaccaucagaaguaaaucuauguaauaucgacauauucaaucccaaauaugauugcaaaauaaugaccucaaaaacagauguaucaucaucagucauaacaucacuaggagcaauagucagcugcuaugggaaaacaaaaugcacagcuuccaacaaaaacaaaggaaucauaaaaacauucucaaaugguugugacuacguauccaacaaaggaguagauacaguaucuguaggcaacacauuauacuauguaaauaaacaagaaggacaaagccuauacgucaaaggagaacccaucauaaauuucuaugacccauuaguuuucccaucugacgaauuugacgcuuccaucucccaaguaaaugaaaaaaucaaccaaagccucgcauucauucgcaaaucugacgaauuacuccacaacguaaacguaggaaaauccacaacaaacauuaugaucaccaccauaauaaucguaauaauagucauauuacuacuccucauagcaguaggacuauuccuauacuguaaagcuagauaaggacuaguguccaccugucccuccugggcugcuggauugucucguuuuccugccaaauaaacaggaucagcgcuuuacagaucuaaaaaaaaaaaaaaaaaaaaaaaaaaaaaaaaaaaaaaaaaaaaaaaaaaaaaaaaaaaaaaaaugcaucccccccccccccccccccccccccccccccaaaggcucuuuucagagccaccagaauu

SEQ ID NO: 18183 - RNA, 1856 nt, Artificial Sequence
  mRNA product Design e-2 comprising derived and/or modified sequence from HRSV(Memphis-37)__AIY60640.1__F-del_DSCav1_mut6 (opt11)
gggagacccgugacccggaaguuguacggcuacgcgacuuucccucccacaaacccucgcgcccuuccuuuccuacuugggcccggcagaaagcuuaccauggaauuaccaauccucaaaacuaacgccaucaccaccauccucgcugccgucacccucugcuucgccuccagccaaaacaucacagaagaguucuaccaaagcacaugcuccgcugucuccaaaggcuaccuuggcgcccuccgcaccggcugguacaccucaguaauuaccauugaacuaagcaacaucaaagaaaauaaaugcaacggcaccgacgccaaaguuaaacucauaaaacaggaacucgacaaauacaaaaacgccguaacagaccuccaaaugcucaugugcuccacccccgccgccggcucaggcuccgccaucgcaagcggaauagcaguuugcaaaguccuccaccuagaaggcgaggucaacaagauuaaaaacgcacuucucucaaccaacaaggccgucguaucacucucaaacggcgucuccguccucaccuucaaaguucuggaccucaaaaacuacaucgauaaacaacuacucccaauacuuaacaaacaaucaugcuccaucccaaaccccgaaaccgucauggaguuccaacagaaaaacaaccgccuacuggaaaucacacgcgaguucagcguaaacgcuggcgucacuacacccgucuccaccuacaugcucaccaauucugaacuccuaucacucauaaacgacaugcccauuaccaacgaccaaaagaaacuaaugucaaacaacguccaaaucguaagacaacaaucguauuccaucaugugcauaauuaaagaagaaguucucgccuacgugguccaacuaccccucuacggagucauagacacuccuuguuggaaacuccacaccucuccccucugcacuaccaacacaaaagaaggcuccaacaucugccucacccgaaccgacagaggcugguacugcgacaacgccggcuccgucuccuucuucccccaagccgaaaccugcaaagucugcuccaaccgcguuuucugcgacaccaugaacucccucacacuccccuccgaagucaaccuauguaacauagacauauucaacccaaaauacgacugcaaaaucaugacauccaaaaccgacgugucuuccucggucaucaccucccucggcgccaucgucucaugcuacggcaaaacuaaaugcaccgcauccaacaaaaacaaaggcauaaucaaaacauucuccaacggcugcgacuacguuucuaacaaaggcgucgauaccgucuccgucggaaacacccucuacuacguaaacaagcaagaaggccagucccuauacguaaaaggagaaccaauuaucaacuucuacgacccccuagucuuccccuccgacgaguucgacgccuccauaucccaagucaacgagaaaaucaaccaaucccuagccuucauccgcaaaucagacgaacuccuccacaacgucaacgucggaaaauccacaacuaacaucaugaucaccaccaucauuaucgucaucauaguuauacuccuccuccucauagccgucggccucuuccuauacugcaaagcucgcuaaggacuaguguccaccugucccuccugggcugcuggauugucucguuuuccugccaaauaaacaggaucagcgcuuuacagaucuaaaaaaaaaaaaaaaaaaaaaaaaaaaaaaaaaaaaaaaaaaaaaaaaaaaaaaaaaaaaaaaaugcaucccccccccccccccccccccccccccccccaaaggcucuuuucagagccaccagaauu

SEQ ID NO: 18184 - RNA, 1826 nt, Artificial Sequence
  mRNA product Design e-3 comprising derived and/or modified sequence from HRSV(Memphis-37)__AIY60640.1__F-del_DSCav1_mut6 (opt1)
gggagacuuucccauucuguagcagaauuugguguugccuguggucuuggucccgcggagaagcuuaccauggagcugcccauccucaagaccaacgccaucaccacgauccuggccgcggugacccugugcuucgccagcucccagaacaucaccgaggaguucuaccagagcacgugcuccgccgucagcaagggcuaccucggcgcccugcgcaccgggugguacaccagcgugaucaccaucgagcuguccaacaucaaggagaacaagugcaacggcaccgacgccaaggugaagcucaucaagcaggagcuggacaaguacaagaacgcggucacggaccugcagaugcugaugugcagcaccccggccgccggcuccgggagcgcgaucgccuccggcaucgccgucugcaaggugcugcaccucgagggcgaggugaacaagaucaagaacgcccugcuguccaccaacaaggccgucgugagccucuccaacggggugagcguccugaccuucaaggugcuggaccucaagaacuacaucgacaagcagcugcugcccauccugaacaagcagagcugcuccauccccaaccccgagaccgucauggaguuccagcagaagaacaaccgccuccuggagaucacgcgggaguucagcgugaacgcgggcgugaccacccccgucuccaccuacaugcugacgaacagcgagcuccugucccugaucaacgacaugccgaucaccaacgaccagaagaagcucaugagcaacaacgugcagaucgugcgccagcaguccuacagcaucaugugcaucaucaaggaggagguccuggccuacguggugcagcugccccucuacggggucaucgacacccccugcuggaagcugcacaccagcccccugugcacgaccaacaccaaggagggcuccaacaucugccucacccggacggaccgcgggugguacugcgacaacgccggcagcguguccuucuucccgcaggccgagaccugcaaggucugcagcaaccggguguucugcgacaccaugaacucccugacccugcccagcgaggugaaccucugcaacaucgacaucuucaaccccaaguacgacugcaagaucaugacguccaagaccgacgucagcuccagcgugaucaccucccugggcgccaucgugagcugcuacgggaagaccaagugcacggcgagcaacaagaacaagggcaucaucaagaccuucuccaacgggugcgacuacgucagcaacaagggcguggacaccguguccgucggcaacacccuguacuacgugaacaagcaggagggccagagccucuacgugaagggggagcccaucaucaacuucuacgacccgcuggucuuccccuccgacgaguucgacgccagcaucucccaggugaacgagaagaucaaccagagccuggccuucauccggaaguccgacgagcuccugcacaacgugaacgucggcaagagcaccacgaacaucaugaucaccaccaucaucaucgugaucaucgugauccugcugcuccugaucgccgucgggcuguuccucuacugcaaggcccgcugaggacuaguguccaccugucccuccugggcugcuggauugucucguuuuccugccaaauaaacaggaucagcgcuuuacagaucuaaaaaaaaaaaaaaaaaaaaaaaaaaaaaaaaaaaaaaaaaaaaaaaaaaaaaaaaaaaaaaaaugcaucccccccccccccccccccccccccccccccaaaggcucuuuucagagccaccagaauu

SEQ ID NO: 18185 - RNA, 1826 nt, Artificial Sequence
  mRNA product Design e-3 comprising derived and/or modified sequence from HRSV(Memphis-37)__AIY60640.1__F-del_DSCav1_mut6 (opt1)
gggagacuuucccauucuguagcagaauuugguguugccuguggucuuggucccgcggagaagcuuaccauggagcugcccauccucaagaccaacgccaucaccacgauccuggccgcggugacccugugcuucgccagcucccagaacaucaccgaggaguucuaccagagcacgugcuccgccgucagcaagggcuaccucggggcccugcgcaccggcugguacaccuccgugaucaccaucgagcugagcaacaucaaggagaacaagugcaacgggaccgacgccaaggugaagcucaucaagcaggagcuggacaaguacaagaacgcggucacggaccugcagaugcucaugugcuccaccccggccgccggcagcggguccgccaucgcgagcggcaucgccgugugcaaggugcugcaccuggagggcgaggucaacaagaucaagaacgcccuccuguccaccaacaaggccguggugagccuguccaacggggucagcgugcucaccuucaaggugcuggaccugaagaacuacaucgacaagcagcuccugcccauccugaacaagcaguccugcagcauccccaaccccgagacggucauggaguuccagcagaagaacaaccggcuccuggagaucacccgcgaguucuccgugaacgccggcgugaccaccccggucagcacguacaugcugaccaacuccgagcuccugagccugaucaacgacaugcccaucaccaacgaccagaagaagcucaugagcaacaacgugcagaucgugcggcagcaguccuacagcaucaugugcaucaucaaggaggagguccuggcguacguggugcagcugccccucuacggggucaucgacacccccugcuggaagcugcacacguccccgcugugcaccaccaacaccaaggagggcagcaacaucugccucacgcgcaccgaccgggggugguacugcgacaacgccggcuccgugagcuucuucccccaggccgagaccugcaaggugugcuccaaccgcgucuucugcgacaccaugaacagccugacgcugcccuccgaggugaaccucugcaacaucgacaucuucaaccccaaguacgacugcaagaucaugaccagcaagaccgacgucuccagcuccgugaucaccagccugggcgccaucguguccugcuacgggaagacgaagugcaccgccagcaacaagaacaagggcaucaucaagaccuucuccaacgggugcgacuacgucagcaacaagggcguggacaccguguccgucggcaacacgcuguacuacgugaacaagcaggaggggcagagccucuacgugaagggcgagccgaucaucaacuucuacgacccccuggucuuccccagcgacgaguucgacgcguccaucagccaggugaacgagaagaucaaccagucccuggccuucauccgcaagagcgacgagcuccugcacaacgugaacgucgggaaguccaccaccaacaucaugaucaccaccaucaucaucgugaucaucgugauccugcuccugcugaucgccgucggccucuuccuguacugcaaggcccggugaggacuaguguccaccugucccuccugggcugcuggauugucucguuuuccugccaaauaaacaggaucagcgcuuuacagaucuaaaaaaaaaaaaaaaaaaaaaaaaaaaaaaaaaaaaaaaaaaaaaaaaaaaaaaaaaaaaaaaaugcaucccccccccccccccccccccccccccccccaaaggcucuuuucagagccaccagaauu

SEQ ID NO: 18186 - RNA, 1826 nt, Artificial Sequence
  mRNA product Design e-3 comprising derived and/or modified sequence from HRSV(Memphis-37)__AIY60640.1__F-del_DSCav1_mut6 (opt2)
gggagacuuucccauucuguagcagaauuugguguugccuguggucuuggucccgcggagaagcuuaccauggagcuccccauccucaagaccaacgccaucaccaccauccucgccgccgucacccucugcuucgccuccucccagaacaucaccgaggaguucuaccaguccaccugcuccgccgucuccaagggcuaccucggcgcccuccgcaccggcugguacaccuccgucaucaccaucgagcucuccaacaucaaggagaacaagugcaacggcaccgacgccaaggucaagcucaucaagcaggagcucgacaaguacaagaacgccgucaccgaccuccagaugcucaugugcuccacccccgccgccggcuccggcuccgccaucgccuccggcaucgccgucugcaagguccuccaccucgagggcgaggucaacaagaucaagaacgcccuccucuccaccaacaaggccgucgucucccucuccaacggcgucuccguccucaccuucaagguccucgaccucaagaacuacaucgacaagcagcuccuccccauccucaacaagcaguccugcuccauccccaaccccgagaccgucauggaguuccagcagaagaacaaccgccuccucgagaucacccgcgaguucuccgucaacgccggcgucaccacccccgucuccaccuacaugcucaccaacuccgagcuccucucccucaucaacgacaugcccaucaccaacgaccagaagaagcucauguccaacaacguccagaucguccgccagcaguccuacuccaucaugugcaucaucaaggaggagguccucgccuacgucguccagcucccccucuacggcgucaucgacacccccugcuggaagcuccacaccuccccccucugcaccaccaacaccaaggagggcuccaacaucugccucacccgcaccgaccgcggcugguacugcgacaacgccggcuccgucuccuucuucccccaggccgagaccugcaaggucugcuccaaccgcgucuucugcgacaccaugaacucccucacccuccccuccgaggucaaccucugcaacaucgacaucuucaaccccaaguacgacugcaagaucaugaccuccaagaccgacgucuccuccuccgucaucaccucccucggcgccaucgucuccugcuacggcaagaccaagugcaccgccuccaacaagaacaagggcaucaucaagaccuucuccaacggcugcgacuacgucuccaacaagggcgucgacaccgucuccgucggcaacacccucuacuacgucaacaagcaggagggccagucccucuacgucaagggcgagcccaucaucaacuucuacgacccccucgucuuccccuccgacgaguucgacgccuccaucucccaggucaacgagaagaucaaccagucccucgccuucauccgcaaguccgacgagcuccuccacaacgucaacgucggcaaguccaccaccaacaucaugaucaccaccaucaucaucgucaucaucgucauccuccuccuccucaucgccgucggccucuuccucuacugcaaggcccgcugaggacuaguguccaccugucccuccugggcugcuggauugucucguuuuccugccaaauaaacaggaucagcgcuuuacagaucuaaaaaaaaaaaaaaaaaaaaaaaaaaaaaaaaaaaaaaaaaaaaaaaaaaaaaaaaaaaaaaaaugcaucccccccccccccccccccccccccccccccaaaggcucuuuucagagccaccagaauu

SEQ ID NO: 18187 - RNA, 1826 nt, Artificial Sequence
  mRNA product Design e-3 comprising derived and/or modified sequence from HRSV(Memphis-37)__AIY60640.1__F-del_DSCav1_mut6 (opt3)
gggagacuuucccauucuguagcagaauuugguguugccuguggucuuggucccgcggagaagcuuaccauggagcugcccauccucaagaccaacgccauuacaacuauacuugcugcagugacgcugugcuucgccagcucccagaauaucaccgaagaguuuuaccaaucuacauguucagcggucaguaaaggcuauuugggggcuuuaagaacuggaugguacaccagcguuauuacaaucgaacuguccaacauuaaggagaauaaaugcaacgguaccgacgccaaggugaaacuaaucaagcaggaacucgauaaguauaaaaaugcaguaacugaccugcagaugcuuauguguucuacuccugccgcuggcucggggucagcaauagccagcggaaucgcugugugcaagguccugcacuuggagggcgaggugaacaaaauuaagaaugcccuccugaguaccaacaaagcgguugugucccugucuaauggugucagcgugcucacguucaagguauuagaucugaagaacuacaucgacaaacagcuuuugccaauucugaauaagcaauccuguucaaucccgaaccccgaaacuguuauggaguuucagcagaaaaauaacaggcuacucgaaauaacccgggaguucagugugaaugcaggggucacaacuccugugagcaccuauaugcugacaaacucugagcuucuguccuugauuaacgauaugccaaucaccaaugaccagaagaaacucaugucaaacaaugugcaaauuguccgccagcagagcuacaguaucaugugcaucauuaaggaagagguucuggccuaugugguacaguuaccccuguacggagugauagauacgccuuguuggaaacuccauacuucuccacuuugcacaaccaacacuaaggaaggcuccaauaucugucugacacgaaccgaccguggcugguacugcgauaacgcugggagcgucucguuuuucccccaagccgagacguguaaggugugcucuaauagaguuuucugcgacaccaugaacuccuugacacuaccuucagaagugaaucuguguaacauugauaucuucaauccaaaauaugacugcaagauaaugacaaguaaaaccgaugucagcuccucugugauuacaagccucggagcaaucguaucauguuacgguaagacuaaaugcaccgcuaguaacaagaauaagggcaucauuaaaacauuuuccaacgggugugacuauguuagcaauaagggaguggacaccgucucugugggcaacacucuguacuaugucaacaaacaggagggucagucacuuuacgugaagggggagccgaucauuaauuucuaugauccccugguuuuuccuagugacgaauuugaugccagcauaucccaagugaacgagaaaaucaaucagucuuuggcguuuauuaggaagucggacgaacuccugcacaacguaaaugucggaaagagcacgacaaacaucaugaucaccacuauuauaaucgugauuaucguuauuuuacugcuacucaucgccgugggccuguuccuuuacugcaaagcacggugaggacuaguguccaccugucccuccugggcugcuggauugucucguuuuccugccaaauaaacaggaucagcgcuuuacagaucuaaaaaaaaaaaaaaaaaaaaaaaaaaaaaaaaaaaaaaaaaaaaaaaaaaaaaaaaaaaaaaaaugcaucccccccccccccccccccccccccccccccaaaggcucuuuucagagccaccagaauu

SEQ ID NO: 18188 - RNA, 1826 nt, Artificial Sequence
  mRNA product Design e-3 comprising derived and/or modified sequence from HRSV(Memphis-37)__AIY60640.1__F-del_DSCav1_mut6 (opt4)
gggagacuuucccauucuguagcagaauuugguguugccuguggucuuggucccgcggagaagcuuaccauggagcugcccauccugaagaccaacgccaucaccaccauccuggccgccgugacccugugcuucgccagcagccagaacaucaccgaggaguucuaccagagcaccugcagcgccgugagcaagggcuaccugggcgcccugagaaccggcugguacaccagcgugaucaccaucgagcugagcaacaucaaggagaacaagugcaacggcaccgacgccaaggugaagcugaucaagcaggagcuggacaaguacaagaacgccgugaccgaccugcagaugcugaugugcagcacccccgccgccggcagcggcagcgccaucgccagcggcaucgccgugugcaaggugcugcaccuggagggcgaggugaacaagaucaagaacgcccugcugagcaccaacaaggccguggugagccugagcaacggcgugagcgugcugaccuucaaggugcuggaccugaagaacuacaucgacaagcagcugcugcccauccugaacaagcagagcugcagcauccccaaccccgagaccgugauggaguuccagcagaagaacaacagacugcuggagaucaccagagaguucagcgugaacgccggcgugaccacccccgugagcaccuacaugcugaccaacagcgagcugcugagccugaucaacgacaugcccaucaccaacgaccagaagaagcugaugagcaacaacgugcagaucgugagacagcagagcuacagcaucaugugcaucaucaaggaggaggugcuggccuacguggugcagcugccccuguacggcgugaucgacacccccugcuggaagcugcacaccagcccccugugcaccaccaacaccaaggagggcagcaacaucugccugaccagaaccgacagaggcugguacugcgacaacgccggcagcgugagcuucuucccccaggccgagaccugcaaggugugcagcaacagaguguucugcgacaccaugaacagccugacccugcccagcgaggugaaccugugcaacaucgacaucuucaaccccaaguacgacugcaagaucaugaccagcaagaccgacgugagcagcagcgugaucaccagccugggcgccaucgugagcugcuacggcaagaccaagugcaccgccagcaacaagaacaagggcaucaucaagaccuucagcaacggcugcgacuacgugagcaacaagggcguggacaccgugagcgugggcaacacccuguacuacgugaacaagcaggagggccagagccuguacgugaagggcgagcccaucaucaacuucuacgacccccugguguuccccagcgacgaguucgacgccagcaucagccaggugaacgagaagaucaaccagagccuggccuucaucagaaagagcgacgagcugcugcacaacgugaacgugggcaagagcaccaccaacaucaugaucaccaccaucaucaucgugaucaucgugauccugcugcugcugaucgccgugggccuguuccuguacugcaaggccagaugaggacuaguguccaccugucccuccugggcugcuggauugucucguuuuccugccaaauaaacaggaucagcgcuuuacagaucuaaaaaaaaaaaaaaaaaaaaaaaaaaaaaaaaaaaaaaaaaaaaaaaaaaaaaaaaaaaaaaaaugcaucccccccccccccccccccccccccccccccaaaggcucuuuucagagccaccagaauu

SEQ ID NO: 18189 - RNA, 1826 nt, Artificial Sequence
  mRNA product Design e-3 comprising derived and/or modified sequence from HRSV(Memphis-37)__AIY60640.1__F-del_DSCav1_mut6 (opt5)
gggagacuuucccauucuguagcagaauuugguguugccuguggucuuggucccgcggagaagcuuaccauggagcugcccauccucaagaccaacgccauuacaacgauccuggcugccgugacccuuugcuucgcgagcucccagaauauuacagaagaguuuuaccaaucuaccuguagcgcugucuccaaaggcuaucugggggcccucagaacaggaugguacaccucuguuaucacaauugaacugagcaacaucaaggagaauaaaugcaacggcaccgacgccaaggugaaacuuaucaagcaggaacuggauaaguauaaaaaugcugugacggaccuccagaugcugauguguuccaccccugccgcugggucuggaagcgccauugcguccggcaucgccgucugcaaggugcugcaccucgagggggagguuaacaaaauuaagaaugcucugcuuagcacaaacaaagccguggucucucuguccaauggagugagcguucucaccuucaaggugcuggaucuuaagaacuacaucgacaaacagcugcucccgauucugaauaagcaaucuuguuccauccccaacccugaaacagucauggaguuucagcagaaaaauaaccggcugcucgaaauuacccgcgaguucagcgugaaugcuggcgugacgacacccgucucuaccuauaugcugacaaacuccgagcuucugagccucaucaacgauaugccuaucaccaaugaccagaagaaacugauguccaacaauguucaaauugugagacagcagucuuacagcaucaugugcauuaucaaggaagaggugcuugccuaugucgugcagcugccccucuacggcguuauugauaccccuuguuggaaacugcauacauccccgcugugcacgaccaacacaaaggaagggagcaauaucugucucacccggacagaccgcggaugguacugcgauaacgcgggcucuguguccuuuuucccccaagccgagaccuguaaggucugcagcaauagaguguuuugcgacacgaugaacucucugacacuuccuagcgaaguuaaucuguguaacaucgauauuuucaaucccaaauaugacugcaagaucaugaccuccaaaaccgaugugucuagcuccgucauuacaagccucggggcuaucgugucuuguuacggaaagaccaaaugcacagccuccaacaagaauaagggcauuaucaaaacguuuagcaacgggugugacuaugucucuaauaagggaguggacaccguuuccgugggcaacacacuguacuaugucaacaaacaggagggccagagccuuuacgugaagggggagccuaucauuaauuucuaugauccccugguuuuuccguccgacgaauuugaugcuucuaucagccaagugaacgagaaaauuaaucagucccucgccuucauccggaagucugacgaacugcugcacaacgucaaugugggaaagagcaccacaaacauuaugaucaccacgauuaucaucgugauuaucguuauucuccugcuucugaucgccgucggccucuuccuguacugcaaagcucgcugaggacuaguguccaccugucccuccugggcugcuggauugucucguuuuccugccaaauaaacaggaucagcgcuuuacagaucuaaaaaaaaaaaaaaaaaaaaaaaaaaaaaaaaaaaaaaaaaaaaaaaaaaaaaaaaaaaaaaaaugcaucccccccccccccccccccccccccccccccaaaggcucuuuucagagccaccagaauu

SEQ ID NO: 18190 - RNA, 1826 nt, Artificial Sequence
  mRNA product Design e-3 comprising derived and/or modified sequence from HRSV(Memphis-37)__AIY60640.1__F-del_DSCav1_mut6 (opt6)
gggagacuuucccauucuguagcagaauuugguguugccuguggucuuggucccgcggagaagcuuaccauggaacuaccuauacuaaaaaccaacgccauaacaacaauacuagccgcaguuacacucugcuuugcauccucacaaaacaucacagaggaauuuuaccaaucuacuugcuccgcaguaucaaaaggauaccuaggagcacuccguacaggaugguacacaucagucauaacaauugaauuaucuaacaucaaagaaaacaaauguaaugguacagacgccaaaguaaaauuaauaaaacaagaacuagacaaauacaaaaacgccguaacagaccuacaaaugcuaaugugcucaacccccgccgcaggaucuggaucagcaauugccucaggcauagcaguaugcaaaguccuacaccuagaaggagaagucaacaaaauaaaaaacgcucuccucucaaccaauaaagcaguaguaucccucucaaacggaguaucaguacuaacauucaaaguacuagaccucaaaaauuauauagacaagcaacuacucccaauauuaaauaaacaauccugcucaauacccaauccagaaacagucauggaauuucaacaaaaaaacaaccgacucuuagaaauaacaagagaauuuucagucaaugccggcgucacaaccccaguaucaacauacaugcuaacaaacucagaacuacuaucacuaaucaacgauaugcccauaaccaacgaccaaaaaaaacuaaugucaaacaauguacaaauuguaagacaacagucuuauucaauaaugugcauaauaaaagaagaagucuuagcauauguaguacaacuaccacuauacggaguaauagacacaccauguuggaaauuacacacauccccacuauguaccaccaacacaaaagaaggaucuaacauaugccuaaccagaacagaccgaggcugguauugcgacaaugcaggaucaguauccuucuuuccacaagcagaaacaugcaaagucugcucuaacagaguauucugcgauacuaugaacucacuuaccuuaccaucagaaguaaaucuauguaauaucgacauauucaaucccaaauaugauugcaaaauaaugaccucaaaaacagauguaucaucaucagucauaacaucacuaggagcaauagucagcugcuaugggaaaacaaaaugcacagcuuccaacaaaaacaaaggaaucauaaaaacauucucaaaugguugugacuacguauccaacaaaggaguagauacaguaucuguaggcaacacauuauacuauguaaauaaacaagaaggacaaagccuauacgucaaaggagaacccaucauaaauuucuaugacccauuaguuuucccaucugacgaauuugacgcuuccaucucccaaguaaaugaaaaaaucaaccaaagccucgcauucauucgcaaaucugacgaauuacuccacaacguaaacguaggaaaauccacaacaaacauuaugaucaccaccauaauaaucguaauaauagucauauuacuacuccucauagcaguaggacuauuccuauacuguaaagcuagauaaggacuaguguccaccugucccuccugggcugcuggauugucucguuuuccugccaaauaaacaggaucagcgcuuuacagaucuaaaaaaaaaaaaaaaaaaaaaaaaaaaaaaaaaaaaaaaaaaaaaaaaaaaaaaaaaaaaaaaaugcaucccccccccccccccccccccccccccccccaaaggcucuuuucagagccaccagaauu

SEQ ID NO: 18191 - RNA, 1826 nt, Artificial Sequence
  mRNA product Design e-3 comprising derived and/or modified sequence from HRSV(Memphis-37)__AIY60640.1__F-del_DSCav1_mut6 (opt11)
gggagacuuucccauucuguagcagaauuugguguugccuguggucuuggucccgcggagaagcuuaccauggaauuaccaauccucaaaacuaacgccaucaccaccauccucgcugccgucacccucugcuucgccuccagccaaaacaucacagaagaguucuaccaaagcacaugcuccgcugucuccaaaggcuaccuuggcgcccuccgcaccggcugguacaccucaguaauuaccauugaacuaagcaacaucaaagaaaauaaaugcaacggcaccgacgccaaaguuaaacucauaaaacaggaacucgacaaauacaaaaacgccguaacagaccuccaaaugcucaugugcuccacccccgccgccggcucaggcuccgccaucgcaagcggaauagcaguuugcaaaguccuccaccuagaaggcgaggucaacaagauuaaaaacgcacuucucucaaccaacaaggccgucguaucacucucaaacggcgucuccguccucaccuucaaaguucuggaccucaaaaacuacaucgauaaacaacuacucccaauacuuaacaaacaaucaugcuccaucccaaaccccgaaaccgucauggaguuccaacagaaaaacaaccgccuacuggaaaucacacgcgaguucagcguaaacgcuggcgucacuacacccgucuccaccuacaugcucaccaauucugaacuccuaucacucauaaacgacaugcccauuaccaacgaccaaaagaaacuaaugucaaacaacguccaaaucguaagacaacaaucguauuccaucaugugcauaauuaaagaagaaguucucgccuacgugguccaacuaccccucuacggagucauagacacuccuuguuggaaacuccacaccucuccccucugcacuaccaacacaaaagaaggcuccaacaucugccucacccgaaccgacagaggcugguacugcgacaacgccggcuccgucuccuucuucccccaagccgaaaccugcaaagucugcuccaaccgcguuuucugcgacaccaugaacucccucacacuccccuccgaagucaaccuauguaacauagacauauucaacccaaaauacgacugcaaaaucaugacauccaaaaccgacgugucuuccucggucaucaccucccucggcgccaucgucucaugcuacggcaaaacuaaaugcaccgcauccaacaaaaacaaaggcauaaucaaaacauucuccaacggcugcgacuacguuucuaacaaaggcgucgauaccgucuccgucggaaacacccucuacuacguaaacaagcaagaaggccagucccuauacguaaaaggagaaccaauuaucaacuucuacgacccccuagucuuccccuccgacgaguucgacgccuccauaucccaagucaacgagaaaaucaaccaaucccuagccuucauccgcaaaucagacgaacuccuccacaacgucaacgucggaaaauccacaacuaacaucaugaucaccaccaucauuaucgucaucauaguuauacuccuccuccucauagccgucggccucuuccuauacugcaaagcucgcuaaggacuaguguccaccugucccuccugggcugcuggauugucucguuuuccugccaaauaaacaggaucagcgcuuuacagaucuaaaaaaaaaaaaaaaaaaaaaaaaaaaaaaaaaaaaaaaaaaaaaaaaaaaaaaaaaaaaaaaaugcaucccccccccccccccccccccccccccccccaaaggcucuuuucagagccaccagaauu

SEQ ID NO: 18192 - RNA, 1880 nt, Artificial Sequence
  mRNA product Design e-4 comprising derived and/or modified sequence from HRSV(Memphis-37)__AIY60640.1__F-del_DSCav1_mut6 (opt1)
gggagacuccugucgggcggaaguaggaggaguagaguuuaaaaacaguacucuuuuuccgguucgggacguaguugaagcaacgacaagccggauaaccgcucuugagacaggaagcuuaccauggagcugcccauccucaagaccaacgccaucaccacgauccuggccgcggugacccugugcuucgccagcucccagaacaucaccgaggaguucuaccagagcacgugcuccgccgucagcaagggcuaccucggcgcccugcgcaccgggugguacaccagcgugaucaccaucgagcuguccaacaucaaggagaacaagugcaacggcaccgacgccaaggugaagcucaucaagcaggagcuggacaaguacaagaacgcggucacggaccugcagaugcugaugugcagcaccccggccgccggcuccgggagcgcgaucgccuccggcaucgccgucugcaaggugcugcaccucgagggcgaggugaacaagaucaagaacgcccugcuguccaccaacaaggccgucgugagccucuccaacggggugagcguccugaccuucaaggugcuggaccucaagaacuacaucgacaagcagcugcugcccauccugaacaagcagagcugcuccauccccaaccccgagaccgucauggaguuccagcagaagaacaaccgccuccuggagaucacgcgggaguucagcgugaacgcgggcgugaccacccccgucuccaccuacaugcugacgaacagcgagcuccugucccugaucaacgacaugccgaucaccaacgaccagaagaagcucaugagcaacaacgugcagaucgugcgccagcaguccuacagcaucaugugcaucaucaaggaggagguccuggccuacguggugcagcugccccucuacggggucaucgacacccccugcuggaagcugcacaccagcccccugugcacgaccaacaccaaggagggcuccaacaucugccucacccggacggaccgcgggugguacugcgacaacgccggcagcguguccuucuucccgcaggccgagaccugcaaggucugcagcaaccggguguucugcgacaccaugaacucccugacccugcccagcgaggugaaccucugcaacaucgacaucuucaaccccaaguacgacugcaagaucaugacguccaagaccgacgucagcuccagcgugaucaccucccugggcgccaucgugagcugcuacgggaagaccaagugcacggcgagcaacaagaacaagggcaucaucaagaccuucuccaacgggugcgacuacgucagcaacaagggcguggacaccguguccgucggcaacacccuguacuacgugaacaagcaggagggccagagccucuacgugaagggggagcccaucaucaacuucuacgacccgcuggucuuccccuccgacgaguucgacgccagcaucucccaggugaacgagaagaucaaccagagccuggccuucauccggaaguccgacgagcuccugcacaacgugaacgucggcaagagcaccacgaacaucaugaucaccaccaucaucaucgugaucaucgugauccugcugcuccugaucgccgucgggcuguuccucuacugcaaggcccgcugaggacuaguguccaccugucccuccugggcugcuggauugucucguuuuccugccaaauaaacaggaucagcgcuuuacagaucuaaaaaaaaaaaaaaaaaaaaaaaaaaaaaaaaaaaaaaaaaaaaaaaaaaaaaaaaaaaaaaaaugcaucccccccccccccccccccccccccccccccaaaggcucuuuucagagccaccagaauu

SEQ ID NO: 18193 - RNA, 1880 nt, Artificial Sequence
  mRNA product Design e-4 comprising derived and/or modified sequence from HRSV(Memphis-37)__AIY60640.1__F-del_DSCav1_mut6 (opt1)
gggagacuccugucgggcggaaguaggaggaguagaguuuaaaaacaguacucuuuuuccgguucgggacguaguugaagcaacgacaagccggauaaccgcucuugagacaggaagcuuaccauggagcugcccauccucaagaccaacgccaucaccacgauccuggccgcggugacccugugcuucgccagcucccagaacaucaccgaggaguucuaccagagcacgugcuccgccgucagcaagggcuaccucggggcccugcgcaccggcugguacaccuccgugaucaccaucgagcugagcaacaucaaggagaacaagugcaacgggaccgacgccaaggugaagcucaucaagcaggagcuggacaaguacaagaacgcggucacggaccugcagaugcucaugugcuccaccccggccgccggcagcggguccgccaucgcgagcggcaucgccgugugcaaggugcugcaccuggagggcgaggucaacaagaucaagaacgcccuccuguccaccaacaaggccguggugagccuguccaacggggucagcgugcucaccuucaaggugcuggaccugaagaacuacaucgacaagcagcuccugcccauccugaacaagcaguccugcagcauccccaaccccgagacggucauggaguuccagcagaagaacaaccggcuccuggagaucacccgcgaguucuccgugaacgccggcgugaccaccccggucagcacguacaugcugaccaacuccgagcuccugagccugaucaacgacaugcccaucaccaacgaccagaagaagcucaugagcaacaacgugcagaucgugcggcagcaguccuacagcaucaugugcaucaucaaggaggagguccuggcguacguggugcagcugccccucuacggggucaucgacacccccugcuggaagcugcacacguccccgcugugcaccaccaacaccaaggagggcagcaacaucugccucacgcgcaccgaccgggggugguacugcgacaacgccggcuccgugagcuucuucccccaggccgagaccugcaaggugugcuccaaccgcgucuucugcgacaccaugaacagccugacgcugcccuccgaggugaaccucugcaacaucgacaucuucaaccccaaguacgacugcaagaucaugaccagcaagaccgacgucuccagcuccgugaucaccagccugggcgccaucguguccugcuacgggaagacgaagugcaccgccagcaacaagaacaagggcaucaucaagaccuucuccaacgggugcgacuacgucagcaacaagggcguggacaccguguccgucggcaacacgcuguacuacgugaacaagcaggaggggcagagccucuacgugaagggcgagccgaucaucaacuucuacgacccccuggucuuccccagcgacgaguucgacgcguccaucagccaggugaacgagaagaucaaccagucccuggccuucauccgcaagagcgacgagcuccugcacaacgugaacgucgggaaguccaccaccaacaucaugaucaccaccaucaucaucgugaucaucgugauccugcuccugcugaucgccgucggccucuuccuguacugcaaggcccggugaggacuaguguccaccugucccuccugggcugcuggauugucucguuuuccugccaaauaaacaggaucagcgcuuuacagaucuaaaaaaaaaaaaaaaaaaaaaaaaaaaaaaaaaaaaaaaaaaaaaaaaaaaaaaaaaaaaaaaaugcaucccccccccccccccccccccccccccccccaaaggcucuuuucagagccaccagaauu

SEQ ID NO: 18194 - RNA, 1880 nt, Artificial Sequence
  mRNA product Design e-4 comprising derived and/or modified sequence from HRSV(Memphis-37)__AIY60640.1__F-del_DSCav1_mut6 (opt2)
gggagacuccugucgggcggaaguaggaggaguagaguuuaaaaacaguacucuuuuuccgguucgggacguaguugaagcaacgacaagccggauaaccgcucuugagacaggaagcuuaccauggagcuccccauccucaagaccaacgccaucaccaccauccucgccgccgucacccucugcuucgccuccucccagaacaucaccgaggaguucuaccaguccaccugcuccgccgucuccaagggcuaccucggcgcccuccgcaccggcugguacaccuccgucaucaccaucgagcucuccaacaucaaggagaacaagugcaacggcaccgacgccaaggucaagcucaucaagcaggagcucgacaaguacaagaacgccgucaccgaccuccagaugcucaugugcuccacccccgccgccggcuccggcuccgccaucgccuccggcaucgccgucugcaagguccuccaccucgagggcgaggucaacaagaucaagaacgcccuccucuccaccaacaaggccgucgucucccucuccaacggcgucuccguccucaccuucaagguccucgaccucaagaacuacaucgacaagcagcuccuccccauccucaacaagcaguccugcuccauccccaaccccgagaccgucauggaguuccagcagaagaacaaccgccuccucgagaucacccgcgaguucuccgucaacgccggcgucaccacccccgucuccaccuacaugcucaccaacuccgagcuccucucccucaucaacgacaugcccaucaccaacgaccagaagaagcucauguccaacaacguccagaucguccgccagcaguccuacuccaucaugugcaucaucaaggaggagguccucgccuacgucguccagcucccccucuacggcgucaucgacacccccugcuggaagcuccacaccuccccccucugcaccaccaacaccaaggagggcuccaacaucugccucacccgcaccgaccgcggcugguacugcgacaacgccggcuccgucuccuucuucccccaggccgagaccugcaaggucugcuccaaccgcgucuucugcgacaccaugaacucccucacccuccccuccgaggucaaccucugcaacaucgacaucuucaaccccaaguacgacugcaagaucaugaccuccaagaccgacgucuccuccuccgucaucaccucccucggcgccaucgucuccugcuacggcaagaccaagugcaccgccuccaacaagaacaagggcaucaucaagaccuucuccaacggcugcgacuacgucuccaacaagggcgucgacaccgucuccgucggcaacacccucuacuacgucaacaagcaggagggccagucccucuacgucaagggcgagcccaucaucaacuucuacgacccccucgucuuccccuccgacgaguucgacgccuccaucucccaggucaacgagaagaucaaccagucccucgccuucauccgcaaguccgacgagcuccuccacaacgucaacgucggcaaguccaccaccaacaucaugaucaccaccaucaucaucgucaucaucgucauccuccuccuccucaucgccgucggccucuuccucuacugcaaggcccgcugaggacuaguguccaccugucccuccugggcugcuggauugucucguuuuccugccaaauaaacaggaucagcgcuuuacagaucuaaaaaaaaaaaaaaaaaaaaaaaaaaaaaaaaaaaaaaaaaaaaaaaaaaaaaaaaaaaaaaaaugcaucccccccccccccccccccccccccccccccaaaggcucuuuucagagccaccagaauu

SEQ ID NO: 18195 - RNA, 1880 nt, Artificial Sequence
  mRNA product Design e-4 comprising derived and/or modified sequence from HRSV(Memphis-37)__AIY60640.1__F-del_DSCav1_mut6 (opt3)
gggagacuccugucgggcggaaguaggaggaguagaguuuaaaaacaguacucuuuuuccgguucgggacguaguugaagcaacgacaagccggauaaccgcucuugagacaggaagcuuaccauggagcugcccauccucaagaccaacgccauuacaacuauacuugcugcagugacgcugugcuucgccagcucccagaauaucaccgaagaguuuuaccaaucuacauguucagcggucaguaaaggcuauuugggggcuuuaagaacuggaugguacaccagcguuauuacaaucgaacuguccaacauuaaggagaauaaaugcaacgguaccgacgccaaggugaaacuaaucaagcaggaacucgauaaguauaaaaaugcaguaacugaccugcagaugcuuauguguucuacuccugccgcuggcucggggucagcaauagccagcggaaucgcugugugcaagguccugcacuuggagggcgaggugaacaaaauuaagaaugcccuccugaguaccaacaaagcgguugugucccugucuaauggugucagcgugcucacguucaagguauuagaucugaagaacuacaucgacaaacagcuuuugccaauucugaauaagcaauccuguucaaucccgaaccccgaaacuguuauggaguuucagcagaaaaauaacaggcuacucgaaauaacccgggaguucagugugaaugcaggggucacaacuccugugagcaccuauaugcugacaaacucugagcuucuguccuugauuaacgauaugccaaucaccaaugaccagaagaaacucaugucaaacaaugugcaaauuguccgccagcagagcuacaguaucaugugcaucauuaaggaagagguucuggccuaugugguacaguuaccccuguacggagugauagauacgccuuguuggaaacuccauacuucuccacuuugcacaaccaacacuaaggaaggcuccaauaucugucugacacgaaccgaccguggcugguacugcgauaacgcugggagcgucucguuuuucccccaagccgagacguguaaggugugcucuaauagaguuuucugcgacaccaugaacuccuugacacuaccuucagaagugaaucuguguaacauugauaucuucaauccaaaauaugacugcaagauaaugacaaguaaaaccgaugucagcuccucugugauuacaagccucggagcaaucguaucauguuacgguaagacuaaaugcaccgcuaguaacaagaauaagggcaucauuaaaacauuuuccaacgggugugacuauguuagcaauaagggaguggacaccgucucugugggcaacacucuguacuaugucaacaaacaggagggucagucacuuuacgugaagggggagccgaucauuaauuucuaugauccccugguuuuuccuagugacgaauuugaugccagcauaucccaagugaacgagaaaaucaaucagucuuuggcguuuauuaggaagucggacgaacuccugcacaacguaaaugucggaaagagcacgacaaacaucaugaucaccacuauuauaaucgugauuaucguuauuuuacugcuacucaucgccgugggccuguuccuuuacugcaaagcacggugaggacuaguguccaccugucccuccugggcugcuggauugucucguuuuccugccaaauaaacaggaucagcgcuuuacagaucuaaaaaaaaaaaaaaaaaaaaaaaaaaaaaaaaaaaaaaaaaaaaaaaaaaaaaaaaaaaaaaaaugcaucccccccccccccccccccccccccccccccaaaggcucuuuucagagccaccagaauu

SEQ ID NO: 18196 - RNA, 1880 nt, Artificial Sequence
  mRNA product Design e-4 comprising derived and/or modified sequence from HRSV(Memphis-37)__AIY60640.1__F-del_DSCav1_mut6 (opt4)
gggagacuccugucgggcggaaguaggaggaguagaguuuaaaaacaguacucuuuuuccgguucgggacguaguugaagcaacgacaagccggauaaccgcucuugagacaggaagcuuaccauggagcugcccauccugaagaccaacgccaucaccaccauccuggccgccgugacccugugcuucgccagcagccagaacaucaccgaggaguucuaccagagcaccugcagcgccgugagcaagggcuaccugggcgcccugagaaccggcugguacaccagcgugaucaccaucgagcugagcaacaucaaggagaacaagugcaacggcaccgacgccaaggugaagcugaucaagcaggagcuggacaaguacaagaacgccgugaccgaccugcagaugcugaugugcagcacccccgccgccggcagcggcagcgccaucgccagcggcaucgccgugugcaaggugcugcaccuggagggcgaggugaacaagaucaagaacgcccugcugagcaccaacaaggccguggugagccugagcaacggcgugagcgugcugaccuucaaggugcuggaccugaagaacuacaucgacaagcagcugcugcccauccugaacaagcagagcugcagcauccccaaccccgagaccgugauggaguuccagcagaagaacaacagacugcuggagaucaccagagaguucagcgugaacgccggcgugaccacccccgugagcaccuacaugcugaccaacagcgagcugcugagccugaucaacgacaugcccaucaccaacgaccagaagaagcugaugagcaacaacgugcagaucgugagacagcagagcuacagcaucaugugcaucaucaaggaggaggugcuggccuacguggugcagcugccccuguacggcgugaucgacacccccugcuggaagcugcacaccagcccccugugcaccaccaacaccaaggagggcagcaacaucugccugaccagaaccgacagaggcugguacugcgacaacgccggcagcgugagcuucuucccccaggccgagaccugcaaggugugcagcaacagaguguucugcgacaccaugaacagccugacccugcccagcgaggugaaccugugcaacaucgacaucuucaaccccaaguacgacugcaagaucaugaccagcaagaccgacgugagcagcagcgugaucaccagccugggcgccaucgugagcugcuacggcaagaccaagugcaccgccagcaacaagaacaagggcaucaucaagaccuucagcaacggcugcgacuacgugagcaacaagggcguggacaccgugagcgugggcaacacccuguacuacgugaacaagcaggagggccagagccuguacgugaagggcgagcccaucaucaacuucuacgacccccugguguuccccagcgacgaguucgacgccagcaucagccaggugaacgagaagaucaaccagagccuggccuucaucagaaagagcgacgagcugcugcacaacgugaacgugggcaagagcaccaccaacaucaugaucaccaccaucaucaucgugaucaucgugauccugcugcugcugaucgccgugggccuguuccuguacugcaaggccagaugaggacuaguguccaccugucccuccugggcugcuggauugucucguuuuccugccaaauaaacaggaucagcgcuuuacagaucuaaaaaaaaaaaaaaaaaaaaaaaaaaaaaaaaaaaaaaaaaaaaaaaaaaaaaaaaaaaaaaaaugcaucccccccccccccccccccccccccccccccaaaggcucuuuucagagccaccagaauu

SEQ ID NO: 18197 - RNA, 1880 nt, Artificial Sequence
  mRNA product Design e-4 comprising derived and/or modified sequence from HRSV(Memphis-37)__AIY60640.1__F-del_DSCav1_mut6 (opt5)
gggagacuccugucgggcggaaguaggaggaguagaguuuaaaaacaguacucuuuuuccgguucgggacguaguugaagcaacgacaagccggauaaccgcucuugagacaggaagcuuaccauggagcugcccauccucaagaccaacgccauuacaacgauccuggcugccgugacccuuugcuucgcgagcucccagaauauuacagaagaguuuuaccaaucuaccuguagcgcugucuccaaaggcuaucugggggcccucagaacaggaugguacaccucuguuaucacaauugaacugagcaacaucaaggagaauaaaugcaacggcaccgacgccaaggugaaacuuaucaagcaggaacuggauaaguauaaaaaugcugugacggaccuccagaugcugauguguuccaccccugccgcugggucuggaagcgccauugcguccggcaucgccgucugcaaggugcugcaccucgagggggagguuaacaaaauuaagaaugcucugcuuagcacaaacaaagccguggucucucuguccaauggagugagcguucucaccuucaaggugcuggaucuuaagaacuacaucgacaaacagcugcucccgauucugaauaagcaaucuuguuccauccccaacccugaaacagucauggaguuucagcagaaaaauaaccggcugcucgaaauuacccgcgaguucagcgugaaugcuggcgugacgacacccgucucuaccuauaugcugacaaacuccgagcuucugagccucaucaacgauaugccuaucaccaaugaccagaagaaacugauguccaacaauguucaaauugugagacagcagucuuacagcaucaugugcauuaucaaggaagaggugcuugccuaugucgugcagcugccccucuacggcguuauugauaccccuuguuggaaacugcauacauccccgcugugcacgaccaacacaaaggaagggagcaauaucugucucacccggacagaccgcggaugguacugcgauaacgcgggcucuguguccuuuuucccccaagccgagaccuguaaggucugcagcaauagaguguuuugcgacacgaugaacucucugacacuuccuagcgaaguuaaucuguguaacaucgauauuuucaaucccaaauaugacugcaagaucaugaccuccaaaaccgaugugucuagcuccgucauuacaagccucggggcuaucgugucuuguuacggaaagaccaaaugcacagccuccaacaagaauaagggcauuaucaaaacguuuagcaacgggugugacuaugucucuaauaagggaguggacaccguuuccgugggcaacacacuguacuaugucaacaaacaggagggccagagccuuuacgugaagggggagccuaucauuaauuucuaugauccccugguuuuuccguccgacgaauuugaugcuucuaucagccaagugaacgagaaaauuaaucagucccucgccuucauccggaagucugacgaacugcugcacaacgucaaugugggaaagagcaccacaaacauuaugaucaccacgauuaucaucgugauuaucguuauucuccugcuucugaucgccgucggccucuuccuguacugcaaagcucgcugaggacuaguguccaccugucccuccugggcugcuggauugucucguuuuccugccaaauaaacaggaucagcgcuuuacagaucuaaaaaaaaaaaaaaaaaaaaaaaaaaaaaaaaaaaaaaaaaaaaaaaaaaaaaaaaaaaaaaaaugcaucccccccccccccccccccccccccccccccaaaggcucuuuucagagccaccagaauu

SEQ ID NO: 18198 - RNA, 1880 nt, Artificial Sequence
  mRNA product Design e-4 comprising derived and/or modified sequence from HRSV(Memphis-37)__AIY60640.1__F-del_DSCav1_mut6 (opt6)
gggagacuccugucgggcggaaguaggaggaguagaguuuaaaaacaguacucuuuuuccgguucgggacguaguugaagcaacgacaagccggauaaccgcucuugagacaggaagcuuaccauggaacuaccuauacuaaaaaccaacgccauaacaacaauacuagccgcaguuacacucugcuuugcauccucacaaaacaucacagaggaauuuuaccaaucuacuugcuccgcaguaucaaaaggauaccuaggagcacuccguacaggaugguacacaucagucauaacaauugaauuaucuaacaucaaagaaaacaaauguaaugguacagacgccaaaguaaaauuaauaaaacaagaacuagacaaauacaaaaacgccguaacagaccuacaaaugcuaaugugcucaacccccgccgcaggaucuggaucagcaauugccucaggcauagcaguaugcaaaguccuacaccuagaaggagaagucaacaaaauaaaaaacgcucuccucucaaccaauaaagcaguaguaucccucucaaacggaguaucaguacuaacauucaaaguacuagaccucaaaaauuauauagacaagcaacuacucccaauauuaaauaaacaauccugcucaauacccaauccagaaacagucauggaauuucaacaaaaaaacaaccgacucuuagaaauaacaagagaauuuucagucaaugccggcgucacaaccccaguaucaacauacaugcuaacaaacucagaacuacuaucacuaaucaacgauaugcccauaaccaacgaccaaaaaaaacuaaugucaaacaauguacaaauuguaagacaacagucuuauucaauaaugugcauaauaaaagaagaagucuuagcauauguaguacaacuaccacuauacggaguaauagacacaccauguuggaaauuacacacauccccacuauguaccaccaacacaaaagaaggaucuaacauaugccuaaccagaacagaccgaggcugguauugcgacaaugcaggaucaguauccuucuuuccacaagcagaaacaugcaaagucugcucuaacagaguauucugcgauacuaugaacucacuuaccuuaccaucagaaguaaaucuauguaauaucgacauauucaaucccaaauaugauugcaaaauaaugaccucaaaaacagauguaucaucaucagucauaacaucacuaggagcaauagucagcugcuaugggaaaacaaaaugcacagcuuccaacaaaaacaaaggaaucauaaaaacauucucaaaugguugugacuacguauccaacaaaggaguagauacaguaucuguaggcaacacauuauacuauguaaauaaacaagaaggacaaagccuauacgucaaaggagaacccaucauaaauuucuaugacccauuaguuuucccaucugacgaauuugacgcuuccaucucccaaguaaaugaaaaaaucaaccaaagccucgcauucauucgcaaaucugacgaauuacuccacaacguaaacguaggaaaauccacaacaaacauuaugaucaccaccauaauaaucguaauaauagucauauuacuacuccucauagcaguaggacuauuccuauacuguaaagcuagauaaggacuaguguccaccugucccuccugggcugcuggauugucucguuuuccugccaaauaaacaggaucagcgcuuuacagaucuaaaaaaaaaaaaaaaaaaaaaaaaaaaaaaaaaaaaaaaaaaaaaaaaaaaaaaaaaaaaaaaaugcaucccccccccccccccccccccccccccccccaaaggcucuuuucagagccaccagaauu

SEQ ID NO: 18199 - RNA, 1880 nt, Artificial Sequence
  mRNA product Design e-4 comprising derived and/or modified sequence from HRSV(Memphis-37)__AIY60640.1__F-del_DSCav1_mut6 (opt11)
gggagacuccugucgggcggaaguaggaggaguagaguuuaaaaacaguacucuuuuuccgguucgggacguaguugaagcaacgacaagccggauaaccgcucuugagacaggaagcuuaccauggaauuaccaauccucaaaacuaacgccaucaccaccauccucgcugccgucacccucugcuucgccuccagccaaaacaucacagaagaguucuaccaaagcacaugcuccgcugucuccaaaggcuaccuuggcgcccuccgcaccggcugguacaccucaguaauuaccauugaacuaagcaacaucaaagaaaauaaaugcaacggcaccgacgccaaaguuaaacucauaaaacaggaacucgacaaauacaaaaacgccguaacagaccuccaaaugcucaugugcuccacccccgccgccggcucaggcuccgccaucgcaagcggaauagcaguuugcaaaguccuccaccuagaaggcgaggucaacaagauuaaaaacgcacuucucucaaccaacaaggccgucguaucacucucaaacggcgucuccguccucaccuucaaaguucuggaccucaaaaacuacaucgauaaacaacuacucccaauacuuaacaaacaaucaugcuccaucccaaaccccgaaaccgucauggaguuccaacagaaaaacaaccgccuacuggaaaucacacgcgaguucagcguaaacgcuggcgucacuacacccgucuccaccuacaugcucaccaauucugaacuccuaucacucauaaacgacaugcccauuaccaacgaccaaaagaaacuaaugucaaacaacguccaaaucguaagacaacaaucguauuccaucaugugcauaauuaaagaagaaguucucgccuacgugguccaacuaccccucuacggagucauagacacuccuuguuggaaacuccacaccucuccccucugcacuaccaacacaaaagaaggcuccaacaucugccucacccgaaccgacagaggcugguacugcgacaacgccggcuccgucuccuucuucccccaagccgaaaccugcaaagucugcuccaaccgcguuuucugcgacaccaugaacucccucacacuccccuccgaagucaaccuauguaacauagacauauucaacccaaaauacgacugcaaaaucaugacauccaaaaccgacgugucuuccucggucaucaccucccucggcgccaucgucucaugcuacggcaaaacuaaaugcaccgcauccaacaaaaacaaaggcauaaucaaaacauucuccaacggcugcgacuacguuucuaacaaaggcgucgauaccgucuccgucggaaacacccucuacuacguaaacaagcaagaaggccagucccuauacguaaaaggagaaccaauuaucaacuucuacgacccccuagucuuccccuccgacgaguucgacgccuccauaucccaagucaacgagaaaaucaaccaaucccuagccuucauccgcaaaucagacgaacuccuccacaacgucaacgucggaaaauccacaacuaacaucaugaucaccaccaucauuaucgucaucauaguuauacuccuccuccucauagccgucggccucuuccuauacugcaaagcucgcuaaggacuaguguccaccugucccuccugggcugcuggauugucucguuuuccugccaaauaaacaggaucagcgcuuuacagaucuaaaaaaaaaaaaaaaaaaaaaaaaaaaaaaaaaaaaaaaaaaaaaaaaaaaaaaaaaaaaaaaaugcaucccccccccccccccccccccccccccccccaaaggcucuuuucagagccaccagaauu

SEQ ID NO: 18200 - RNA, 1847 nt, Artificial Sequence
  mRNA product Design e-5 comprising derived and/or modified sequence from HRSV(Memphis-37)__AIY60640.1__F-del_DSCav1_mut6 (opt1)
gggagagcggcucggccauuuugucccagucaguccggaggcugcggcugcagaaguaccgccugcggaguaacugcaaagaagcuuaccauggagcugcccauccucaagaccaacgccaucaccacgauccuggccgcggugacccugugcuucgccagcucccagaacaucaccgaggaguucuaccagagcacgugcuccgccgucagcaagggcuaccucggcgcccugcgcaccgggugguacaccagcgugaucaccaucgagcuguccaacaucaaggagaacaagugcaacggcaccgacgccaaggugaagcucaucaagcaggagcuggacaaguacaagaacgcggucacggaccugcagaugcugaugugcagcaccccggccgccggcuccgggagcgcgaucgccuccggcaucgccgucugcaaggugcugcaccucgagggcgaggugaacaagaucaagaacgcccugcuguccaccaacaaggccgucgugagccucuccaacggggugagcguccugaccuucaaggugcuggaccucaagaacuacaucgacaagcagcugcugcccauccugaacaagcagagcugcuccauccccaaccccgagaccgucauggaguuccagcagaagaacaaccgccuccuggagaucacgcgggaguucagcgugaacgcgggcgugaccacccccgucuccaccuacaugcugacgaacagcgagcuccugucccugaucaacgacaugccgaucaccaacgaccagaagaagcucaugagcaacaacgugcagaucgugcgccagcaguccuacagcaucaugugcaucaucaaggaggagguccuggccuacguggugcagcugccccucuacggggucaucgacacccccugcuggaagcugcacaccagcccccugugcacgaccaacaccaaggagggcuccaacaucugccucacccggacggaccgcgggugguacugcgacaacgccggcagcguguccuucuucccgcaggccgagaccugcaaggucugcagcaaccggguguucugcgacaccaugaacucccugacccugcccagcgaggugaaccucugcaacaucgacaucuucaaccccaaguacgacugcaagaucaugacguccaagaccgacgucagcuccagcgugaucaccucccugggcgccaucgugagcugcuacgggaagaccaagugcacggcgagcaacaagaacaagggcaucaucaagaccuucuccaacgggugcgacuacgucagcaacaagggcguggacaccguguccgucggcaacacccuguacuacgugaacaagcaggagggccagagccucuacgugaagggggagcccaucaucaacuucuacgacccgcuggucuuccccuccgacgaguucgacgccagcaucucccaggugaacgagaagaucaaccagagccuggccuucauccggaaguccgacgagcuccugcacaacgugaacgucggcaagagcaccacgaacaucaugaucaccaccaucaucaucgugaucaucgugauccugcugcuccugaucgccgucgggcuguuccucuacugcaaggcccgcugaggacuaguguccaccugucccuccugggcugcuggauugucucguuuuccugccaaauaaacaggaucagcgcuuuacagaucuaaaaaaaaaaaaaaaaaaaaaaaaaaaaaaaaaaaaaaaaaaaaaaaaaaaaaaaaaaaaaaaaugcaucccccccccccccccccccccccccccccccaaaggcucuuuucagagccaccagaauu

SEQ ID NO: 18201 - RNA, 1847 nt, Artificial Sequence
  mRNA product Design e-5 comprising derived and/or modified sequence from HRSV(Memphis-37)__AIY60640.1__F-del_DSCav1_mut6 (opt1)
gggagagcggcucggccauuuugucccagucaguccggaggcugcggcugcagaaguaccgccugcggaguaacugcaaagaagcuuaccauggagcugcccauccucaagaccaacgccaucaccacgauccuggccgcggugacccugugcuucgccagcucccagaacaucaccgaggaguucuaccagagcacgugcuccgccgucagcaagggcuaccucggggcccugcgcaccggcugguacaccuccgugaucaccaucgagcugagcaacaucaaggagaacaagugcaacgggaccgacgccaaggugaagcucaucaagcaggagcuggacaaguacaagaacgcggucacggaccugcagaugcucaugugcuccaccccggccgccggcagcggguccgccaucgcgagcggcaucgccgugugcaaggugcugcaccuggagggcgaggucaacaagaucaagaacgcccuccuguccaccaacaaggccguggugagccuguccaacggggucagcgugcucaccuucaaggugcuggaccugaagaacuacaucgacaagcagcuccugcccauccugaacaagcaguccugcagcauccccaaccccgagacggucauggaguuccagcagaagaacaaccggcuccuggagaucacccgcgaguucuccgugaacgccggcgugaccaccccggucagcacguacaugcugaccaacuccgagcuccugagccugaucaacgacaugcccaucaccaacgaccagaagaagcucaugagcaacaacgugcagaucgugcggcagcaguccuacagcaucaugugcaucaucaaggaggagguccuggcguacguggugcagcugccccucuacggggucaucgacacccccugcuggaagcugcacacguccccgcugugcaccaccaacaccaaggagggcagcaacaucugccucacgcgcaccgaccgggggugguacugcgacaacgccggcuccgugagcuucuucccccaggccgagaccugcaaggugugcuccaaccgcgucuucugcgacaccaugaacagccugacgcugcccuccgaggugaaccucugcaacaucgacaucuucaaccccaaguacgacugcaagaucaugaccagcaagaccgacgucuccagcuccgugaucaccagccugggcgccaucguguccugcuacgggaagacgaagugcaccgccagcaacaagaacaagggcaucaucaagaccuucuccaacgggugcgacuacgucagcaacaagggcguggacaccguguccgucggcaacacgcuguacuacgugaacaagcaggaggggcagagccucuacgugaagggcgagccgaucaucaacuucuacgacccccuggucuuccccagcgacgaguucgacgcguccaucagccaggugaacgagaagaucaaccagucccuggccuucauccgcaagagcgacgagcuccugcacaacgugaacgucgggaaguccaccaccaacaucaugaucaccaccaucaucaucgugaucaucgugauccugcuccugcugaucgccgucggccucuuccuguacugcaaggcccggugaggacuaguguccaccugucccuccugggcugcuggauugucucguuuuccugccaaauaaacaggaucagcgcuuuacagaucuaaaaaaaaaaaaaaaaaaaaaaaaaaaaaaaaaaaaaaaaaaaaaaaaaaaaaaaaaaaaaaaaugcaucccccccccccccccccccccccccccccccaaaggcucuuuucagagccaccagaauu

SEQ ID NO: 18202 - RNA, 1847 nt, Artificial Sequence
  mRNA product Design e-5 comprising derived and/or modified sequence from HRSV(Memphis-37)__AIY60640.1__F-del_DSCav1_mut6 (opt2)
gggagagcggcucggccauuuugucccagucaguccggaggcugcggcugcagaaguaccgccugcggaguaacugcaaagaagcuuaccauggagcuccccauccucaagaccaacgccaucaccaccauccucgccgccgucacccucugcuucgccuccucccagaacaucaccgaggaguucuaccaguccaccugcuccgccgucuccaagggcuaccucggcgcccuccgcaccggcugguacaccuccgucaucaccaucgagcucuccaacaucaaggagaacaagugcaacggcaccgacgccaaggucaagcucaucaagcaggagcucgacaaguacaagaacgccgucaccgaccuccagaugcucaugugcuccacccccgccgccggcuccggcuccgccaucgccuccggcaucgccgucugcaagguccuccaccucgagggcgaggucaacaagaucaagaacgcccuccucuccaccaacaaggccgucgucucccucuccaacggcgucuccguccucaccuucaagguccucgaccucaagaacuacaucgacaagcagcuccuccccauccucaacaagcaguccugcuccauccccaaccccgagaccgucauggaguuccagcagaagaacaaccgccuccucgagaucacccgcgaguucuccgucaacgccggcgucaccacccccgucuccaccuacaugcucaccaacuccgagcuccucucccucaucaacgacaugcccaucaccaacgaccagaagaagcucauguccaacaacguccagaucguccgccagcaguccuacuccaucaugugcaucaucaaggaggagguccucgccuacgucguccagcucccccucuacggcgucaucgacacccccugcuggaagcuccacaccuccccccucugcaccaccaacaccaaggagggcuccaacaucugccucacccgcaccgaccgcggcugguacugcgacaacgccggcuccgucuccuucuucccccaggccgagaccugcaaggucugcuccaaccgcgucuucugcgacaccaugaacucccucacccuccccuccgaggucaaccucugcaacaucgacaucuucaaccccaaguacgacugcaagaucaugaccuccaagaccgacgucuccuccuccgucaucaccucccucggcgccaucgucuccugcuacggcaagaccaagugcaccgccuccaacaagaacaagggcaucaucaagaccuucuccaacggcugcgacuacgucuccaacaagggcgucgacaccgucuccgucggcaacacccucuacuacgucaacaagcaggagggccagucccucuacgucaagggcgagcccaucaucaacuucuacgacccccucgucuuccccuccgacgaguucgacgccuccaucucccaggucaacgagaagaucaaccagucccucgccuucauccgcaaguccgacgagcuccuccacaacgucaacgucggcaaguccaccaccaacaucaugaucaccaccaucaucaucgucaucaucgucauccuccuccuccucaucgccgucggccucuuccucuacugcaaggcccgcugaggacuaguguccaccugucccuccugggcugcuggauugucucguuuuccugccaaauaaacaggaucagcgcuuuacagaucuaaaaaaaaaaaaaaaaaaaaaaaaaaaaaaaaaaaaaaaaaaaaaaaaaaaaaaaaaaaaaaaaugcaucccccccccccccccccccccccccccccccaaaggcucuuuucagagccaccagaauu

SEQ ID NO: 18203 - RNA, 1847 nt, Artificial Sequence
  mRNA product Design e-5 comprising derived and/or modified sequence from HRSV(Memphis-37)__AIY60640.1__F-del_DSCav1_mut6 (opt3)
gggagagcggcucggccauuuugucccagucaguccggaggcugcggcugcagaaguaccgccugcggaguaacugcaaagaagcuuaccauggagcugcccauccucaagaccaacgccauuacaacuauacuugcugcagugacgcugugcuucgccagcucccagaauaucaccgaagaguuuuaccaaucuacauguucagcggucaguaaaggcuauuugggggcuuuaagaacuggaugguacaccagcguuauuacaaucgaacuguccaacauuaaggagaauaaaugcaacgguaccgacgccaaggugaaacuaaucaagcaggaacucgauaaguauaaaaaugcaguaacugaccugcagaugcuuauguguucuacuccugccgcuggcucggggucagcaauagccagcggaaucgcugugugcaagguccugcacuuggagggcgaggugaacaaaauuaagaaugcccuccugaguaccaacaaagcgguugugucccugucuaauggugucagcgugcucacguucaagguauuagaucugaagaacuacaucgacaaacagcuuuugccaauucugaauaagcaauccuguucaaucccgaaccccgaaacuguuauggaguuucagcagaaaaauaacaggcuacucgaaauaacccgggaguucagugugaaugcaggggucacaacuccugugagcaccuauaugcugacaaacucugagcuucuguccuugauuaacgauaugccaaucaccaaugaccagaagaaacucaugucaaacaaugugcaaauuguccgccagcagagcuacaguaucaugugcaucauuaaggaagagguucuggccuaugugguacaguuaccccuguacggagugauagauacgccuuguuggaaacuccauacuucuccacuuugcacaaccaacacuaaggaaggcuccaauaucugucugacacgaaccgaccguggcugguacugcgauaacgcugggagcgucucguuuuucccccaagccgagacguguaaggugugcucuaauagaguuuucugcgacaccaugaacuccuugacacuaccuucagaagugaaucuguguaacauugauaucuucaauccaaaauaugacugcaagauaaugacaaguaaaaccgaugucagcuccucugugauuacaagccucggagcaaucguaucauguuacgguaagacuaaaugcaccgcuaguaacaagaauaagggcaucauuaaaacauuuuccaacgggugugacuauguuagcaauaagggaguggacaccgucucugugggcaacacucuguacuaugucaacaaacaggagggucagucacuuuacgugaagggggagccgaucauuaauuucuaugauccccugguuuuuccuagugacgaauuugaugccagcauaucccaagugaacgagaaaaucaaucagucuuuggcguuuauuaggaagucggacgaacuccugcacaacguaaaugucggaaagagcacgacaaacaucaugaucaccacuauuauaaucgugauuaucguuauuuuacugcuacucaucgccgugggccuguuccuuuacugcaaagcacggugaggacuaguguccaccugucccuccugggcugcuggauugucucguuuuccugccaaauaaacaggaucagcgcuuuacagaucuaaaaaaaaaaaaaaaaaaaaaaaaaaaaaaaaaaaaaaaaaaaaaaaaaaaaaaaaaaaaaaaaugcaucccccccccccccccccccccccccccccccaaaggcucuuuucagagccaccagaauu

SEQ ID NO: 18204 - RNA, 1847 nt, Artificial Sequence
  mRNA product Design e-5 comprising derived and/or modified sequence from HRSV(Memphis-37)__AIY60640.1__F-del_DSCav1_mut6 (opt4)
gggagagcggcucggccauuuugucccagucaguccggaggcugcggcugcagaaguaccgccugcggaguaacugcaaagaagcuuaccauggagcugcccauccugaagaccaacgccaucaccaccauccuggccgccgugacccugugcuucgccagcagccagaacaucaccgaggaguucuaccagagcaccugcagcgccgugagcaagggcuaccugggcgcccugagaaccggcugguacaccagcgugaucaccaucgagcugagcaacaucaaggagaacaagugcaacggcaccgacgccaaggugaagcugaucaagcaggagcuggacaaguacaagaacgccgugaccgaccugcagaugcugaugugcagcacccccgccgccggcagcggcagcgccaucgccagcggcaucgccgugugcaaggugcugcaccuggagggcgaggugaacaagaucaagaacgcccugcugagcaccaacaaggccguggugagccugagcaacggcgugagcgugcugaccuucaaggugcuggaccugaagaacuacaucgacaagcagcugcugcccauccugaacaagcagagcugcagcauccccaaccccgagaccgugauggaguuccagcagaagaacaacagacugcuggagaucaccagagaguucagcgugaacgccggcgugaccacccccgugagcaccuacaugcugaccaacagcgagcugcugagccugaucaacgacaugcccaucaccaacgaccagaagaagcugaugagcaacaacgugcagaucgugagacagcagagcuacagcaucaugugcaucaucaaggaggaggugcuggccuacguggugcagcugccccuguacggcgugaucgacacccccugcuggaagcugcacaccagcccccugugcaccaccaacaccaaggagggcagcaacaucugccugaccagaaccgacagaggcugguacugcgacaacgccggcagcgugagcuucuucccccaggccgagaccugcaaggugugcagcaacagaguguucugcgacaccaugaacagccugacccugcccagcgaggugaaccugugcaacaucgacaucuucaaccccaaguacgacugcaagaucaugaccagcaagaccgacgugagcagcagcgugaucaccagccugggcgccaucgugagcugcuacggcaagaccaagugcaccgccagcaacaagaacaagggcaucaucaagaccuucagcaacggcugcgacuacgugagcaacaagggcguggacaccgugagcgugggcaacacccuguacuacgugaacaagcaggagggccagagccuguacgugaagggcgagcccaucaucaacuucuacgacccccugguguuccccagcgacgaguucgacgccagcaucagccaggugaacgagaagaucaaccagagccuggccuucaucagaaagagcgacgagcugcugcacaacgugaacgugggcaagagcaccaccaacaucaugaucaccaccaucaucaucgugaucaucgugauccugcugcugcugaucgccgugggccuguuccuguacugcaaggccagaugaggacuaguguccaccugucccuccugggcugcuggauugucucguuuuccugccaaauaaacaggaucagcgcuuuacagaucuaaaaaaaaaaaaaaaaaaaaaaaaaaaaaaaaaaaaaaaaaaaaaaaaaaaaaaaaaaaaaaaaugcaucccccccccccccccccccccccccccccccaaaggcucuuuucagagccaccagaauu

SEQ ID NO: 18205 - RNA, 1847 nt, Artificial Sequence
  mRNA product Design e-5 comprising derived and/or modified sequence from HRSV(Memphis-37)__AIY60640.1__F-del_DSCav1_mut6 (opt5)
gggagagcggcucggccauuuugucccagucaguccggaggcugcggcugcagaaguaccgccugcggaguaacugcaaagaagcuuaccauggagcugcccauccucaagaccaacgccauuacaacgauccuggcugccgugacccuuugcuucgcgagcucccagaauauuacagaagaguuuuaccaaucuaccuguagcgcugucuccaaaggcuaucugggggcccucagaacaggaugguacaccucuguuaucacaauugaacugagcaacaucaaggagaauaaaugcaacggcaccgacgccaaggugaaacuuaucaagcaggaacuggauaaguauaaaaaugcugugacggaccuccagaugcugauguguuccaccccugccgcugggucuggaagcgccauugcguccggcaucgccgucugcaaggugcugcaccucgagggggagguuaacaaaauuaagaaugcucugcuuagcacaaacaaagccguggucucucuguccaauggagugagcguucucaccuucaaggugcuggaucuuaagaacuacaucgacaaacagcugcucccgauucugaauaagcaaucuuguuccauccccaacccugaaacagucauggaguuucagcagaaaaauaaccggcugcucgaaauuacccgcgaguucagcgugaaugcuggcgugacgacacccgucucuaccuauaugcugacaaacuccgagcuucugagccucaucaacgauaugccuaucaccaaugaccagaagaaacugauguccaacaauguucaaauugugagacagcagucuuacagcaucaugugcauuaucaaggaagaggugcuugccuaugucgugcagcugccccucuacggcguuauugauaccccuuguuggaaacugcauacauccccgcugugcacgaccaacacaaaggaagggagcaauaucugucucacccggacagaccgcggaugguacugcgauaacgcgggcucuguguccuuuuucccccaagccgagaccuguaaggucugcagcaauagaguguuuugcgacacgaugaacucucugacacuuccuagcgaaguuaaucuguguaacaucgauauuuucaaucccaaauaugacugcaagaucaugaccuccaaaaccgaugugucuagcuccgucauuacaagccucggggcuaucgugucuuguuacggaaagaccaaaugcacagccuccaacaagaauaagggcauuaucaaaacguuuagcaacgggugugacuaugucucuaauaagggaguggacaccguuuccgugggcaacacacuguacuaugucaacaaacaggagggccagagccuuuacgugaagggggagccuaucauuaauuucuaugauccccugguuuuuccguccgacgaauuugaugcuucuaucagccaagugaacgagaaaauuaaucagucccucgccuucauccggaagucugacgaacugcugcacaacgucaaugugggaaagagcaccacaaacauuaugaucaccacgauuaucaucgugauuaucguuauucuccugcuucugaucgccgucggccucuuccuguacugcaaagcucgcugaggacuaguguccaccugucccuccugggcugcuggauugucucguuuuccugccaaauaaacaggaucagcgcuuuacagaucuaaaaaaaaaaaaaaaaaaaaaaaaaaaaaaaaaaaaaaaaaaaaaaaaaaaaaaaaaaaaaaaaugcaucccccccccccccccccccccccccccccccaaaggcucuuuucagagccaccagaauu

SEQ ID NO: 18206 - RNA, 1847 nt, Artificial Sequence
  mRNA product Design e-5 comprising derived and/or modified sequence from HRSV(Memphis-37)__AIY60640.1__F-del_DSCav1_mut6 (opt6)
gggagagcggcucggccauuuugucccagucaguccggaggcugcggcugcagaaguaccgccugcggaguaacugcaaagaagcuuaccauggaacuaccuauacuaaaaaccaacgccauaacaacaauacuagccgcaguuacacucugcuuugcauccucacaaaacaucacagaggaauuuuaccaaucuacuugcuccgcaguaucaaaaggauaccuaggagcacuccguacaggaugguacacaucagucauaacaauugaauuaucuaacaucaaagaaaacaaauguaaugguacagacgccaaaguaaaauuaauaaaacaagaacuagacaaauacaaaaacgccguaacagaccuacaaaugcuaaugugcucaacccccgccgcaggaucuggaucagcaauugccucaggcauagcaguaugcaaaguccuacaccuagaaggagaagucaacaaaauaaaaaacgcucuccucucaaccaauaaagcaguaguaucccucucaaacggaguaucaguacuaacauucaaaguacuagaccucaaaaauuauauagacaagcaacuacucccaauauuaaauaaacaauccugcucaauacccaauccagaaacagucauggaauuucaacaaaaaaacaaccgacucuuagaaauaacaagagaauuuucagucaaugccggcgucacaaccccaguaucaacauacaugcuaacaaacucagaacuacuaucacuaaucaacgauaugcccauaaccaacgaccaaaaaaaacuaaugucaaacaauguacaaauuguaagacaacagucuuauucaauaaugugcauaauaaaagaagaagucuuagcauauguaguacaacuaccacuauacggaguaauagacacaccauguuggaaauuacacacauccccacuauguaccaccaacacaaaagaaggaucuaacauaugccuaaccagaacagaccgaggcugguauugcgacaaugcaggaucaguauccuucuuuccacaagcagaaacaugcaaagucugcucuaacagaguauucugcgauacuaugaacucacuuaccuuaccaucagaaguaaaucuauguaauaucgacauauucaaucccaaauaugauugcaaaauaaugaccucaaaaacagauguaucaucaucagucauaacaucacuaggagcaauagucagcugcuaugggaaaacaaaaugcacagcuuccaacaaaaacaaaggaaucauaaaaacauucucaaaugguugugacuacguauccaacaaaggaguagauacaguaucuguaggcaacacauuauacuauguaaauaaacaagaaggacaaagccuauacgucaaaggagaacccaucauaaauuucuaugacccauuaguuuucccaucugacgaauuugacgcuuccaucucccaaguaaaugaaaaaaucaaccaaagccucgcauucauucgcaaaucugacgaauuacuccacaacguaaacguaggaaaauccacaacaaacauuaugaucaccaccauaauaaucguaauaauagucauauuacuacuccucauagcaguaggacuauuccuauacuguaaagcuagauaaggacuaguguccaccugucccuccugggcugcuggauugucucguuuuccugccaaauaaacaggaucagcgcuuuacagaucuaaaaaaaaaaaaaaaaaaaaaaaaaaaaaaaaaaaaaaaaaaaaaaaaaaaaaaaaaaaaaaaaugcaucccccccccccccccccccccccccccccccaaaggcucuuuucagagccaccagaauu

SEQ ID NO: 18207 - RNA, 1847 nt, Artificial Sequence
  mRNA product Design e-5 comprising derived and/or modified sequence from HRSV(Memphis-37)__AIY60640.1__F-del_DSCav1_mut6 (opt11)
gggagagcggcucggccauuuugucccagucaguccggaggcugcggcugcagaaguaccgccugcggaguaacugcaaagaagcuuaccauggaauuaccaauccucaaaacuaacgccaucaccaccauccucgcugccgucacccucugcuucgccuccagccaaaacaucacagaagaguucuaccaaagcacaugcuccgcugucuccaaaggcuaccuuggcgcccuccgcaccggcugguacaccucaguaauuaccauugaacuaagcaacaucaaagaaaauaaaugcaacggcaccgacgccaaaguuaaacucauaaaacaggaacucgacaaauacaaaaacgccguaacagaccuccaaaugcucaugugcuccacccccgccgccggcucaggcuccgccaucgcaagcggaauagcaguuugcaaaguccuccaccuagaaggcgaggucaacaagauuaaaaacgcacuucucucaaccaacaaggccgucguaucacucucaaacggcgucuccguccucaccuucaaaguucuggaccucaaaaacuacaucgauaaacaacuacucccaauacuuaacaaacaaucaugcuccaucccaaaccccgaaaccgucauggaguuccaacagaaaaacaaccgccuacuggaaaucacacgcgaguucagcguaaacgcuggcgucacuacacccgucuccaccuacaugcucaccaauucugaacuccuaucacucauaaacgacaugcccauuaccaacgaccaaaagaaacuaaugucaaacaacguccaaaucguaagacaacaaucguauuccaucaugugcauaauuaaagaagaaguucucgccuacgugguccaacuaccccucuacggagucauagacacuccuuguuggaaacuccacaccucuccccucugcacuaccaacacaaaagaaggcuccaacaucugccucacccgaaccgacagaggcugguacugcgacaacgccggcuccgucuccuucuucccccaagccgaaaccugcaaagucugcuccaaccgcguuuucugcgacaccaugaacucccucacacuccccuccgaagucaaccuauguaacauagacauauucaacccaaaauacgacugcaaaaucaugacauccaaaaccgacgugucuuccucggucaucaccucccucggcgccaucgucucaugcuacggcaaaacuaaaugcaccgcauccaacaaaaacaaaggcauaaucaaaacauucuccaacggcugcgacuacguuucuaacaaaggcgucgauaccgucuccgucggaaacacccucuacuacguaaacaagcaagaaggccagucccuauacguaaaaggagaaccaauuaucaacuucuacgacccccuagucuuccccuccgacgaguucgacgccuccauaucccaagucaacgagaaaaucaaccaaucccuagccuucauccgcaaaucagacgaacuccuccacaacgucaacgucggaaaauccacaacuaacaucaugaucaccaccaucauuaucgucaucauaguuauacuccuccuccucauagccgucggccucuuccuauacugcaaagcucgcuaaggacuaguguccaccugucccuccugggcugcuggauugucucguuuuccugccaaauaaacaggaucagcgcuuuacagaucuaaaaaaaaaaaaaaaaaaaaaaaaaaaaaaaaaaaaaaaaaaaaaaaaaaaaaaaaaaaaaaaaugcaucccccccccccccccccccccccccccccccaaaggcucuuuucagagccaccagaauu

SEQ ID NO: 18208 - RNA, 1914 nt, Artificial Sequence
  mRNA product Design e-6 comprising derived and/or modified sequence from HRSV(Memphis-37)__AIY60640.1__F-del_DSCav1_mut6 (opt1)
gggagagcggcucggccauuuugucccagucaguccggaggcugcggcugcagaaguaccgccugcggaguaacugcaaagaagcuuaccauggagcugcccauccucaagaccaacgccaucaccacgauccuggccgcggugacccugugcuucgccagcucccagaacaucaccgaggaguucuaccagagcacgugcuccgccgucagcaagggcuaccucggcgcccugcgcaccgggugguacaccagcgugaucaccaucgagcuguccaacaucaaggagaacaagugcaacggcaccgacgccaaggugaagcucaucaagcaggagcuggacaaguacaagaacgcggucacggaccugcagaugcugaugugcagcaccccggccgccggcuccgggagcgcgaucgccuccggcaucgccgucugcaaggugcugcaccucgagggcgaggugaacaagaucaagaacgcccugcuguccaccaacaaggccgucgugagccucuccaacggggugagcguccugaccuucaaggugcuggaccucaagaacuacaucgacaagcagcugcugcccauccugaacaagcagagcugcuccauccccaaccccgagaccgucauggaguuccagcagaagaacaaccgccuccuggagaucacgcgggaguucagcgugaacgcgggcgugaccacccccgucuccaccuacaugcugacgaacagcgagcuccugucccugaucaacgacaugccgaucaccaacgaccagaagaagcucaugagcaacaacgugcagaucgugcgccagcaguccuacagcaucaugugcaucaucaaggaggagguccuggccuacguggugcagcugccccucuacggggucaucgacacccccugcuggaagcugcacaccagcccccugugcacgaccaacaccaaggagggcuccaacaucugccucacccggacggaccgcgggugguacugcgacaacgccggcagcguguccuucuucccgcaggccgagaccugcaaggucugcagcaaccggguguucugcgacaccaugaacucccugacccugcccagcgaggugaaccucugcaacaucgacaucuucaaccccaaguacgacugcaagaucaugacguccaagaccgacgucagcuccagcgugaucaccucccugggcgccaucgugagcugcuacgggaagaccaagugcacggcgagcaacaagaacaagggcaucaucaagaccuucuccaacgggugcgacuacgucagcaacaagggcguggacaccguguccgucggcaacacccuguacuacgugaacaagcaggagggccagagccucuacgugaagggggagcccaucaucaacuucuacgacccgcuggucuuccccuccgacgaguucgacgccagcaucucccaggugaacgagaagaucaaccagagccuggccuucauccggaaguccgacgagcuccugcacaacgugaacgucggcaagagcaccacgaacaucaugaucaccaccaucaucaucgugaucaucgugauccugcugcuccugaucgccgucgggcuguuccucuacugcaaggcccgcugaggacuaguacuggcugcaucucccuuuccucuguccuccauccuucucccaggauggugaagggggaccugguacccagugauccccaccccaggauccuaaaucaugacuuaccugcuaauaaaaacucauuggaaaagugagaagaucuaaaaaaaaaaaaaaaaaaaaaaaaaaaaaaaaaaaaaaaaaaaaaaaaaaaaaaaaaaaaaaaaugcaucccccccccccccccccccccccccccccccaaaggcucuuuucagagccaccagaauu

SEQ ID NO: 18209 - RNA, 1914 nt, Artificial Sequence
  mRNA product Design e-6 comprising derived and/or modified sequence from HRSV(Memphis-37)__AIY60640.1__F-del_DSCav1_mut6 (opt1)
gggagagcggcucggccauuuugucccagucaguccggaggcugcggcugcagaaguaccgccugcggaguaacugcaaagaagcuuaccauggagcugcccauccucaagaccaacgccaucaccacgauccuggccgcggugacccugugcuucgccagcucccagaacaucaccgaggaguucuaccagagcacgugcuccgccgucagcaagggcuaccucggggcccugcgcaccggcugguacaccuccgugaucaccaucgagcugagcaacaucaaggagaacaagugcaacgggaccgacgccaaggugaagcucaucaagcaggagcuggacaaguacaagaacgcggucacggaccugcagaugcucaugugcuccaccccggccgccggcagcggguccgccaucgcgagcggcaucgccgugugcaaggugcugcaccuggagggcgaggucaacaagaucaagaacgcccuccuguccaccaacaaggccguggugagccuguccaacggggucagcgugcucaccuucaaggugcuggaccugaagaacuacaucgacaagcagcuccugcccauccugaacaagcaguccugcagcauccccaaccccgagacggucauggaguuccagcagaagaacaaccggcuccuggagaucacccgcgaguucuccgugaacgccggcgugaccaccccggucagcacguacaugcugaccaacuccgagcuccugagccugaucaacgacaugcccaucaccaacgaccagaagaagcucaugagcaacaacgugcagaucgugcggcagcaguccuacagcaucaugugcaucaucaaggaggagguccuggcguacguggugcagcugccccucuacggggucaucgacacccccugcuggaagcugcacacguccccgcugugcaccaccaacaccaaggagggcagcaacaucugccucacgcgcaccgaccgggggugguacugcgacaacgccggcuccgugagcuucuucccccaggccgagaccugcaaggugugcuccaaccgcgucuucugcgacaccaugaacagccugacgcugcccuccgaggugaaccucugcaacaucgacaucuucaaccccaaguacgacugcaagaucaugaccagcaagaccgacgucuccagcuccgugaucaccagccugggcgccaucguguccugcuacgggaagacgaagugcaccgccagcaacaagaacaagggcaucaucaagaccuucuccaacgggugcgacuacgucagcaacaagggcguggacaccguguccgucggcaacacgcuguacuacgugaacaagcaggaggggcagagccucuacgugaagggcgagccgaucaucaacuucuacgacccccuggucuuccccagcgacgaguucgacgcguccaucagccaggugaacgagaagaucaaccagucccuggccuucauccgcaagagcgacgagcuccugcacaacgugaacgucgggaaguccaccaccaacaucaugaucaccaccaucaucaucgugaucaucgugauccugcuccugcugaucgccgucggccucuuccuguacugcaaggcccggugaggacuaguacuggcugcaucucccuuuccucuguccuccauccuucucccaggauggugaagggggaccugguacccagugauccccaccccaggauccuaaaucaugacuuaccugcuaauaaaaacucauuggaaaagugagaagaucuaaaaaaaaaaaaaaaaaaaaaaaaaaaaaaaaaaaaaaaaaaaaaaaaaaaaaaaaaaaaaaaaugcaucccccccccccccccccccccccccccccccaaaggcucuuuucagagccaccagaauu

SEQ ID NO: 18210 - RNA, 1914 nt, Artificial Sequence
  mRNA product Design e-6 comprising derived and/or modified sequence from HRSV(Memphis-37)__AIY60640.1__F-del_DSCav1_mut6 (opt2)
gggagagcggcucggccauuuugucccagucaguccggaggcugcggcugcagaaguaccgccugcggaguaacugcaaagaagcuuaccauggagcuccccauccucaagaccaacgccaucaccaccauccucgccgccgucacccucugcuucgccuccucccagaacaucaccgaggaguucuaccaguccaccugcuccgccgucuccaagggcuaccucggcgcccuccgcaccggcugguacaccuccgucaucaccaucgagcucuccaacaucaaggagaacaagugcaacggcaccgacgccaaggucaagcucaucaagcaggagcucgacaaguacaagaacgccgucaccgaccuccagaugcucaugugcuccacccccgccgccggcuccggcuccgccaucgccuccggcaucgccgucugcaagguccuccaccucgagggcgaggucaacaagaucaagaacgcccuccucuccaccaacaaggccgucgucucccucuccaacggcgucuccguccucaccuucaagguccucgaccucaagaacuacaucgacaagcagcuccuccccauccucaacaagcaguccugcuccauccccaaccccgagaccgucauggaguuccagcagaagaacaaccgccuccucgagaucacccgcgaguucuccgucaacgccggcgucaccacccccgucuccaccuacaugcucaccaacuccgagcuccucucccucaucaacgacaugcccaucaccaacgaccagaagaagcucauguccaacaacguccagaucguccgccagcaguccuacuccaucaugugcaucaucaaggaggagguccucgccuacgucguccagcucccccucuacggcgucaucgacacccccugcuggaagcuccacaccuccccccucugcaccaccaacaccaaggagggcuccaacaucugccucacccgcaccgaccgcggcugguacugcgacaacgccggcuccgucuccuucuucccccaggccgagaccugcaaggucugcuccaaccgcgucuucugcgacaccaugaacucccucacccuccccuccgaggucaaccucugcaacaucgacaucuucaaccccaaguacgacugcaagaucaugaccuccaagaccgacgucuccuccuccgucaucaccucccucggcgccaucgucuccugcuacggcaagaccaagugcaccgccuccaacaagaacaagggcaucaucaagaccuucuccaacggcugcgacuacgucuccaacaagggcgucgacaccgucuccgucggcaacacccucuacuacgucaacaagcaggagggccagucccucuacgucaagggcgagcccaucaucaacuucuacgacccccucgucuuccccuccgacgaguucgacgccuccaucucccaggucaacgagaagaucaaccagucccucgccuucauccgcaaguccgacgagcuccuccacaacgucaacgucggcaaguccaccaccaacaucaugaucaccaccaucaucaucgucaucaucgucauccuccuccuccucaucgccgucggccucuuccucuacugcaaggcccgcugaggacuaguacuggcugcaucucccuuuccucuguccuccauccuucucccaggauggugaagggggaccugguacccagugauccccaccccaggauccuaaaucaugacuuaccugcuaauaaaaacucauuggaaaagugagaagaucuaaaaaaaaaaaaaaaaaaaaaaaaaaaaaaaaaaaaaaaaaaaaaaaaaaaaaaaaaaaaaaaaugcaucccccccccccccccccccccccccccccccaaaggcucuuuucagagccaccagaauu

SEQ ID NO: 18211 - RNA, 1914 nt, Artificial Sequence
  mRNA product Design e-6 comprising derived and/or modified sequence from HRSV(Memphis-37)__AIY60640.1__F-del_DSCav1_mut6 (opt3)
gggagagcggcucggccauuuugucccagucaguccggaggcugcggcugcagaaguaccgccugcggaguaacugcaaagaagcuuaccauggagcugcccauccucaagaccaacgccauuacaacuauacuugcugcagugacgcugugcuucgccagcucccagaauaucaccgaagaguuuuaccaaucuacauguucagcggucaguaaaggcuauuugggggcuuuaagaacuggaugguacaccagcguuauuacaaucgaacuguccaacauuaaggagaauaaaugcaacgguaccgacgccaaggugaaacuaaucaagcaggaacucgauaaguauaaaaaugcaguaacugaccugcagaugcuuauguguucuacuccugccgcuggcucggggucagcaauagccagcggaaucgcugugugcaagguccugcacuuggagggcgaggugaacaaaauuaagaaugcccuccugaguaccaacaaagcgguugugucccugucuaauggugucagcgugcucacguucaagguauuagaucugaagaacuacaucgacaaacagcuuuugccaauucugaauaagcaauccuguucaaucccgaaccccgaaacuguuauggaguuucagcagaaaaauaacaggcuacucgaaauaacccgggaguucagugugaaugcaggggucacaacuccugugagcaccuauaugcugacaaacucugagcuucuguccuugauuaacgauaugccaaucaccaaugaccagaagaaacucaugucaaacaaugugcaaauuguccgccagcagagcuacaguaucaugugcaucauuaaggaagagguucuggccuaugugguacaguuaccccuguacggagugauagauacgccuuguuggaaacuccauacuucuccacuuugcacaaccaacacuaaggaaggcuccaauaucugucugacacgaaccgaccguggcugguacugcgauaacgcugggagcgucucguuuuucccccaagccgagacguguaaggugugcucuaauagaguuuucugcgacaccaugaacuccuugacacuaccuucagaagugaaucuguguaacauugauaucuucaauccaaaauaugacugcaagauaaugacaaguaaaaccgaugucagcuccucugugauuacaagccucggagcaaucguaucauguuacgguaagacuaaaugcaccgcuaguaacaagaauaagggcaucauuaaaacauuuuccaacgggugugacuauguuagcaauaagggaguggacaccgucucugugggcaacacucuguacuaugucaacaaacaggagggucagucacuuuacgugaagggggagccgaucauuaauuucuaugauccccugguuuuuccuagugacgaauuugaugccagcauaucccaagugaacgagaaaaucaaucagucuuuggcguuuauuaggaagucggacgaacuccugcacaacguaaaugucggaaagagcacgacaaacaucaugaucaccacuauuauaaucgugauuaucguuauuuuacugcuacucaucgccgugggccuguuccuuuacugcaaagcacggugaggacuaguacuggcugcaucucccuuuccucuguccuccauccuucucccaggauggugaagggggaccugguacccagugauccccaccccaggauccuaaaucaugacuuaccugcuaauaaaaacucauuggaaaagugagaagaucuaaaaaaaaaaaaaaaaaaaaaaaaaaaaaaaaaaaaaaaaaaaaaaaaaaaaaaaaaaaaaaaaugcaucccccccccccccccccccccccccccccccaaaggcucuuuucagagccaccagaauu

SEQ ID NO: 18212 - RNA, 1914 nt, Artificial Sequence
  mRNA product Design e-6 comprising derived and/or modified sequence from HRSV(Memphis-37)__AIY60640.1__F-del_DSCav1_mut6 (opt4)
gggagagcggcucggccauuuugucccagucaguccggaggcugcggcugcagaaguaccgccugcggaguaacugcaaagaagcuuaccauggagcugcccauccugaagaccaacgccaucaccaccauccuggccgccgugacccugugcuucgccagcagccagaacaucaccgaggaguucuaccagagcaccugcagcgccgugagcaagggcuaccugggcgcccugagaaccggcugguacaccagcgugaucaccaucgagcugagcaacaucaaggagaacaagugcaacggcaccgacgccaaggugaagcugaucaagcaggagcuggacaaguacaagaacgccgugaccgaccugcagaugcugaugugcagcacccccgccgccggcagcggcagcgccaucgccagcggcaucgccgugugcaaggugcugcaccuggagggcgaggugaacaagaucaagaacgcccugcugagcaccaacaaggccguggugagccugagcaacggcgugagcgugcugaccuucaaggugcuggaccugaagaacuacaucgacaagcagcugcugcccauccugaacaagcagagcugcagcauccccaaccccgagaccgugauggaguuccagcagaagaacaacagacugcuggagaucaccagagaguucagcgugaacgccggcgugaccacccccgugagcaccuacaugcugaccaacagcgagcugcugagccugaucaacgacaugcccaucaccaacgaccagaagaagcugaugagcaacaacgugcagaucgugagacagcagagcuacagcaucaugugcaucaucaaggaggaggugcuggccuacguggugcagcugccccuguacggcgugaucgacacccccugcuggaagcugcacaccagcccccugugcaccaccaacaccaaggagggcagcaacaucugccugaccagaaccgacagaggcugguacugcgacaacgccggcagcgugagcuucuucccccaggccgagaccugcaaggugugcagcaacagaguguucugcgacaccaugaacagccugacccugcccagcgaggugaaccugugcaacaucgacaucuucaaccccaaguacgacugcaagaucaugaccagcaagaccgacgugagcagcagcgugaucaccagccugggcgccaucgugagcugcuacggcaagaccaagugcaccgccagcaacaagaacaagggcaucaucaagaccuucagcaacggcugcgacuacgugagcaacaagggcguggacaccgugagcgugggcaacacccuguacuacgugaacaagcaggagggccagagccuguacgugaagggcgagcccaucaucaacuucuacgacccccugguguuccccagcgacgaguucgacgccagcaucagccaggugaacgagaagaucaaccagagccuggccuucaucagaaagagcgacgagcugcugcacaacgugaacgugggcaagagcaccaccaacaucaugaucaccaccaucaucaucgugaucaucgugauccugcugcugcugaucgccgugggccuguuccuguacugcaaggccagaugaggacuaguacuggcugcaucucccuuuccucuguccuccauccuucucccaggauggugaagggggaccugguacccagugauccccaccccaggauccuaaaucaugacuuaccugcuaauaaaaacucauuggaaaagugagaagaucuaaaaaaaaaaaaaaaaaaaaaaaaaaaaaaaaaaaaaaaaaaaaaaaaaaaaaaaaaaaaaaaaugcaucccccccccccccccccccccccccccccccaaaggcucuuuucagagccaccagaauu

SEQ ID NO: 18213 - RNA, 1914 nt, Artificial Sequence
  mRNA product Design e-6 comprising derived and/or modified sequence from HRSV(Memphis-37)__AIY60640.1__F-del_DSCav1_mut6 (opt5)
gggagagcggcucggccauuuugucccagucaguccggaggcugcggcugcagaaguaccgccugcggaguaacugcaaagaagcuuaccauggagcugcccauccucaagaccaacgccauuacaacgauccuggcugccgugacccuuugcuucgcgagcucccagaauauuacagaagaguuuuaccaaucuaccuguagcgcugucuccaaaggcuaucugggggcccucagaacaggaugguacaccucuguuaucacaauugaacugagcaacaucaaggagaauaaaugcaacggcaccgacgccaaggugaaacuuaucaagcaggaacuggauaaguauaaaaaugcugugacggaccuccagaugcugauguguuccaccccugccgcugggucuggaagcgccauugcguccggcaucgccgucugcaaggugcugcaccucgagggggagguuaacaaaauuaagaaugcucugcuuagcacaaacaaagccguggucucucuguccaauggagugagcguucucaccuucaaggugcuggaucuuaagaacuacaucgacaaacagcugcucccgauucugaauaagcaaucuuguuccauccccaacccugaaacagucauggaguuucagcagaaaaauaaccggcugcucgaaauuacccgcgaguucagcgugaaugcuggcgugacgacacccgucucuaccuauaugcugacaaacuccgagcuucugagccucaucaacgauaugccuaucaccaaugaccagaagaaacugauguccaacaauguucaaauugugagacagcagucuuacagcaucaugugcauuaucaaggaagaggugcuugccuaugucgugcagcugccccucuacggcguuauugauaccccuuguuggaaacugcauacauccccgcugugcacgaccaacacaaaggaagggagcaauaucugucucacccggacagaccgcggaugguacugcgauaacgcgggcucuguguccuuuuucccccaagccgagaccuguaaggucugcagcaauagaguguuuugcgacacgaugaacucucugacacuuccuagcgaaguuaaucuguguaacaucgauauuuucaaucccaaauaugacugcaagaucaugaccuccaaaaccgaugugucuagcuccgucauuacaagccucggggcuaucgugucuuguuacggaaagaccaaaugcacagccuccaacaagaauaagggcauuaucaaaacguuuagcaacgggugugacuaugucucuaauaagggaguggacaccguuuccgugggcaacacacuguacuaugucaacaaacaggagggccagagccuuuacgugaagggggagccuaucauuaauuucuaugauccccugguuuuuccguccgacgaauuugaugcuucuaucagccaagugaacgagaaaauuaaucagucccucgccuucauccggaagucugacgaacugcugcacaacgucaaugugggaaagagcaccacaaacauuaugaucaccacgauuaucaucgugauuaucguuauucuccugcuucugaucgccgucggccucuuccuguacugcaaagcucgcugaggacuaguacuggcugcaucucccuuuccucuguccuccauccuucucccaggauggugaagggggaccugguacccagugauccccaccccaggauccuaaaucaugacuuaccugcuaauaaaaacucauuggaaaagugagaagaucuaaaaaaaaaaaaaaaaaaaaaaaaaaaaaaaaaaaaaaaaaaaaaaaaaaaaaaaaaaaaaaaaugcaucccccccccccccccccccccccccccccccaaaggcucuuuucagagccaccagaauu

SEQ ID NO: 18214 - RNA, 1914 nt, Artificial Sequence
  mRNA product Design e-6 comprising derived and/or modified sequence from HRSV(Memphis-37)__AIY60640.1__F-del_DSCav1_mut6 (opt6)
gggagagcggcucggccauuuugucccagucaguccggaggcugcggcugcagaaguaccgccugcggaguaacugcaaagaagcuuaccauggaacuaccuauacuaaaaaccaacgccauaacaacaauacuagccgcaguuacacucugcuuugcauccucacaaaacaucacagaggaauuuuaccaaucuacuugcuccgcaguaucaaaaggauaccuaggagcacuccguacaggaugguacacaucagucauaacaauugaauuaucuaacaucaaagaaaacaaauguaaugguacagacgccaaaguaaaauuaauaaaacaagaacuagacaaauacaaaaacgccguaacagaccuacaaaugcuaaugugcucaacccccgccgcaggaucuggaucagcaauugccucaggcauagcaguaugcaaaguccuacaccuagaaggagaagucaacaaaauaaaaaacgcucuccucucaaccaauaaagcaguaguaucccucucaaacggaguaucaguacuaacauucaaaguacuagaccucaaaaauuauauagacaagcaacuacucccaauauuaaauaaacaauccugcucaauacccaauccagaaacagucauggaauuucaacaaaaaaacaaccgacucuuagaaauaacaagagaauuuucagucaaugccggcgucacaaccccaguaucaacauacaugcuaacaaacucagaacuacuaucacuaaucaacgauaugcccauaaccaacgaccaaaaaaaacuaaugucaaacaauguacaaauuguaagacaacagucuuauucaauaaugugcauaauaaaagaagaagucuuagcauauguaguacaacuaccacuauacggaguaauagacacaccauguuggaaauuacacacauccccacuauguaccaccaacacaaaagaaggaucuaacauaugccuaaccagaacagaccgaggcugguauugcgacaaugcaggaucaguauccuucuuuccacaagcagaaacaugcaaagucugcucuaacagaguauucugcgauacuaugaacucacuuaccuuaccaucagaaguaaaucuauguaauaucgacauauucaaucccaaauaugauugcaaaauaaugaccucaaaaacagauguaucaucaucagucauaacaucacuaggagcaauagucagcugcuaugggaaaacaaaaugcacagcuuccaacaaaaacaaaggaaucauaaaaacauucucaaaugguugugacuacguauccaacaaaggaguagauacaguaucuguaggcaacacauuauacuauguaaauaaacaagaaggacaaagccuauacgucaaaggagaacccaucauaaauuucuaugacccauuaguuuucccaucugacgaauuugacgcuuccaucucccaaguaaaugaaaaaaucaaccaaagccucgcauucauucgcaaaucugacgaauuacuccacaacguaaacguaggaaaauccacaacaaacauuaugaucaccaccauaauaaucguaauaauagucauauuacuacuccucauagcaguaggacuauuccuauacuguaaagcuagauaaggacuaguacuggcugcaucucccuuuccucuguccuccauccuucucccaggauggugaagggggaccugguacccagugauccccaccccaggauccuaaaucaugacuuaccugcuaauaaaaacucauuggaaaagugagaagaucuaaaaaaaaaaaaaaaaaaaaaaaaaaaaaaaaaaaaaaaaaaaaaaaaaaaaaaaaaaaaaaaaugcaucccccccccccccccccccccccccccccccaaaggcucuuuucagagccaccagaauu

SEQ ID NO: 18215 - RNA, 1914 nt, Artificial Sequence
  mRNA product Design e-6 comprising derived and/or modified sequence from HRSV(Memphis-37)__AIY60640.1__F-del_DSCav1_mut6 (opt11)
gggagagcggcucggccauuuugucccagucaguccggaggcugcggcugcagaaguaccgccugcggaguaacugcaaagaagcuuaccauggaauuaccaauccucaaaacuaacgccaucaccaccauccucgcugccgucacccucugcuucgccuccagccaaaacaucacagaagaguucuaccaaagcacaugcuccgcugucuccaaaggcuaccuuggcgcccuccgcaccggcugguacaccucaguaauuaccauugaacuaagcaacaucaaagaaaauaaaugcaacggcaccgacgccaaaguuaaacucauaaaacaggaacucgacaaauacaaaaacgccguaacagaccuccaaaugcucaugugcuccacccccgccgccggcucaggcuccgccaucgcaagcggaauagcaguuugcaaaguccuccaccuagaaggcgaggucaacaagauuaaaaacgcacuucucucaaccaacaaggccgucguaucacucucaaacggcgucuccguccucaccuucaaaguucuggaccucaaaaacuacaucgauaaacaacuacucccaauacuuaacaaacaaucaugcuccaucccaaaccccgaaaccgucauggaguuccaacagaaaaacaaccgccuacuggaaaucacacgcgaguucagcguaaacgcuggcgucacuacacccgucuccaccuacaugcucaccaauucugaacuccuaucacucauaaacgacaugcccauuaccaacgaccaaaagaaacuaaugucaaacaacguccaaaucguaagacaacaaucguauuccaucaugugcauaauuaaagaagaaguucucgccuacgugguccaacuaccccucuacggagucauagacacuccuuguuggaaacuccacaccucuccccucugcacuaccaacacaaaagaaggcuccaacaucugccucacccgaaccgacagaggcugguacugcgacaacgccggcuccgucuccuucuucccccaagccgaaaccugcaaagucugcuccaaccgcguuuucugcgacaccaugaacucccucacacuccccuccgaagucaaccuauguaacauagacauauucaacccaaaauacgacugcaaaaucaugacauccaaaaccgacgugucuuccucggucaucaccucccucggcgccaucgucucaugcuacggcaaaacuaaaugcaccgcauccaacaaaaacaaaggcauaaucaaaacauucuccaacggcugcgacuacguuucuaacaaaggcgucgauaccgucuccgucggaaacacccucuacuacguaaacaagcaagaaggccagucccuauacguaaaaggagaaccaauuaucaacuucuacgacccccuagucuuccccuccgacgaguucgacgccuccauaucccaagucaacgagaaaaucaaccaaucccuagccuucauccgcaaaucagacgaacuccuccacaacgucaacgucggaaaauccacaacuaacaucaugaucaccaccaucauuaucgucaucauaguuauacuccuccuccucauagccgucggccucuuccuauacugcaaagcucgcuaaggacuaguacuggcugcaucucccuuuccucuguccuccauccuucucccaggauggugaagggggaccugguacccagugauccccaccccaggauccuaaaucaugacuuaccugcuaauaaaaacucauuggaaaagugagaagaucuaaaaaaaaaaaaaaaaaaaaaaaaaaaaaaaaaaaaaaaaaaaaaaaaaaaaaaaaaaaaaaaaugcaucccccccccccccccccccccccccccccccaaaggcucuuuucagagccaccagaauu

SEQ ID NO: 18216 - RNA, 2130 nt, Artificial Sequence
  mRNA product Design f-1 comprising derived and/or modified sequence from HRSV(Memphis-37)__AIY60640.1__F-del_DSCav1_mut6 (opt1)
gggagagcggcucggccauuuugucccagucaguccggaggcugcggcugcagaaguaccgccugcggaguaacugcaaagaagcuuaccauggagcugcccauccucaagaccaacgccaucaccacgauccuggccgcggugacccugugcuucgccagcucccagaacaucaccgaggaguucuaccagagcacgugcuccgccgucagcaagggcuaccucggcgcccugcgcaccgggugguacaccagcgugaucaccaucgagcuguccaacaucaaggagaacaagugcaacggcaccgacgccaaggugaagcucaucaagcaggagcuggacaaguacaagaacgcggucacggaccugcagaugcugaugugcagcaccccggccgccggcuccgggagcgcgaucgccuccggcaucgccgucugcaaggugcugcaccucgagggcgaggugaacaagaucaagaacgcccugcuguccaccaacaaggccgucgugagccucuccaacggggugagcguccugaccuucaaggugcuggaccucaagaacuacaucgacaagcagcugcugcccauccugaacaagcagagcugcuccauccccaaccccgagaccgucauggaguuccagcagaagaacaaccgccuccuggagaucacgcgggaguucagcgugaacgcgggcgugaccacccccgucuccaccuacaugcugacgaacagcgagcuccugucccugaucaacgacaugccgaucaccaacgaccagaagaagcucaugagcaacaacgugcagaucgugcgccagcaguccuacagcaucaugugcaucaucaaggaggagguccuggccuacguggugcagcugccccucuacggggucaucgacacccccugcuggaagcugcacaccagcccccugugcacgaccaacaccaaggagggcuccaacaucugccucacccggacggaccgcgggugguacugcgacaacgccggcagcguguccuucuucccgcaggccgagaccugcaaggucugcagcaaccggguguucugcgacaccaugaacucccugacccugcccagcgaggugaaccucugcaacaucgacaucuucaaccccaaguacgacugcaagaucaugacguccaagaccgacgucagcuccagcgugaucaccucccugggcgccaucgugagcugcuacgggaagaccaagugcacggcgagcaacaagaacaagggcaucaucaagaccuucuccaacgggugcgacuacgucagcaacaagggcguggacaccguguccgucggcaacacccuguacuacgugaacaagcaggagggccagagccucuacgugaagggggagcccaucaucaacuucuacgacccgcuggucuuccccuccgacgaguucgacgccagcaucucccaggugaacgagaagaucaaccagagccuggccuucauccggaaguccgacgagcuccugcacaacgugaacgucggcaagagcaccacgaacaucaugaucaccaccaucaucaucgugaucaucgugauccugcugcuccugaucgccgucgggcuguuccucuacugcaaggcccgcugaggacuagugaagggaacacccaaauuuaauucagccuuaagcacaauuaauuaagagugaaacguaauuguacaagcaguuggucacccaccauagggcaugaucaacaccgcaaccuuuccuuuuucccccagugauucugaaaaaccccucuucccuucagcuugcuuagauguuccaaauuuaguaagcuuaaggcggccuacagaagaaaaagaaaaaaaaggccacaaaaguucccucucacuuucaguaaauaaaauaaaagcagcaacagaaauaaagaaauaaaugaaauucaaaaugaaauaaauauuguguugugcagcauuaaaaaaucaauaaaaauuaaaaaugagcaagaucuaaaaaaaaaaaaaaaaaaaaaaaaaaaaaaaaaaaaaaaaaaaaaaaaaaaaaaaaaaaaaaaaugcaucccccccccccccccccccccccccccccccaaaggcucuuuucagagccaccagaauu

SEQ ID NO: 18217 - RNA, 2130 nt, Artificial Sequence
  mRNA product Design f-1 comprising derived and/or modified sequence from HRSV(Memphis-37)__AIY60640.1__F-del_DSCav1_mut6 (opt1)
gggagagcggcucggccauuuugucccagucaguccggaggcugcggcugcagaaguaccgccugcggaguaacugcaaagaagcuuaccauggagcugcccauccucaagaccaacgccaucaccacgauccuggccgcggugacccugugcuucgccagcucccagaacaucaccgaggaguucuaccagagcacgugcuccgccgucagcaagggcuaccucggggcccugcgcaccggcugguacaccuccgugaucaccaucgagcugagcaacaucaaggagaacaagugcaacgggaccgacgccaaggugaagcucaucaagcaggagcuggacaaguacaagaacgcggucacggaccugcagaugcucaugugcuccaccccggccgccggcagcggguccgccaucgcgagcggcaucgccgugugcaaggugcugcaccuggagggcgaggucaacaagaucaagaacgcccuccuguccaccaacaaggccguggugagccuguccaacggggucagcgugcucaccuucaaggugcuggaccugaagaacuacaucgacaagcagcuccugcccauccugaacaagcaguccugcagcauccccaaccccgagacggucauggaguuccagcagaagaacaaccggcuccuggagaucacccgcgaguucuccgugaacgccggcgugaccaccccggucagcacguacaugcugaccaacuccgagcuccugagccugaucaacgacaugcccaucaccaacgaccagaagaagcucaugagcaacaacgugcagaucgugcggcagcaguccuacagcaucaugugcaucaucaaggaggagguccuggcguacguggugcagcugccccucuacggggucaucgacacccccugcuggaagcugcacacguccccgcugugcaccaccaacaccaaggagggcagcaacaucugccucacgcgcaccgaccgggggugguacugcgacaacgccggcuccgugagcuucuucccccaggccgagaccugcaaggugugcuccaaccgcgucuucugcgacaccaugaacagccugacgcugcccuccgaggugaaccucugcaacaucgacaucuucaaccccaaguacgacugcaagaucaugaccagcaagaccgacgucuccagcuccgugaucaccagccugggcgccaucguguccugcuacgggaagacgaagugcaccgccagcaacaagaacaagggcaucaucaagaccuucuccaacgggugcgacuacgucagcaacaagggcguggacaccguguccgucggcaacacgcuguacuacgugaacaagcaggaggggcagagccucuacgugaagggcgagccgaucaucaacuucuacgacccccuggucuuccccagcgacgaguucgacgcguccaucagccaggugaacgagaagaucaaccagucccuggccuucauccgcaagagcgacgagcuccugcacaacgugaacgucgggaaguccaccaccaacaucaugaucaccaccaucaucaucgugaucaucgugauccugcuccugcugaucgccgucggccucuuccuguacugcaaggcccggugaggacuagugaagggaacacccaaauuuaauucagccuuaagcacaauuaauuaagagugaaacguaauuguacaagcaguuggucacccaccauagggcaugaucaacaccgcaaccuuuccuuuuucccccagugauucugaaaaaccccucuucccuucagcuugcuuagauguuccaaauuuaguaagcuuaaggcggccuacagaagaaaaagaaaaaaaaggccacaaaaguucccucucacuuucaguaaauaaaauaaaagcagcaacagaaauaaagaaauaaaugaaauucaaaaugaaauaaauauuguguugugcagcauuaaaaaaucaauaaaaauuaaaaaugagcaagaucuaaaaaaaaaaaaaaaaaaaaaaaaaaaaaaaaaaaaaaaaaaaaaaaaaaaaaaaaaaaaaaaaugcaucccccccccccccccccccccccccccccccaaaggcucuuuucagagccaccagaauu

SEQ ID NO: 18218 - RNA, 2130 nt, Artificial Sequence
  mRNA product Design f-1 comprising derived and/or modified sequence from HRSV(Memphis-37)__AIY60640.1__F-del_DSCav1_mut6 (opt2)
gggagagcggcucggccauuuugucccagucaguccggaggcugcggcugcagaaguaccgccugcggaguaacugcaaagaagcuuaccauggagcuccccauccucaagaccaacgccaucaccaccauccucgccgccgucacccucugcuucgccuccucccagaacaucaccgaggaguucuaccaguccaccugcuccgccgucuccaagggcuaccucggcgcccuccgcaccggcugguacaccuccgucaucaccaucgagcucuccaacaucaaggagaacaagugcaacggcaccgacgccaaggucaagcucaucaagcaggagcucgacaaguacaagaacgccgucaccgaccuccagaugcucaugugcuccacccccgccgccggcuccggcuccgccaucgccuccggcaucgccgucugcaagguccuccaccucgagggcgaggucaacaagaucaagaacgcccuccucuccaccaacaaggccgucgucucccucuccaacggcgucuccguccucaccuucaagguccucgaccucaagaacuacaucgacaagcagcuccuccccauccucaacaagcaguccugcuccauccccaaccccgagaccgucauggaguuccagcagaagaacaaccgccuccucgagaucacccgcgaguucuccgucaacgccggcgucaccacccccgucuccaccuacaugcucaccaacuccgagcuccucucccucaucaacgacaugcccaucaccaacgaccagaagaagcucauguccaacaacguccagaucguccgccagcaguccuacuccaucaugugcaucaucaaggaggagguccucgccuacgucguccagcucccccucuacggcgucaucgacacccccugcuggaagcuccacaccuccccccucugcaccaccaacaccaaggagggcuccaacaucugccucacccgcaccgaccgcggcugguacugcgacaacgccggcuccgucuccuucuucccccaggccgagaccugcaaggucugcuccaaccgcgucuucugcgacaccaugaacucccucacccuccccuccgaggucaaccucugcaacaucgacaucuucaaccccaaguacgacugcaagaucaugaccuccaagaccgacgucuccuccuccgucaucaccucccucggcgccaucgucuccugcuacggcaagaccaagugcaccgccuccaacaagaacaagggcaucaucaagaccuucuccaacggcugcgacuacgucuccaacaagggcgucgacaccgucuccgucggcaacacccucuacuacgucaacaagcaggagggccagucccucuacgucaagggcgagcccaucaucaacuucuacgacccccucgucuuccccuccgacgaguucgacgccuccaucucccaggucaacgagaagaucaaccagucccucgccuucauccgcaaguccgacgagcuccuccacaacgucaacgucggcaaguccaccaccaacaucaugaucaccaccaucaucaucgucaucaucgucauccuccuccuccucaucgccgucggccucuuccucuacugcaaggcccgcugaggacuagugaagggaacacccaaauuuaauucagccuuaagcacaauuaauuaagagugaaacguaauuguacaagcaguuggucacccaccauagggcaugaucaacaccgcaaccuuuccuuuuucccccagugauucugaaaaaccccucuucccuucagcuugcuuagauguuccaaauuuaguaagcuuaaggcggccuacagaagaaaaagaaaaaaaaggccacaaaaguucccucucacuuucaguaaauaaaauaaaagcagcaacagaaauaaagaaauaaaugaaauucaaaaugaaauaaauauuguguugugcagcauuaaaaaaucaauaaaaauuaaaaaugagcaagaucuaaaaaaaaaaaaaaaaaaaaaaaaaaaaaaaaaaaaaaaaaaaaaaaaaaaaaaaaaaaaaaaaugcaucccccccccccccccccccccccccccccccaaaggcucuuuucagagccaccagaauu

SEQ ID NO: 18219 - RNA, 2130 nt, Artificial Sequence
  mRNA product Design f-1 comprising derived and/or modified sequence from HRSV(Memphis-37)__AIY60640.1__F-del_DSCav1_mut6 (opt3)
gggagagcggcucggccauuuugucccagucaguccggaggcugcggcugcagaaguaccgccugcggaguaacugcaaagaagcuuaccauggagcugcccauccucaagaccaacgccauuacaacuauacuugcugcagugacgcugugcuucgccagcucccagaauaucaccgaagaguuuuaccaaucuacauguucagcggucaguaaaggcuauuugggggcuuuaagaacuggaugguacaccagcguuauuacaaucgaacuguccaacauuaaggagaauaaaugcaacgguaccgacgccaaggugaaacuaaucaagcaggaacucgauaaguauaaaaaugcaguaacugaccugcagaugcuuauguguucuacuccugccgcuggcucggggucagcaauagccagcggaaucgcugugugcaagguccugcacuuggagggcgaggugaacaaaauuaagaaugcccuccugaguaccaacaaagcgguugugucccugucuaauggugucagcgugcucacguucaagguauuagaucugaagaacuacaucgacaaacagcuuuugccaauucugaauaagcaauccuguucaaucccgaaccccgaaacuguuauggaguuucagcagaaaaauaacaggcuacucgaaauaacccgggaguucagugugaaugcaggggucacaacuccugugagcaccuauaugcugacaaacucugagcuucuguccuugauuaacgauaugccaaucaccaaugaccagaagaaacucaugucaaacaaugugcaaauuguccgccagcagagcuacaguaucaugugcaucauuaaggaagagguucuggccuaugugguacaguuaccccuguacggagugauagauacgccuuguuggaaacuccauacuucuccacuuugcacaaccaacacuaaggaaggcuccaauaucugucugacacgaaccgaccguggcugguacugcgauaacgcugggagcgucucguuuuucccccaagccgagacguguaaggugugcucuaauagaguuuucugcgacaccaugaacuccuugacacuaccuucagaagugaaucuguguaacauugauaucuucaauccaaaauaugacugcaagauaaugacaaguaaaaccgaugucagcuccucugugauuacaagccucggagcaaucguaucauguuacgguaagacuaaaugcaccgcuaguaacaagaauaagggcaucauuaaaacauuuuccaacgggugugacuauguuagcaauaagggaguggacaccgucucugugggcaacacucuguacuaugucaacaaacaggagggucagucacuuuacgugaagggggagccgaucauuaauuucuaugauccccugguuuuuccuagugacgaauuugaugccagcauaucccaagugaacgagaaaaucaaucagucuuuggcguuuauuaggaagucggacgaacuccugcacaacguaaaugucggaaagagcacgacaaacaucaugaucaccacuauuauaaucgugauuaucguuauuuuacugcuacucaucgccgugggccuguuccuuuacugcaaagcacggugaggacuagugaagggaacacccaaauuuaauucagccuuaagcacaauuaauuaagagugaaacguaauuguacaagcaguuggucacccaccauagggcaugaucaacaccgcaaccuuuccuuuuucccccagugauucugaaaaaccccucuucccuucagcuugcuuagauguuccaaauuuaguaagcuuaaggcggccuacagaagaaaaagaaaaaaaaggccacaaaaguucccucucacuuucaguaaauaaaauaaaagcagcaacagaaauaaagaaauaaaugaaauucaaaaugaaauaaauauuguguugugcagcauuaaaaaaucaauaaaaauuaaaaaugagcaagaucuaaaaaaaaaaaaaaaaaaaaaaaaaaaaaaaaaaaaaaaaaaaaaaaaaaaaaaaaaaaaaaaaugcaucccccccccccccccccccccccccccccccaaaggcucuuuucagagccaccagaauu

SEQ ID NO: 18220 - RNA, 2130 nt, Artificial Sequence
  mRNA product Design f-1 comprising derived and/or modified sequence from HRSV(Memphis-37)__AIY60640.1__F-del_DSCav1_mut6 (opt4)
gggagagcggcucggccauuuugucccagucaguccggaggcugcggcugcagaaguaccgccugcggaguaacugcaaagaagcuuaccauggagcugcccauccugaagaccaacgccaucaccaccauccuggccgccgugacccugugcuucgccagcagccagaacaucaccgaggaguucuaccagagcaccugcagcgccgugagcaagggcuaccugggcgcccugagaaccggcugguacaccagcgugaucaccaucgagcugagcaacaucaaggagaacaagugcaacggcaccgacgccaaggugaagcugaucaagcaggagcuggacaaguacaagaacgccgugaccgaccugcagaugcugaugugcagcacccccgccgccggcagcggcagcgccaucgccagcggcaucgccgugugcaaggugcugcaccuggagggcgaggugaacaagaucaagaacgcccugcugagcaccaacaaggccguggugagccugagcaacggcgugagcgugcugaccuucaaggugcuggaccugaagaacuacaucgacaagcagcugcugcccauccugaacaagcagagcugcagcauccccaaccccgagaccgugauggaguuccagcagaagaacaacagacugcuggagaucaccagagaguucagcgugaacgccggcgugaccacccccgugagcaccuacaugcugaccaacagcgagcugcugagccugaucaacgacaugcccaucaccaacgaccagaagaagcugaugagcaacaacgugcagaucgugagacagcagagcuacagcaucaugugcaucaucaaggaggaggugcuggccuacguggugcagcugccccuguacggcgugaucgacacccccugcuggaagcugcacaccagcccccugugcaccaccaacaccaaggagggcagcaacaucugccugaccagaaccgacagaggcugguacugcgacaacgccggcagcgugagcuucuucccccaggccgagaccugcaaggugugcagcaacagaguguucugcgacaccaugaacagccugacccugcccagcgaggugaaccugugcaacaucgacaucuucaaccccaaguacgacugcaagaucaugaccagcaagaccgacgugagcagcagcgugaucaccagccugggcgccaucgugagcugcuacggcaagaccaagugcaccgccagcaacaagaacaagggcaucaucaagaccuucagcaacggcugcgacuacgugagcaacaagggcguggacaccgugagcgugggcaacacccuguacuacgugaacaagcaggagggccagagccuguacgugaagggcgagcccaucaucaacuucuacgacccccugguguuccccagcgacgaguucgacgccagcaucagccaggugaacgagaagaucaaccagagccuggccuucaucagaaagagcgacgagcugcugcacaacgugaacgugggcaagagcaccaccaacaucaugaucaccaccaucaucaucgugaucaucgugauccugcugcugcugaucgccgugggccuguuccuguacugcaaggccagaugaggacuagugaagggaacacccaaauuuaauucagccuuaagcacaauuaauuaagagugaaacguaauuguacaagcaguuggucacccaccauagggcaugaucaacaccgcaaccuuuccuuuuucccccagugauucugaaaaaccccucuucccuucagcuugcuuagauguuccaaauuuaguaagcuuaaggcggccuacagaagaaaaagaaaaaaaaggccacaaaaguucccucucacuuucaguaaauaaaauaaaagcagcaacagaaauaaagaaauaaaugaaauucaaaaugaaauaaauauuguguugugcagcauuaaaaaaucaauaaaaauuaaaaaugagcaagaucuaaaaaaaaaaaaaaaaaaaaaaaaaaaaaaaaaaaaaaaaaaaaaaaaaaaaaaaaaaaaaaaaugcaucccccccccccccccccccccccccccccccaaaggcucuuuucagagccaccagaauu

SEQ ID NO: 18221 - RNA, 2130 nt, Artificial Sequence
  mRNA product Design f-1 comprising derived and/or modified sequence from HRSV(Memphis-37)__AIY60640.1__F-del_DSCav1_mut6 (opt5)
gggagagcggcucggccauuuugucccagucaguccggaggcugcggcugcagaaguaccgccugcggaguaacugcaaagaagcuuaccauggagcugcccauccucaagaccaacgccauuacaacgauccuggcugccgugacccuuugcuucgcgagcucccagaauauuacagaagaguuuuaccaaucuaccuguagcgcugucuccaaaggcuaucugggggcccucagaacaggaugguacaccucuguuaucacaauugaacugagcaacaucaaggagaauaaaugcaacggcaccgacgccaaggugaaacuuaucaagcaggaacuggauaaguauaaaaaugcugugacggaccuccagaugcugauguguuccaccccugccgcugggucuggaagcgccauugcguccggcaucgccgucugcaaggugcugcaccucgagggggagguuaacaaaauuaagaaugcucugcuuagcacaaacaaagccguggucucucuguccaauggagugagcguucucaccuucaaggugcuggaucuuaagaacuacaucgacaaacagcugcucccgauucugaauaagcaaucuuguuccauccccaacccugaaacagucauggaguuucagcagaaaaauaaccggcugcucgaaauuacccgcgaguucagcgugaaugcuggcgugacgacacccgucucuaccuauaugcugacaaacuccgagcuucugagccucaucaacgauaugccuaucaccaaugaccagaagaaacugauguccaacaauguucaaauugugagacagcagucuuacagcaucaugugcauuaucaaggaagaggugcuugccuaugucgugcagcugccccucuacggcguuauugauaccccuuguuggaaacugcauacauccccgcugugcacgaccaacacaaaggaagggagcaauaucugucucacccggacagaccgcggaugguacugcgauaacgcgggcucuguguccuuuuucccccaagccgagaccuguaaggucugcagcaauagaguguuuugcgacacgaugaacucucugacacuuccuagcgaaguuaaucuguguaacaucgauauuuucaaucccaaauaugacugcaagaucaugaccuccaaaaccgaugugucuagcuccgucauuacaagccucggggcuaucgugucuuguuacggaaagaccaaaugcacagccuccaacaagaauaagggcauuaucaaaacguuuagcaacgggugugacuaugucucuaauaagggaguggacaccguuuccgugggcaacacacuguacuaugucaacaaacaggagggccagagccuuuacgugaagggggagccuaucauuaauuucuaugauccccugguuuuuccguccgacgaauuugaugcuucuaucagccaagugaacgagaaaauuaaucagucccucgccuucauccggaagucugacgaacugcugcacaacgucaaugugggaaagagcaccacaaacauuaugaucaccacgauuaucaucgugauuaucguuauucuccugcuucugaucgccgucggccucuuccuguacugcaaagcucgcugaggacuagugaagggaacacccaaauuuaauucagccuuaagcacaauuaauuaagagugaaacguaauuguacaagcaguuggucacccaccauagggcaugaucaacaccgcaaccuuuccuuuuucccccagugauucugaaaaaccccucuucccuucagcuugcuuagauguuccaaauuuaguaagcuuaaggcggccuacagaagaaaaagaaaaaaaaggccacaaaaguucccucucacuuucaguaaauaaaauaaaagcagcaacagaaauaaagaaauaaaugaaauucaaaaugaaauaaauauuguguugugcagcauuaaaaaaucaauaaaaauuaaaaaugagcaagaucuaaaaaaaaaaaaaaaaaaaaaaaaaaaaaaaaaaaaaaaaaaaaaaaaaaaaaaaaaaaaaaaaugcaucccccccccccccccccccccccccccccccaaaggcucuuuucagagccaccagaauu

SEQ ID NO: 18222 - RNA, 2130 nt, Artificial Sequence
  mRNA product Design f-1 comprising derived and/or modified sequence from HRSV(Memphis-37)__AIY60640.1__F-del_DSCav1_mut6 (opt6)
gggagagcggcucggccauuuugucccagucaguccggaggcugcggcugcagaaguaccgccugcggaguaacugcaaagaagcuuaccauggaacuaccuauacuaaaaaccaacgccauaacaacaauacuagccgcaguuacacucugcuuugcauccucacaaaacaucacagaggaauuuuaccaaucuacuugcuccgcaguaucaaaaggauaccuaggagcacuccguacaggaugguacacaucagucauaacaauugaauuaucuaacaucaaagaaaacaaauguaaugguacagacgccaaaguaaaauuaauaaaacaagaacuagacaaauacaaaaacgccguaacagaccuacaaaugcuaaugugcucaacccccgccgcaggaucuggaucagcaauugccucaggcauagcaguaugcaaaguccuacaccuagaaggagaagucaacaaaauaaaaaacgcucuccucucaaccaauaaagcaguaguaucccucucaaacggaguaucaguacuaacauucaaaguacuagaccucaaaaauuauauagacaagcaacuacucccaauauuaaauaaacaauccugcucaauacccaauccagaaacagucauggaauuucaacaaaaaaacaaccgacucuuagaaauaacaagagaauuuucagucaaugccggcgucacaaccccaguaucaacauacaugcuaacaaacucagaacuacuaucacuaaucaacgauaugcccauaaccaacgaccaaaaaaaacuaaugucaaacaauguacaaauuguaagacaacagucuuauucaauaaugugcauaauaaaagaagaagucuuagcauauguaguacaacuaccacuauacggaguaauagacacaccauguuggaaauuacacacauccccacuauguaccaccaacacaaaagaaggaucuaacauaugccuaaccagaacagaccgaggcugguauugcgacaaugcaggaucaguauccuucuuuccacaagcagaaacaugcaaagucugcucuaacagaguauucugcgauacuaugaacucacuuaccuuaccaucagaaguaaaucuauguaauaucgacauauucaaucccaaauaugauugcaaaauaaugaccucaaaaacagauguaucaucaucagucauaacaucacuaggagcaauagucagcugcuaugggaaaacaaaaugcacagcuuccaacaaaaacaaaggaaucauaaaaacauucucaaaugguugugacuacguauccaacaaaggaguagauacaguaucuguaggcaacacauuauacuauguaaauaaacaagaaggacaaagccuauacgucaaaggagaacccaucauaaauuucuaugacccauuaguuuucccaucugacgaauuugacgcuuccaucucccaaguaaaugaaaaaaucaaccaaagccucgcauucauucgcaaaucugacgaauuacuccacaacguaaacguaggaaaauccacaacaaacauuaugaucaccaccauaauaaucguaauaauagucauauuacuacuccucauagcaguaggacuauuccuauacuguaaagcuagauaaggacuagugaagggaacacccaaauuuaauucagccuuaagcacaauuaauuaagagugaaacguaauuguacaagcaguuggucacccaccauagggcaugaucaacaccgcaaccuuuccuuuuucccccagugauucugaaaaaccccucuucccuucagcuugcuuagauguuccaaauuuaguaagcuuaaggcggccuacagaagaaaaagaaaaaaaaggccacaaaaguucccucucacuuucaguaaauaaaauaaaagcagcaacagaaauaaagaaauaaaugaaauucaaaaugaaauaaauauuguguugugcagcauuaaaaaaucaauaaaaauuaaaaaugagcaagaucuaaaaaaaaaaaaaaaaaaaaaaaaaaaaaaaaaaaaaaaaaaaaaaaaaaaaaaaaaaaaaaaaugcaucccccccccccccccccccccccccccccccaaaggcucuuuucagagccaccagaauu

SEQ ID NO: 18223 - RNA, 2130 nt, Artificial Sequence
  mRNA product Design f-1 comprising derived and/or modified sequence from HRSV(Memphis-37)__AIY60640.1__F-del_DSCav1_mut6 (opt11)
gggagagcggcucggccauuuugucccagucaguccggaggcugcggcugcagaaguaccgccugcggaguaacugcaaagaagcuuaccauggaauuaccaauccucaaaacuaacgccaucaccaccauccucgcugccgucacccucugcuucgccuccagccaaaacaucacagaagaguucuaccaaagcacaugcuccgcugucuccaaaggcuaccuuggcgcccuccgcaccggcugguacaccucaguaauuaccauugaacuaagcaacaucaaagaaaauaaaugcaacggcaccgacgccaaaguuaaacucauaaaacaggaacucgacaaauacaaaaacgccguaacagaccuccaaaugcucaugugcuccacccccgccgccggcucaggcuccgccaucgcaagcggaauagcaguuugcaaaguccuccaccuagaaggcgaggucaacaagauuaaaaacgcacuucucucaaccaacaaggccgucguaucacucucaaacggcgucuccguccucaccuucaaaguucuggaccucaaaaacuacaucgauaaacaacuacucccaauacuuaacaaacaaucaugcuccaucccaaaccccgaaaccgucauggaguuccaacagaaaaacaaccgccuacuggaaaucacacgcgaguucagcguaaacgcuggcgucacuacacccgucuccaccuacaugcucaccaauucugaacuccuaucacucauaaacgacaugcccauuaccaacgaccaaaagaaacuaaugucaaacaacguccaaaucguaagacaacaaucguauuccaucaugugcauaauuaaagaagaaguucucgccuacgugguccaacuaccccucuacggagucauagacacuccuuguuggaaacuccacaccucuccccucugcacuaccaacacaaaagaaggcuccaacaucugccucacccgaaccgacagaggcugguacugcgacaacgccggcuccgucuccuucuucccccaagccgaaaccugcaaagucugcuccaaccgcguuuucugcgacaccaugaacucccucacacuccccuccgaagucaaccuauguaacauagacauauucaacccaaaauacgacugcaaaaucaugacauccaaaaccgacgugucuuccucggucaucaccucccucggcgccaucgucucaugcuacggcaaaacuaaaugcaccgcauccaacaaaaacaaaggcauaaucaaaacauucuccaacggcugcgacuacguuucuaacaaaggcgucgauaccgucuccgucggaaacacccucuacuacguaaacaagcaagaaggccagucccuauacguaaaaggagaaccaauuaucaacuucuacgacccccuagucuuccccuccgacgaguucgacgccuccauaucccaagucaacgagaaaaucaaccaaucccuagccuucauccgcaaaucagacgaacuccuccacaacgucaacgucggaaaauccacaacuaacaucaugaucaccaccaucauuaucgucaucauaguuauacuccuccuccucauagccgucggccucuuccuauacugcaaagcucgcuaaggacuagugaagggaacacccaaauuuaauucagccuuaagcacaauuaauuaagagugaaacguaauuguacaagcaguuggucacccaccauagggcaugaucaacaccgcaaccuuuccuuuuucccccagugauucugaaaaaccccucuucccuucagcuugcuuagauguuccaaauuuaguaagcuuaaggcggccuacagaagaaaaagaaaaaaaaggccacaaaaguucccucucacuuucaguaaauaaaauaaaagcagcaacagaaauaaagaaauaaaugaaauucaaaaugaaauaaauauuguguugugcagcauuaaaaaaucaauaaaaauuaaaaaugagcaagaucuaaaaaaaaaaaaaaaaaaaaaaaaaaaaaaaaaaaaaaaaaaaaaaaaaaaaaaaaaaaaaaaaugcaucccccccccccccccccccccccccccccccaaaggcucuuuucagagccaccagaauu

SEQ ID NO: 18224 - RNA, 1910 nt, Artificial Sequence
  mRNA product Design f-2 comprising derived and/or modified sequence from HRSV(Memphis-37)__AIY60640.1__F-del_DSCav1_mut6 (opt1)
gggagagcggcucggccauuuugucccagucaguccggaggcugcggcugcagaaguaccgccugcggaguaacugcaaagaagcuuaccauggagcugcccauccucaagaccaacgccaucaccacgauccuggccgcggugacccugugcuucgccagcucccagaacaucaccgaggaguucuaccagagcacgugcuccgccgucagcaagggcuaccucggcgcccugcgcaccgggugguacaccagcgugaucaccaucgagcuguccaacaucaaggagaacaagugcaacggcaccgacgccaaggugaagcucaucaagcaggagcuggacaaguacaagaacgcggucacggaccugcagaugcugaugugcagcaccccggccgccggcuccgggagcgcgaucgccuccggcaucgccgucugcaaggugcugcaccucgagggcgaggugaacaagaucaagaacgcccugcuguccaccaacaaggccgucgugagccucuccaacggggugagcguccugaccuucaaggugcuggaccucaagaacuacaucgacaagcagcugcugcccauccugaacaagcagagcugcuccauccccaaccccgagaccgucauggaguuccagcagaagaacaaccgccuccuggagaucacgcgggaguucagcgugaacgcgggcgugaccacccccgucuccaccuacaugcugacgaacagcgagcuccugucccugaucaacgacaugccgaucaccaacgaccagaagaagcucaugagcaacaacgugcagaucgugcgccagcaguccuacagcaucaugugcaucaucaaggaggagguccuggccuacguggugcagcugccccucuacggggucaucgacacccccugcuggaagcugcacaccagcccccugugcacgaccaacaccaaggagggcuccaacaucugccucacccggacggaccgcgggugguacugcgacaacgccggcagcguguccuucuucccgcaggccgagaccugcaaggucugcagcaaccggguguucugcgacaccaugaacucccugacccugcccagcgaggugaaccucugcaacaucgacaucuucaaccccaaguacgacugcaagaucaugacguccaagaccgacgucagcuccagcgugaucaccucccugggcgccaucgugagcugcuacgggaagaccaagugcacggcgagcaacaagaacaagggcaucaucaagaccuucuccaacgggugcgacuacgucagcaacaagggcguggacaccguguccgucggcaacacccuguacuacgugaacaagcaggagggccagagccucuacgugaagggggagcccaucaucaacuucuacgacccgcuggucuuccccuccgacgaguucgacgccagcaucucccaggugaacgagaagaucaaccagagccuggccuucauccggaaguccgacgagcuccugcacaacgugaacgucggcaagagcaccacgaacaucaugaucaccaccaucaucaucgugaucaucgugauccugcugcuccugaucgccgucgggcuguuccucuacugcaaggcccgcugaggacuaguggaagcauuuuccuggcugauuaaaagaaauuacucagcuauggucaucuguuccuguuagaaggcuaugcagcauauuauauacuaugcgcauguuaugaaaugcauaauaaaaaauuuuaaaaaaucuaaaagaucuaaaaaaaaaaaaaaaaaaaaaaaaaaaaaaaaaaaaaaaaaaaaaaaaaaaaaaaaaaaaaaaaugcaucccccccccccccccccccccccccccccccaaaggcucuuuucagagccaccagaauu

SEQ ID NO: 18225 - RNA, 1910 nt, Artificial Sequence
  mRNA product Design f-2 comprising derived and/or modified sequence from HRSV(Memphis-37)__AIY60640.1__F-del_DSCav1_mut6 (opt1)
gggagagcggcucggccauuuugucccagucaguccggaggcugcggcugcagaaguaccgccugcggaguaacugcaaagaagcuuaccauggagcugcccauccucaagaccaacgccaucaccacgauccuggccgcggugacccugugcuucgccagcucccagaacaucaccgaggaguucuaccagagcacgugcuccgccgucagcaagggcuaccucggggcccugcgcaccggcugguacaccuccgugaucaccaucgagcugagcaacaucaaggagaacaagugcaacgggaccgacgccaaggugaagcucaucaagcaggagcuggacaaguacaagaacgcggucacggaccugcagaugcucaugugcuccaccccggccgccggcagcggguccgccaucgcgagcggcaucgccgugugcaaggugcugcaccuggagggcgaggucaacaagaucaagaacgcccuccuguccaccaacaaggccguggugagccuguccaacggggucagcgugcucaccuucaaggugcuggaccugaagaacuacaucgacaagcagcuccugcccauccugaacaagcaguccugcagcauccccaaccccgagacggucauggaguuccagcagaagaacaaccggcuccuggagaucacccgcgaguucuccgugaacgccggcgugaccaccccggucagcacguacaugcugaccaacuccgagcuccugagccugaucaacgacaugcccaucaccaacgaccagaagaagcucaugagcaacaacgugcagaucgugcggcagcaguccuacagcaucaugugcaucaucaaggaggagguccuggcguacguggugcagcugccccucuacggggucaucgacacccccugcuggaagcugcacacguccccgcugugcaccaccaacaccaaggagggcagcaacaucugccucacgcgcaccgaccgggggugguacugcgacaacgccggcuccgugagcuucuucccccaggccgagaccugcaaggugugcuccaaccgcgucuucugcgacaccaugaacagccugacgcugcccuccgaggugaaccucugcaacaucgacaucuucaaccccaaguacgacugcaagaucaugaccagcaagaccgacgucuccagcuccgugaucaccagccugggcgccaucguguccugcuacgggaagacgaagugcaccgccagcaacaagaacaagggcaucaucaagaccuucuccaacgggugcgacuacgucagcaacaagggcguggacaccguguccgucggcaacacgcuguacuacgugaacaagcaggaggggcagagccucuacgugaagggcgagccgaucaucaacuucuacgacccccuggucuuccccagcgacgaguucgacgcguccaucagccaggugaacgagaagaucaaccagucccuggccuucauccgcaagagcgacgagcuccugcacaacgugaacgucgggaaguccaccaccaacaucaugaucaccaccaucaucaucgugaucaucgugauccugcuccugcugaucgccgucggccucuuccuguacugcaaggcccggugaggacuaguggaagcauuuuccuggcugauuaaaagaaauuacucagcuauggucaucuguuccuguuagaaggcuaugcagcauauuauauacuaugcgcauguuaugaaaugcauaauaaaaaauuuuaaaaaaucuaaaagaucuaaaaaaaaaaaaaaaaaaaaaaaaaaaaaaaaaaaaaaaaaaaaaaaaaaaaaaaaaaaaaaaaugcaucccccccccccccccccccccccccccccccaaaggcucuuuucagagccaccagaauu

SEQ ID NO: 18226 - RNA, 1910 nt, Artificial Sequence
  mRNA product Design f-2 comprising derived and/or modified sequence from HRSV(Memphis-37)__AIY60640.1__F-del_DSCav1_mut6 (opt2)
gggagagcggcucggccauuuugucccagucaguccggaggcugcggcugcagaaguaccgccugcggaguaacugcaaagaagcuuaccauggagcuccccauccucaagaccaacgccaucaccaccauccucgccgccgucacccucugcuucgccuccucccagaacaucaccgaggaguucuaccaguccaccugcuccgccgucuccaagggcuaccucggcgcccuccgcaccggcugguacaccuccgucaucaccaucgagcucuccaacaucaaggagaacaagugcaacggcaccgacgccaaggucaagcucaucaagcaggagcucgacaaguacaagaacgccgucaccgaccuccagaugcucaugugcuccacccccgccgccggcuccggcuccgccaucgccuccggcaucgccgucugcaagguccuccaccucgagggcgaggucaacaagaucaagaacgcccuccucuccaccaacaaggccgucgucucccucuccaacggcgucuccguccucaccuucaagguccucgaccucaagaacuacaucgacaagcagcuccuccccauccucaacaagcaguccugcuccauccccaaccccgagaccgucauggaguuccagcagaagaacaaccgccuccucgagaucacccgcgaguucuccgucaacgccggcgucaccacccccgucuccaccuacaugcucaccaacuccgagcuccucucccucaucaacgacaugcccaucaccaacgaccagaagaagcucauguccaacaacguccagaucguccgccagcaguccuacuccaucaugugcaucaucaaggaggagguccucgccuacgucguccagcucccccucuacggcgucaucgacacccccugcuggaagcuccacaccuccccccucugcaccaccaacaccaaggagggcuccaacaucugccucacccgcaccgaccgcggcugguacugcgacaacgccggcuccgucuccuucuucccccaggccgagaccugcaaggucugcuccaaccgcgucuucugcgacaccaugaacucccucacccuccccuccgaggucaaccucugcaacaucgacaucuucaaccccaaguacgacugcaagaucaugaccuccaagaccgacgucuccuccuccgucaucaccucccucggcgccaucgucuccugcuacggcaagaccaagugcaccgccuccaacaagaacaagggcaucaucaagaccuucuccaacggcugcgacuacgucuccaacaagggcgucgacaccgucuccgucggcaacacccucuacuacgucaacaagcaggagggccagucccucuacgucaagggcgagcccaucaucaacuucuacgacccccucgucuuccccuccgacgaguucgacgccuccaucucccaggucaacgagaagaucaaccagucccucgccuucauccgcaaguccgacgagcuccuccacaacgucaacgucggcaaguccaccaccaacaucaugaucaccaccaucaucaucgucaucaucgucauccuccuccuccucaucgccgucggccucuuccucuacugcaaggcccgcugaggacuaguggaagcauuuuccuggcugauuaaaagaaauuacucagcuauggucaucuguuccuguuagaaggcuaugcagcauauuauauacuaugcgcauguuaugaaaugcauaauaaaaaauuuuaaaaaaucuaaaagaucuaaaaaaaaaaaaaaaaaaaaaaaaaaaaaaaaaaaaaaaaaaaaaaaaaaaaaaaaaaaaaaaaugcaucccccccccccccccccccccccccccccccaaaggcucuuuucagagccaccagaauu

SEQ ID NO: 18227 - RNA, 1910 nt, Artificial Sequence
  mRNA product Design f-2 comprising derived and/or modified sequence from HRSV(Memphis-37)__AIY60640.1__F-del_DSCav1_mut6 (opt3)
gggagagcggcucggccauuuugucccagucaguccggaggcugcggcugcagaaguaccgccugcggaguaacugcaaagaagcuuaccauggagcugcccauccucaagaccaacgccauuacaacuauacuugcugcagugacgcugugcuucgccagcucccagaauaucaccgaagaguuuuaccaaucuacauguucagcggucaguaaaggcuauuugggggcuuuaagaacuggaugguacaccagcguuauuacaaucgaacuguccaacauuaaggagaauaaaugcaacgguaccgacgccaaggugaaacuaaucaagcaggaacucgauaaguauaaaaaugcaguaacugaccugcagaugcuuauguguucuacuccugccgcuggcucggggucagcaauagccagcggaaucgcugugugcaagguccugcacuuggagggcgaggugaacaaaauuaagaaugcccuccugaguaccaacaaagcgguugugucccugucuaauggugucagcgugcucacguucaagguauuagaucugaagaacuacaucgacaaacagcuuuugccaauucugaauaagcaauccuguucaaucccgaaccccgaaacuguuauggaguuucagcagaaaaauaacaggcuacucgaaauaacccgggaguucagugugaaugcaggggucacaacuccugugagcaccuauaugcugacaaacucugagcuucuguccuugauuaacgauaugccaaucaccaaugaccagaagaaacucaugucaaacaaugugcaaauuguccgccagcagagcuacaguaucaugugcaucauuaaggaagagguucuggccuaugugguacaguuaccccuguacggagugauagauacgccuuguuggaaacuccauacuucuccacuuugcacaaccaacacuaaggaaggcuccaauaucugucugacacgaaccgaccguggcugguacugcgauaacgcugggagcgucucguuuuucccccaagccgagacguguaaggugugcucuaauagaguuuucugcgacaccaugaacuccuugacacuaccuucagaagugaaucuguguaacauugauaucuucaauccaaaauaugacugcaagauaaugacaaguaaaaccgaugucagcuccucugugauuacaagccucggagcaaucguaucauguuacgguaagacuaaaugcaccgcuaguaacaagaauaagggcaucauuaaaacauuuuccaacgggugugacuauguuagcaauaagggaguggacaccgucucugugggcaacacucuguacuaugucaacaaacaggagggucagucacuuuacgugaagggggagccgaucauuaauuucuaugauccccugguuuuuccuagugacgaauuugaugccagcauaucccaagugaacgagaaaaucaaucagucuuuggcguuuauuaggaagucggacgaacuccugcacaacguaaaugucggaaagagcacgacaaacaucaugaucaccacuauuauaaucgugauuaucguuauuuuacugcuacucaucgccgugggccuguuccuuuacugcaaagcacggugaggacuaguggaagcauuuuccuggcugauuaaaagaaauuacucagcuauggucaucuguuccuguuagaaggcuaugcagcauauuauauacuaugcgcauguuaugaaaugcauaauaaaaaauuuuaaaaaaucuaaaagaucuaaaaaaaaaaaaaaaaaaaaaaaaaaaaaaaaaaaaaaaaaaaaaaaaaaaaaaaaaaaaaaaaugcaucccccccccccccccccccccccccccccccaaaggcucuuuucagagccaccagaauu

SEQ ID NO: 18228 - RNA, 1910 nt, Artificial Sequence
  mRNA product Design f-2 comprising derived and/or modified sequence from HRSV(Memphis-37)__AIY60640.1__F-del_DSCav1_mut6 (opt4)
gggagagcggcucggccauuuugucccagucaguccggaggcugcggcugcagaaguaccgccugcggaguaacugcaaagaagcuuaccauggagcugcccauccugaagaccaacgccaucaccaccauccuggccgccgugacccugugcuucgccagcagccagaacaucaccgaggaguucuaccagagcaccugcagcgccgugagcaagggcuaccugggcgcccugagaaccggcugguacaccagcgugaucaccaucgagcugagcaacaucaaggagaacaagugcaacggcaccgacgccaaggugaagcugaucaagcaggagcuggacaaguacaagaacgccgugaccgaccugcagaugcugaugugcagcacccccgccgccggcagcggcagcgccaucgccagcggcaucgccgugugcaaggugcugcaccuggagggcgaggugaacaagaucaagaacgcccugcugagcaccaacaaggccguggugagccugagcaacggcgugagcgugcugaccuucaaggugcuggaccugaagaacuacaucgacaagcagcugcugcccauccugaacaagcagagcugcagcauccccaaccccgagaccgugauggaguuccagcagaagaacaacagacugcuggagaucaccagagaguucagcgugaacgccggcgugaccacccccgugagcaccuacaugcugaccaacagcgagcugcugagccugaucaacgacaugcccaucaccaacgaccagaagaagcugaugagcaacaacgugcagaucgugagacagcagagcuacagcaucaugugcaucaucaaggaggaggugcuggccuacguggugcagcugccccuguacggcgugaucgacacccccugcuggaagcugcacaccagcccccugugcaccaccaacaccaaggagggcagcaacaucugccugaccagaaccgacagaggcugguacugcgacaacgccggcagcgugagcuucuucccccaggccgagaccugcaaggugugcagcaacagaguguucugcgacaccaugaacagccugacccugcccagcgaggugaaccugugcaacaucgacaucuucaaccccaaguacgacugcaagaucaugaccagcaagaccgacgugagcagcagcgugaucaccagccugggcgccaucgugagcugcuacggcaagaccaagugcaccgccagcaacaagaacaagggcaucaucaagaccuucagcaacggcugcgacuacgugagcaacaagggcguggacaccgugagcgugggcaacacccuguacuacgugaacaagcaggagggccagagccuguacgugaagggcgagcccaucaucaacuucuacgacccccugguguuccccagcgacgaguucgacgccagcaucagccaggugaacgagaagaucaaccagagccuggccuucaucagaaagagcgacgagcugcugcacaacgugaacgugggcaagagcaccaccaacaucaugaucaccaccaucaucaucgugaucaucgugauccugcugcugcugaucgccgugggccuguuccuguacugcaaggccagaugaggacuaguggaagcauuuuccuggcugauuaaaagaaauuacucagcuauggucaucuguuccuguuagaaggcuaugcagcauauuauauacuaugcgcauguuaugaaaugcauaauaaaaaauuuuaaaaaaucuaaaagaucuaaaaaaaaaaaaaaaaaaaaaaaaaaaaaaaaaaaaaaaaaaaaaaaaaaaaaaaaaaaaaaaaugcaucccccccccccccccccccccccccccccccaaaggcucuuuucagagccaccagaauu

SEQ ID NO: 18229 - RNA, 1910 nt, Artificial Sequence
  mRNA product Design f-2 comprising derived and/or modified sequence from HRSV(Memphis-37)__AIY60640.1__F-del_DSCav1_mut6 (opt5)
gggagagcggcucggccauuuugucccagucaguccggaggcugcggcugcagaaguaccgccugcggaguaacugcaaagaagcuuaccauggagcugcccauccucaagaccaacgccauuacaacgauccuggcugccgugacccuuugcuucgcgagcucccagaauauuacagaagaguuuuaccaaucuaccuguagcgcugucuccaaaggcuaucugggggcccucagaacaggaugguacaccucuguuaucacaauugaacugagcaacaucaaggagaauaaaugcaacggcaccgacgccaaggugaaacuuaucaagcaggaacuggauaaguauaaaaaugcugugacggaccuccagaugcugauguguuccaccccugccgcugggucuggaagcgccauugcguccggcaucgccgucugcaaggugcugcaccucgagggggagguuaacaaaauuaagaaugcucugcuuagcacaaacaaagccguggucucucuguccaauggagugagcguucucaccuucaaggugcuggaucuuaagaacuacaucgacaaacagcugcucccgauucugaauaagcaaucuuguuccauccccaacccugaaacagucauggaguuucagcagaaaaauaaccggcugcucgaaauuacccgcgaguucagcgugaaugcuggcgugacgacacccgucucuaccuauaugcugacaaacuccgagcuucugagccucaucaacgauaugccuaucaccaaugaccagaagaaacugauguccaacaauguucaaauugugagacagcagucuuacagcaucaugugcauuaucaaggaagaggugcuugccuaugucgugcagcugccccucuacggcguuauugauaccccuuguuggaaacugcauacauccccgcugugcacgaccaacacaaaggaagggagcaauaucugucucacccggacagaccgcggaugguacugcgauaacgcgggcucuguguccuuuuucccccaagccgagaccuguaaggucugcagcaauagaguguuuugcgacacgaugaacucucugacacuuccuagcgaaguuaaucuguguaacaucgauauuuucaaucccaaauaugacugcaagaucaugaccuccaaaaccgaugugucuagcuccgucauuacaagccucggggcuaucgugucuuguuacggaaagaccaaaugcacagccuccaacaagaauaagggcauuaucaaaacguuuagcaacgggugugacuaugucucuaauaagggaguggacaccguuuccgugggcaacacacuguacuaugucaacaaacaggagggccagagccuuuacgugaagggggagccuaucauuaauuucuaugauccccugguuuuuccguccgacgaauuugaugcuucuaucagccaagugaacgagaaaauuaaucagucccucgccuucauccggaagucugacgaacugcugcacaacgucaaugugggaaagagcaccacaaacauuaugaucaccacgauuaucaucgugauuaucguuauucuccugcuucugaucgccgucggccucuuccuguacugcaaagcucgcugaggacuaguggaagcauuuuccuggcugauuaaaagaaauuacucagcuauggucaucuguuccuguuagaaggcuaugcagcauauuauauacuaugcgcauguuaugaaaugcauaauaaaaaauuuuaaaaaaucuaaaagaucuaaaaaaaaaaaaaaaaaaaaaaaaaaaaaaaaaaaaaaaaaaaaaaaaaaaaaaaaaaaaaaaaugcaucccccccccccccccccccccccccccccccaaaggcucuuuucagagccaccagaauu

SEQ ID NO: 18230 - RNA, 1910 nt, Artificial Sequence
  mRNA product Design f-2 comprising derived and/or modified sequence from HRSV(Memphis-37)__AIY60640.1__F-del_DSCav1_mut6 (opt6)
gggagagcggcucggccauuuugucccagucaguccggaggcugcggcugcagaaguaccgccugcggaguaacugcaaagaagcuuaccauggaacuaccuauacuaaaaaccaacgccauaacaacaauacuagccgcaguuacacucugcuuugcauccucacaaaacaucacagaggaauuuuaccaaucuacuugcuccgcaguaucaaaaggauaccuaggagcacuccguacaggaugguacacaucagucauaacaauugaauuaucuaacaucaaagaaaacaaauguaaugguacagacgccaaaguaaaauuaauaaaacaagaacuagacaaauacaaaaacgccguaacagaccuacaaaugcuaaugugcucaacccccgccgcaggaucuggaucagcaauugccucaggcauagcaguaugcaaaguccuacaccuagaaggagaagucaacaaaauaaaaaacgcucuccucucaaccaauaaagcaguaguaucccucucaaacggaguaucaguacuaacauucaaaguacuagaccucaaaaauuauauagacaagcaacuacucccaauauuaaauaaacaauccugcucaauacccaauccagaaacagucauggaauuucaacaaaaaaacaaccgacucuuagaaauaacaagagaauuuucagucaaugccggcgucacaaccccaguaucaacauacaugcuaacaaacucagaacuacuaucacuaaucaacgauaugcccauaaccaacgaccaaaaaaaacuaaugucaaacaauguacaaauuguaagacaacagucuuauucaauaaugugcauaauaaaagaagaagucuuagcauauguaguacaacuaccacuauacggaguaauagacacaccauguuggaaauuacacacauccccacuauguaccaccaacacaaaagaaggaucuaacauaugccuaaccagaacagaccgaggcugguauugcgacaaugcaggaucaguauccuucuuuccacaagcagaaacaugcaaagucugcucuaacagaguauucugcgauacuaugaacucacuuaccuuaccaucagaaguaaaucuauguaauaucgacauauucaaucccaaauaugauugcaaaauaaugaccucaaaaacagauguaucaucaucagucauaacaucacuaggagcaauagucagcugcuaugggaaaacaaaaugcacagcuuccaacaaaaacaaaggaaucauaaaaacauucucaaaugguugugacuacguauccaacaaaggaguagauacaguaucuguaggcaacacauuauacuauguaaauaaacaagaaggacaaagccuauacgucaaaggagaacccaucauaaauuucuaugacccauuaguuuucccaucugacgaauuugacgcuuccaucucccaaguaaaugaaaaaaucaaccaaagccucgcauucauucgcaaaucugacgaauuacuccacaacguaaacguaggaaaauccacaacaaacauuaugaucaccaccauaauaaucguaauaauagucauauuacuacuccucauagcaguaggacuauuccuauacuguaaagcuagauaaggacuaguggaagcauuuuccuggcugauuaaaagaaauuacucagcuauggucaucuguuccuguuagaaggcuaugcagcauauuauauacuaugcgcauguuaugaaaugcauaauaaaaaauuuuaaaaaaucuaaaagaucuaaaaaaaaaaaaaaaaaaaaaaaaaaaaaaaaaaaaaaaaaaaaaaaaaaaaaaaaaaaaaaaaugcaucccccccccccccccccccccccccccccccaaaggcucuuuucagagccaccagaauu

SEQ ID NO: 18231 - RNA, 1910 nt, Artificial Sequence
  mRNA product Design f-2 comprising derived and/or modified sequence from HRSV(Memphis-37)__AIY60640.1__F-del_DSCav1_mut6 (opt11)
gggagagcggcucggccauuuugucccagucaguccggaggcugcggcugcagaaguaccgccugcggaguaacugcaaagaagcuuaccauggaauuaccaauccucaaaacuaacgccaucaccaccauccucgcugccgucacccucugcuucgccuccagccaaaacaucacagaagaguucuaccaaagcacaugcuccgcugucuccaaaggcuaccuuggcgcccuccgcaccggcugguacaccucaguaauuaccauugaacuaagcaacaucaaagaaaauaaaugcaacggcaccgacgccaaaguuaaacucauaaaacaggaacucgacaaauacaaaaacgccguaacagaccuccaaaugcucaugugcuccacccccgccgccggcucaggcuccgccaucgcaagcggaauagcaguuugcaaaguccuccaccuagaaggcgaggucaacaagauuaaaaacgcacuucucucaaccaacaaggccgucguaucacucucaaacggcgucuccguccucaccuucaaaguucuggaccucaaaaacuacaucgauaaacaacuacucccaauacuuaacaaacaaucaugcuccaucccaaaccccgaaaccgucauggaguuccaacagaaaaacaaccgccuacuggaaaucacacgcgaguucagcguaaacgcuggcgucacuacacccgucuccaccuacaugcucaccaauucugaacuccuaucacucauaaacgacaugcccauuaccaacgaccaaaagaaacuaaugucaaacaacguccaaaucguaagacaacaaucguauuccaucaugugcauaauuaaagaagaaguucucgccuacgugguccaacuaccccucuacggagucauagacacuccuuguuggaaacuccacaccucuccccucugcacuaccaacacaaaagaaggcuccaacaucugccucacccgaaccgacagaggcugguacugcgacaacgccggcuccgucuccuucuucccccaagccgaaaccugcaaagucugcuccaaccgcguuuucugcgacaccaugaacucccucacacuccccuccgaagucaaccuauguaacauagacauauucaacccaaaauacgacugcaaaaucaugacauccaaaaccgacgugucuuccucggucaucaccucccucggcgccaucgucucaugcuacggcaaaacuaaaugcaccgcauccaacaaaaacaaaggcauaaucaaaacauucuccaacggcugcgacuacguuucuaacaaaggcgucgauaccgucuccgucggaaacacccucuacuacguaaacaagcaagaaggccagucccuauacguaaaaggagaaccaauuaucaacuucuacgacccccuagucuuccccuccgacgaguucgacgccuccauaucccaagucaacgagaaaaucaaccaaucccuagccuucauccgcaaaucagacgaacuccuccacaacgucaacgucggaaaauccacaacuaacaucaugaucaccaccaucauuaucgucaucauaguuauacuccuccuccucauagccgucggccucuuccuauacugcaaagcucgcuaaggacuaguggaagcauuuuccuggcugauuaaaagaaauuacucagcuauggucaucuguuccuguuagaaggcuaugcagcauauuauauacuaugcgcauguuaugaaaugcauaauaaaaaauuuuaaaaaaucuaaaagaucuaaaaaaaaaaaaaaaaaaaaaaaaaaaaaaaaaaaaaaaaaaaaaaaaaaaaaaaaaaaaaaaaugcaucccccccccccccccccccccccccccccccaaaggcucuuuucagagccaccagaauu

SEQ ID NO: 18232 - RNA, 1901 nt, Artificial Sequence
  mRNA product Design f-3 comprising derived and/or modified sequence from HRSV(Memphis-37)__AIY60640.1__F-del_DSCav1_mut6 (opt1)
gggagagucccgcagucggcguccagcggcucugcuuguucgugugugugucguugcaggccuuauucaagcuuaccauggagcugcccauccucaagaccaacgccaucaccacgauccuggccgcggugacccugugcuucgccagcucccagaacaucaccgaggaguucuaccagagcacgugcuccgccgucagcaagggcuaccucggcgcccugcgcaccgggugguacaccagcgugaucaccaucgagcuguccaacaucaaggagaacaagugcaacggcaccgacgccaaggugaagcucaucaagcaggagcuggacaaguacaagaacgcggucacggaccugcagaugcugaugugcagcaccccggccgccggcuccgggagcgcgaucgccuccggcaucgccgucugcaaggugcugcaccucgagggcgaggugaacaagaucaagaacgcccugcuguccaccaacaaggccgucgugagccucuccaacggggugagcguccugaccuucaaggugcuggaccucaagaacuacaucgacaagcagcugcugcccauccugaacaagcagagcugcuccauccccaaccccgagaccgucauggaguuccagcagaagaacaaccgccuccuggagaucacgcgggaguucagcgugaacgcgggcgugaccacccccgucuccaccuacaugcugacgaacagcgagcuccugucccugaucaacgacaugccgaucaccaacgaccagaagaagcucaugagcaacaacgugcagaucgugcgccagcaguccuacagcaucaugugcaucaucaaggaggagguccuggccuacguggugcagcugccccucuacggggucaucgacacccccugcuggaagcugcacaccagcccccugugcacgaccaacaccaaggagggcuccaacaucugccucacccggacggaccgcgggugguacugcgacaacgccggcagcguguccuucuucccgcaggccgagaccugcaaggucugcagcaaccggguguucugcgacaccaugaacucccugacccugcccagcgaggugaaccucugcaacaucgacaucuucaaccccaaguacgacugcaagaucaugacguccaagaccgacgucagcuccagcgugaucaccucccugggcgccaucgugagcugcuacgggaagaccaagugcacggcgagcaacaagaacaagggcaucaucaagaccuucuccaacgggugcgacuacgucagcaacaagggcguggacaccguguccgucggcaacacccuguacuacgugaacaagcaggagggccagagccucuacgugaagggggagcccaucaucaacuucuacgacccgcuggucuuccccuccgacgaguucgacgccagcaucucccaggugaacgagaagaucaaccagagccuggccuucauccggaaguccgacgagcuccugcacaacgugaacgucggcaagagcaccacgaacaucaugaucaccaccaucaucaucgugaucaucgugauccugcugcuccugaucgccgucgggcuguuccucuacugcaaggcccgcugaggacuaguacuggcugcaucucccuuuccucuguccuccauccuucucccaggauggugaagggggaccugguacccagugauccccaccccaggauccuaaaucaugacuuaccugcuaauaaaaacucauuggaaaagugagaagaucuaaaaaaaaaaaaaaaaaaaaaaaaaaaaaaaaaaaaaaaaaaaaaaaaaaaaaaaaaaaaaaaaugcaucccccccccccccccccccccccccccccccaaaggcucuuuucagagccaccagaauu

SEQ ID NO: 18233 - RNA, 1901 nt, Artificial Sequence
  mRNA product Design f-3 comprising derived and/or modified sequence from HRSV(Memphis-37)__AIY60640.1__F-del_DSCav1_mut6 (opt1)
gggagagucccgcagucggcguccagcggcucugcuuguucgugugugugucguugcaggccuuauucaagcuuaccauggagcugcccauccucaagaccaacgccaucaccacgauccuggccgcggugacccugugcuucgccagcucccagaacaucaccgaggaguucuaccagagcacgugcuccgccgucagcaagggcuaccucggggcccugcgcaccggcugguacaccuccgugaucaccaucgagcugagcaacaucaaggagaacaagugcaacgggaccgacgccaaggugaagcucaucaagcaggagcuggacaaguacaagaacgcggucacggaccugcagaugcucaugugcuccaccccggccgccggcagcggguccgccaucgcgagcggcaucgccgugugcaaggugcugcaccuggagggcgaggucaacaagaucaagaacgcccuccuguccaccaacaaggccguggugagccuguccaacggggucagcgugcucaccuucaaggugcuggaccugaagaacuacaucgacaagcagcuccugcccauccugaacaagcaguccugcagcauccccaaccccgagacggucauggaguuccagcagaagaacaaccggcuccuggagaucacccgcgaguucuccgugaacgccggcgugaccaccccggucagcacguacaugcugaccaacuccgagcuccugagccugaucaacgacaugcccaucaccaacgaccagaagaagcucaugagcaacaacgugcagaucgugcggcagcaguccuacagcaucaugugcaucaucaaggaggagguccuggcguacguggugcagcugccccucuacggggucaucgacacccccugcuggaagcugcacacguccccgcugugcaccaccaacaccaaggagggcagcaacaucugccucacgcgcaccgaccgggggugguacugcgacaacgccggcuccgugagcuucuucccccaggccgagaccugcaaggugugcuccaaccgcgucuucugcgacaccaugaacagccugacgcugcccuccgaggugaaccucugcaacaucgacaucuucaaccccaaguacgacugcaagaucaugaccagcaagaccgacgucuccagcuccgugaucaccagccugggcgccaucguguccugcuacgggaagacgaagugcaccgccagcaacaagaacaagggcaucaucaagaccuucuccaacgggugcgacuacgucagcaacaagggcguggacaccguguccgucggcaacacgcuguacuacgugaacaagcaggaggggcagagccucuacgugaagggcgagccgaucaucaacuucuacgacccccuggucuuccccagcgacgaguucgacgcguccaucagccaggugaacgagaagaucaaccagucccuggccuucauccgcaagagcgacgagcuccugcacaacgugaacgucgggaaguccaccaccaacaucaugaucaccaccaucaucaucgugaucaucgugauccugcuccugcugaucgccgucggccucuuccuguacugcaaggcccggugaggacuaguacuggcugcaucucccuuuccucuguccuccauccuucucccaggauggugaagggggaccugguacccagugauccccaccccaggauccuaaaucaugacuuaccugcuaauaaaaacucauuggaaaagugagaagaucuaaaaaaaaaaaaaaaaaaaaaaaaaaaaaaaaaaaaaaaaaaaaaaaaaaaaaaaaaaaaaaaaugcaucccccccccccccccccccccccccccccccaaaggcucuuuucagagccaccagaauu

SEQ ID NO: 18234 - RNA, 1901 nt, Artificial Sequence
  mRNA product Design f-3 comprising derived and/or modified sequence from HRSV(Memphis-37)__AIY60640.1__F-del_DSCav1_mut6 (opt2)
gggagagucccgcagucggcguccagcggcucugcuuguucgugugugugucguugcaggccuuauucaagcuuaccauggagcuccccauccucaagaccaacgccaucaccaccauccucgccgccgucacccucugcuucgccuccucccagaacaucaccgaggaguucuaccaguccaccugcuccgccgucuccaagggcuaccucggcgcccuccgcaccggcugguacaccuccgucaucaccaucgagcucuccaacaucaaggagaacaagugcaacggcaccgacgccaaggucaagcucaucaagcaggagcucgacaaguacaagaacgccgucaccgaccuccagaugcucaugugcuccacccccgccgccggcuccggcuccgccaucgccuccggcaucgccgucugcaagguccuccaccucgagggcgaggucaacaagaucaagaacgcccuccucuccaccaacaaggccgucgucucccucuccaacggcgucuccguccucaccuucaagguccucgaccucaagaacuacaucgacaagcagcuccuccccauccucaacaagcaguccugcuccauccccaaccccgagaccgucauggaguuccagcagaagaacaaccgccuccucgagaucacccgcgaguucuccgucaacgccggcgucaccacccccgucuccaccuacaugcucaccaacuccgagcuccucucccucaucaacgacaugcccaucaccaacgaccagaagaagcucauguccaacaacguccagaucguccgccagcaguccuacuccaucaugugcaucaucaaggaggagguccucgccuacgucguccagcucccccucuacggcgucaucgacacccccugcuggaagcuccacaccuccccccucugcaccaccaacaccaaggagggcuccaacaucugccucacccgcaccgaccgcggcugguacugcgacaacgccggcuccgucuccuucuucccccaggccgagaccugcaaggucugcuccaaccgcgucuucugcgacaccaugaacucccucacccuccccuccgaggucaaccucugcaacaucgacaucuucaaccccaaguacgacugcaagaucaugaccuccaagaccgacgucuccuccuccgucaucaccucccucggcgccaucgucuccugcuacggcaagaccaagugcaccgccuccaacaagaacaagggcaucaucaagaccuucuccaacggcugcgacuacgucuccaacaagggcgucgacaccgucuccgucggcaacacccucuacuacgucaacaagcaggagggccagucccucuacgucaagggcgagcccaucaucaacuucuacgacccccucgucuuccccuccgacgaguucgacgccuccaucucccaggucaacgagaagaucaaccagucccucgccuucauccgcaaguccgacgagcuccuccacaacgucaacgucggcaaguccaccaccaacaucaugaucaccaccaucaucaucgucaucaucgucauccuccuccuccucaucgccgucggccucuuccucuacugcaaggcccgcugaggacuaguacuggcugcaucucccuuuccucuguccuccauccuucucccaggauggugaagggggaccugguacccagugauccccaccccaggauccuaaaucaugacuuaccugcuaauaaaaacucauuggaaaagugagaagaucuaaaaaaaaaaaaaaaaaaaaaaaaaaaaaaaaaaaaaaaaaaaaaaaaaaaaaaaaaaaaaaaaugcaucccccccccccccccccccccccccccccccaaaggcucuuuucagagccaccagaauu

SEQ ID NO: 18235 - RNA, 1901 nt, Artificial Sequence
  mRNA product Design f-3 comprising derived and/or modified sequence from HRSV(Memphis-37)__AIY60640.1__F-del_DSCav1_mut6 (opt3)
gggagagucccgcagucggcguccagcggcucugcuuguucgugugugugucguugcaggccuuauucaagcuuaccauggagcugcccauccucaagaccaacgccauuacaacuauacuugcugcagugacgcugugcuucgccagcucccagaauaucaccgaagaguuuuaccaaucuacauguucagcggucaguaaaggcuauuugggggcuuuaagaacuggaugguacaccagcguuauuacaaucgaacuguccaacauuaaggagaauaaaugcaacgguaccgacgccaaggugaaacuaaucaagcaggaacucgauaaguauaaaaaugcaguaacugaccugcagaugcuuauguguucuacuccugccgcuggcucggggucagcaauagccagcggaaucgcugugugcaagguccugcacuuggagggcgaggugaacaaaauuaagaaugcccuccugaguaccaacaaagcgguugugucccugucuaauggugucagcgugcucacguucaagguauuagaucugaagaacuacaucgacaaacagcuuuugccaauucugaauaagcaauccuguucaaucccgaaccccgaaacuguuauggaguuucagcagaaaaauaacaggcuacucgaaauaacccgggaguucagugugaaugcaggggucacaacuccugugagcaccuauaugcugacaaacucugagcuucuguccuugauuaacgauaugccaaucaccaaugaccagaagaaacucaugucaaacaaugugcaaauuguccgccagcagagcuacaguaucaugugcaucauuaaggaagagguucuggccuaugugguacaguuaccccuguacggagugauagauacgccuuguuggaaacuccauacuucuccacuuugcacaaccaacacuaaggaaggcuccaauaucugucugacacgaaccgaccguggcugguacugcgauaacgcugggagcgucucguuuuucccccaagccgagacguguaaggugugcucuaauagaguuuucugcgacaccaugaacuccuugacacuaccuucagaagugaaucuguguaacauugauaucuucaauccaaaauaugacugcaagauaaugacaaguaaaaccgaugucagcuccucugugauuacaagccucggagcaaucguaucauguuacgguaagacuaaaugcaccgcuaguaacaagaauaagggcaucauuaaaacauuuuccaacgggugugacuauguuagcaauaagggaguggacaccgucucugugggcaacacucuguacuaugucaacaaacaggagggucagucacuuuacgugaagggggagccgaucauuaauuucuaugauccccugguuuuuccuagugacgaauuugaugccagcauaucccaagugaacgagaaaaucaaucagucuuuggcguuuauuaggaagucggacgaacuccugcacaacguaaaugucggaaagagcacgacaaacaucaugaucaccacuauuauaaucgugauuaucguuauuuuacugcuacucaucgccgugggccuguuccuuuacugcaaagcacggugaggacuaguacuggcugcaucucccuuuccucuguccuccauccuucucccaggauggugaagggggaccugguacccagugauccccaccccaggauccuaaaucaugacuuaccugcuaauaaaaacucauuggaaaagugagaagaucuaaaaaaaaaaaaaaaaaaaaaaaaaaaaaaaaaaaaaaaaaaaaaaaaaaaaaaaaaaaaaaaaugcaucccccccccccccccccccccccccccccccaaaggcucuuuucagagccaccagaauu

SEQ ID NO: 18236 - RNA, 1901 nt, Artificial Sequence
  mRNA product Design f-3 comprising derived and/or modified sequence from HRSV(Memphis-37)__AIY60640.1__F-del_DSCav1_mut6 (opt4)
gggagagucccgcagucggcguccagcggcucugcuuguucgugugugugucguugcaggccuuauucaagcuuaccauggagcugcccauccugaagaccaacgccaucaccaccauccuggccgccgugacccugugcuucgccagcagccagaacaucaccgaggaguucuaccagagcaccugcagcgccgugagcaagggcuaccugggcgcccugagaaccggcugguacaccagcgugaucaccaucgagcugagcaacaucaaggagaacaagugcaacggcaccgacgccaaggugaagcugaucaagcaggagcuggacaaguacaagaacgccgugaccgaccugcagaugcugaugugcagcacccccgccgccggcagcggcagcgccaucgccagcggcaucgccgugugcaaggugcugcaccuggagggcgaggugaacaagaucaagaacgcccugcugagcaccaacaaggccguggugagccugagcaacggcgugagcgugcugaccuucaaggugcuggaccugaagaacuacaucgacaagcagcugcugcccauccugaacaagcagagcugcagcauccccaaccccgagaccgugauggaguuccagcagaagaacaacagacugcuggagaucaccagagaguucagcgugaacgccggcgugaccacccccgugagcaccuacaugcugaccaacagcgagcugcugagccugaucaacgacaugcccaucaccaacgaccagaagaagcugaugagcaacaacgugcagaucgugagacagcagagcuacagcaucaugugcaucaucaaggaggaggugcuggccuacguggugcagcugccccuguacggcgugaucgacacccccugcuggaagcugcacaccagcccccugugcaccaccaacaccaaggagggcagcaacaucugccugaccagaaccgacagaggcugguacugcgacaacgccggcagcgugagcuucuucccccaggccgagaccugcaaggugugcagcaacagaguguucugcgacaccaugaacagccugacccugcccagcgaggugaaccugugcaacaucgacaucuucaaccccaaguacgacugcaagaucaugaccagcaagaccgacgugagcagcagcgugaucaccagccugggcgccaucgugagcugcuacggcaagaccaagugcaccgccagcaacaagaacaagggcaucaucaagaccuucagcaacggcugcgacuacgugagcaacaagggcguggacaccgugagcgugggcaacacccuguacuacgugaacaagcaggagggccagagccuguacgugaagggcgagcccaucaucaacuucuacgacccccugguguuccccagcgacgaguucgacgccagcaucagccaggugaacgagaagaucaaccagagccuggccuucaucagaaagagcgacgagcugcugcacaacgugaacgugggcaagagcaccaccaacaucaugaucaccaccaucaucaucgugaucaucgugauccugcugcugcugaucgccgugggccuguuccuguacugcaaggccagaugaggacuaguacuggcugcaucucccuuuccucuguccuccauccuucucccaggauggugaagggggaccugguacccagugauccccaccccaggauccuaaaucaugacuuaccugcuaauaaaaacucauuggaaaagugagaagaucuaaaaaaaaaaaaaaaaaaaaaaaaaaaaaaaaaaaaaaaaaaaaaaaaaaaaaaaaaaaaaaaaugcaucccccccccccccccccccccccccccccccaaaggcucuuuucagagccaccagaauu

SEQ ID NO: 18237 - RNA, 1901 nt, Artificial Sequence
  mRNA product Design f-3 comprising derived and/or modified sequence from HRSV(Memphis-37)__AIY60640.1__F-del_DSCav1_mut6 (opt5)
gggagagucccgcagucggcguccagcggcucugcuuguucgugugugugucguugcaggccuuauucaagcuuaccauggagcugcccauccucaagaccaacgccauuacaacgauccuggcugccgugacccuuugcuucgcgagcucccagaauauuacagaagaguuuuaccaaucuaccuguagcgcugucuccaaaggcuaucugggggcccucagaacaggaugguacaccucuguuaucacaauugaacugagcaacaucaaggagaauaaaugcaacggcaccgacgccaaggugaaacuuaucaagcaggaacuggauaaguauaaaaaugcugugacggaccuccagaugcugauguguuccaccccugccgcugggucuggaagcgccauugcguccggcaucgccgucugcaaggugcugcaccucgagggggagguuaacaaaauuaagaaugcucugcuuagcacaaacaaagccguggucucucuguccaauggagugagcguucucaccuucaaggugcuggaucuuaagaacuacaucgacaaacagcugcucccgauucugaauaagcaaucuuguuccauccccaacccugaaacagucauggaguuucagcagaaaaauaaccggcugcucgaaauuacccgcgaguucagcgugaaugcuggcgugacgacacccgucucuaccuauaugcugacaaacuccgagcuucugagccucaucaacgauaugccuaucaccaaugaccagaagaaacugauguccaacaauguucaaauugugagacagcagucuuacagcaucaugugcauuaucaaggaagaggugcuugccuaugucgugcagcugccccucuacggcguuauugauaccccuuguuggaaacugcauacauccccgcugugcacgaccaacacaaaggaagggagcaauaucugucucacccggacagaccgcggaugguacugcgauaacgcgggcucuguguccuuuuucccccaagccgagaccuguaaggucugcagcaauagaguguuuugcgacacgaugaacucucugacacuuccuagcgaaguuaaucuguguaacaucgauauuuucaaucccaaauaugacugcaagaucaugaccuccaaaaccgaugugucuagcuccgucauuacaagccucggggcuaucgugucuuguuacggaaagaccaaaugcacagccuccaacaagaauaagggcauuaucaaaacguuuagcaacgggugugacuaugucucuaauaagggaguggacaccguuuccgugggcaacacacuguacuaugucaacaaacaggagggccagagccuuuacgugaagggggagccuaucauuaauuucuaugauccccugguuuuuccguccgacgaauuugaugcuucuaucagccaagugaacgagaaaauuaaucagucccucgccuucauccggaagucugacgaacugcugcacaacgucaaugugggaaagagcaccacaaacauuaugaucaccacgauuaucaucgugauuaucguuauucuccugcuucugaucgccgucggccucuuccuguacugcaaagcucgcugaggacuaguacuggcugcaucucccuuuccucuguccuccauccuucucccaggauggugaagggggaccugguacccagugauccccaccccaggauccuaaaucaugacuuaccugcuaauaaaaacucauuggaaaagugagaagaucuaaaaaaaaaaaaaaaaaaaaaaaaaaaaaaaaaaaaaaaaaaaaaaaaaaaaaaaaaaaaaaaaugcaucccccccccccccccccccccccccccccccaaaggcucuuuucagagccaccagaauu

SEQ ID NO: 18238 - RNA, 1901 nt, Artificial Sequence
  mRNA product Design f-3 comprising derived and/or modified sequence from HRSV(Memphis-37)__AIY60640.1__F-del_DSCav1_mut6 (opt6)
gggagagucccgcagucggcguccagcggcucugcuuguucgugugugugucguugcaggccuuauucaagcuuaccauggaacuaccuauacuaaaaaccaacgccauaacaacaauacuagccgcaguuacacucugcuuugcauccucacaaaacaucacagaggaauuuuaccaaucuacuugcuccgcaguaucaaaaggauaccuaggagcacuccguacaggaugguacacaucagucauaacaauugaauuaucuaacaucaaagaaaacaaauguaaugguacagacgccaaaguaaaauuaauaaaacaagaacuagacaaauacaaaaacgccguaacagaccuacaaaugcuaaugugcucaacccccgccgcaggaucuggaucagcaauugccucaggcauagcaguaugcaaaguccuacaccuagaaggagaagucaacaaaauaaaaaacgcucuccucucaaccaauaaagcaguaguaucccucucaaacggaguaucaguacuaacauucaaaguacuagaccucaaaaauuauauagacaagcaacuacucccaauauuaaauaaacaauccugcucaauacccaauccagaaacagucauggaauuucaacaaaaaaacaaccgacucuuagaaauaacaagagaauuuucagucaaugccggcgucacaaccccaguaucaacauacaugcuaacaaacucagaacuacuaucacuaaucaacgauaugcccauaaccaacgaccaaaaaaaacuaaugucaaacaauguacaaauuguaagacaacagucuuauucaauaaugugcauaauaaaagaagaagucuuagcauauguaguacaacuaccacuauacggaguaauagacacaccauguuggaaauuacacacauccccacuauguaccaccaacacaaaagaaggaucuaacauaugccuaaccagaacagaccgaggcugguauugcgacaaugcaggaucaguauccuucuuuccacaagcagaaacaugcaaagucugcucuaacagaguauucugcgauacuaugaacucacuuaccuuaccaucagaaguaaaucuauguaauaucgacauauucaaucccaaauaugauugcaaaauaaugaccucaaaaacagauguaucaucaucagucauaacaucacuaggagcaauagucagcugcuaugggaaaacaaaaugcacagcuuccaacaaaaacaaaggaaucauaaaaacauucucaaaugguugugacuacguauccaacaaaggaguagauacaguaucuguaggcaacacauuauacuauguaaauaaacaagaaggacaaagccuauacgucaaaggagaacccaucauaaauuucuaugacccauuaguuuucccaucugacgaauuugacgcuuccaucucccaaguaaaugaaaaaaucaaccaaagccucgcauucauucgcaaaucugacgaauuacuccacaacguaaacguaggaaaauccacaacaaacauuaugaucaccaccauaauaaucguaauaauagucauauuacuacuccucauagcaguaggacuauuccuauacuguaaagcuagauaaggacuaguacuggcugcaucucccuuuccucuguccuccauccuucucccaggauggugaagggggaccugguacccagugauccccaccccaggauccuaaaucaugacuuaccugcuaauaaaaacucauuggaaaagugagaagaucuaaaaaaaaaaaaaaaaaaaaaaaaaaaaaaaaaaaaaaaaaaaaaaaaaaaaaaaaaaaaaaaaugcaucccccccccccccccccccccccccccccccaaaggcucuuuucagagccaccagaauu

SEQ ID NO: 18239 - RNA, 1901 nt, Artificial Sequence
  mRNA product Design f-3 comprising derived and/or modified sequence from HRSV(Memphis-37)__AIY60640.1__F-del_DSCav1_mut6 (opt11)
gggagagucccgcagucggcguccagcggcucugcuuguucgugugugugucguugcaggccuuauucaagcuuaccauggaauuaccaauccucaaaacuaacgccaucaccaccauccucgcugccgucacccucugcuucgccuccagccaaaacaucacagaagaguucuaccaaagcacaugcuccgcugucuccaaaggcuaccuuggcgcccuccgcaccggcugguacaccucaguaauuaccauugaacuaagcaacaucaaagaaaauaaaugcaacggcaccgacgccaaaguuaaacucauaaaacaggaacucgacaaauacaaaaacgccguaacagaccuccaaaugcucaugugcuccacccccgccgccggcucaggcuccgccaucgcaagcggaauagcaguuugcaaaguccuccaccuagaaggcgaggucaacaagauuaaaaacgcacuucucucaaccaacaaggccgucguaucacucucaaacggcgucuccguccucaccuucaaaguucuggaccucaaaaacuacaucgauaaacaacuacucccaauacuuaacaaacaaucaugcuccaucccaaaccccgaaaccgucauggaguuccaacagaaaaacaaccgccuacuggaaaucacacgcgaguucagcguaaacgcuggcgucacuacacccgucuccaccuacaugcucaccaauucugaacuccuaucacucauaaacgacaugcccauuaccaacgaccaaaagaaacuaaugucaaacaacguccaaaucguaagacaacaaucguauuccaucaugugcauaauuaaagaagaaguucucgccuacgugguccaacuaccccucuacggagucauagacacuccuuguuggaaacuccacaccucuccccucugcacuaccaacacaaaagaaggcuccaacaucugccucacccgaaccgacagaggcugguacugcgacaacgccggcuccgucuccuucuucccccaagccgaaaccugcaaagucugcuccaaccgcguuuucugcgacaccaugaacucccucacacuccccuccgaagucaaccuauguaacauagacauauucaacccaaaauacgacugcaaaaucaugacauccaaaaccgacgugucuuccucggucaucaccucccucggcgccaucgucucaugcuacggcaaaacuaaaugcaccgcauccaacaaaaacaaaggcauaaucaaaacauucuccaacggcugcgacuacguuucuaacaaaggcgucgauaccgucuccgucggaaacacccucuacuacguaaacaagcaagaaggccagucccuauacguaaaaggagaaccaauuaucaacuucuacgacccccuagucuuccccuccgacgaguucgacgccuccauaucccaagucaacgagaaaaucaaccaaucccuagccuucauccgcaaaucagacgaacuccuccacaacgucaacgucggaaaauccacaacuaacaucaugaucaccaccaucauuaucgucaucauaguuauacuccuccuccucauagccgucggccucuuccuauacugcaaagcucgcuaaggacuaguacuggcugcaucucccuuuccucuguccuccauccuucucccaggauggugaagggggaccugguacccagugauccccaccccaggauccuaaaucaugacuuaccugcuaauaaaaacucauuggaaaagugagaagaucuaaaaaaaaaaaaaaaaaaaaaaaaaaaaaaaaaaaaaaaaaaaaaaaaaaaaaaaaaaaaaaaaugcaucccccccccccccccccccccccccccccccaaaggcucuuuucagagccaccagaauu

SEQ ID NO: 18240 - RNA, 2117 nt, Artificial Sequence
  mRNA product Design f-4 comprising derived and/or modified sequence from HRSV(Memphis-37)__AIY60640.1__F-del_DSCav1_mut6 (opt1)
gggagagucccgcagucggcguccagcggcucugcuuguucgugugugugucguugcaggccuuauucaagcuuaccauggagcugcccauccucaagaccaacgccaucaccacgauccuggccgcggugacccugugcuucgccagcucccagaacaucaccgaggaguucuaccagagcacgugcuccgccgucagcaagggcuaccucggcgcccugcgcaccgggugguacaccagcgugaucaccaucgagcuguccaacaucaaggagaacaagugcaacggcaccgacgccaaggugaagcucaucaagcaggagcuggacaaguacaagaacgcggucacggaccugcagaugcugaugugcagcaccccggccgccggcuccgggagcgcgaucgccuccggcaucgccgucugcaaggugcugcaccucgagggcgaggugaacaagaucaagaacgcccugcuguccaccaacaaggccgucgugagccucuccaacggggugagcguccugaccuucaaggugcuggaccucaagaacuacaucgacaagcagcugcugcccauccugaacaagcagagcugcuccauccccaaccccgagaccgucauggaguuccagcagaagaacaaccgccuccuggagaucacgcgggaguucagcgugaacgcgggcgugaccacccccgucuccaccuacaugcugacgaacagcgagcuccugucccugaucaacgacaugccgaucaccaacgaccagaagaagcucaugagcaacaacgugcagaucgugcgccagcaguccuacagcaucaugugcaucaucaaggaggagguccuggccuacguggugcagcugccccucuacggggucaucgacacccccugcuggaagcugcacaccagcccccugugcacgaccaacaccaaggagggcuccaacaucugccucacccggacggaccgcgggugguacugcgacaacgccggcagcguguccuucuucccgcaggccgagaccugcaaggucugcagcaaccggguguucugcgacaccaugaacucccugacccugcccagcgaggugaaccucugcaacaucgacaucuucaaccccaaguacgacugcaagaucaugacguccaagaccgacgucagcuccagcgugaucaccucccugggcgccaucgugagcugcuacgggaagaccaagugcacggcgagcaacaagaacaagggcaucaucaagaccuucuccaacgggugcgacuacgucagcaacaagggcguggacaccguguccgucggcaacacccuguacuacgugaacaagcaggagggccagagccucuacgugaagggggagcccaucaucaacuucuacgacccgcuggucuuccccuccgacgaguucgacgccagcaucucccaggugaacgagaagaucaaccagagccuggccuucauccggaaguccgacgagcuccugcacaacgugaacgucggcaagagcaccacgaacaucaugaucaccaccaucaucaucgugaucaucgugauccugcugcuccugaucgccgucgggcuguuccucuacugcaaggcccgcugaggacuagugaagggaacacccaaauuuaauucagccuuaagcacaauuaauuaagagugaaacguaauuguacaagcaguuggucacccaccauagggcaugaucaacaccgcaaccuuuccuuuuucccccagugauucugaaaaaccccucuucccuucagcuugcuuagauguuccaaauuuaguaagcuuaaggcggccuacagaagaaaaagaaaaaaaaggccacaaaaguucccucucacuuucaguaaauaaaauaaaagcagcaacagaaauaaagaaauaaaugaaauucaaaaugaaauaaauauuguguugugcagcauuaaaaaaucaauaaaaauuaaaaaugagcaagaucuaaaaaaaaaaaaaaaaaaaaaaaaaaaaaaaaaaaaaaaaaaaaaaaaaaaaaaaaaaaaaaaaugcaucccccccccccccccccccccccccccccccaaaggcucuuuucagagccaccagaauu

SEQ ID NO: 18241 - RNA, 2117 nt, Artificial Sequence
  mRNA product Design f-4 comprising derived and/or modified sequence from HRSV(Memphis-37)__AIY60640.1__F-del_DSCav1_mut6 (opt1)
gggagagucccgcagucggcguccagcggcucugcuuguucgugugugugucguugcaggccuuauucaagcuuaccauggagcugcccauccucaagaccaacgccaucaccacgauccuggccgcggugacccugugcuucgccagcucccagaacaucaccgaggaguucuaccagagcacgugcuccgccgucagcaagggcuaccucggggcccugcgcaccggcugguacaccuccgugaucaccaucgagcugagcaacaucaaggagaacaagugcaacgggaccgacgccaaggugaagcucaucaagcaggagcuggacaaguacaagaacgcggucacggaccugcagaugcucaugugcuccaccccggccgccggcagcggguccgccaucgcgagcggcaucgccgugugcaaggugcugcaccuggagggcgaggucaacaagaucaagaacgcccuccuguccaccaacaaggccguggugagccuguccaacggggucagcgugcucaccuucaaggugcuggaccugaagaacuacaucgacaagcagcuccugcccauccugaacaagcaguccugcagcauccccaaccccgagacggucauggaguuccagcagaagaacaaccggcuccuggagaucacccgcgaguucuccgugaacgccggcgugaccaccccggucagcacguacaugcugaccaacuccgagcuccugagccugaucaacgacaugcccaucaccaacgaccagaagaagcucaugagcaacaacgugcagaucgugcggcagcaguccuacagcaucaugugcaucaucaaggaggagguccuggcguacguggugcagcugccccucuacggggucaucgacacccccugcuggaagcugcacacguccccgcugugcaccaccaacaccaaggagggcagcaacaucugccucacgcgcaccgaccgggggugguacugcgacaacgccggcuccgugagcuucuucccccaggccgagaccugcaaggugugcuccaaccgcgucuucugcgacaccaugaacagccugacgcugcccuccgaggugaaccucugcaacaucgacaucuucaaccccaaguacgacugcaagaucaugaccagcaagaccgacgucuccagcuccgugaucaccagccugggcgccaucguguccugcuacgggaagacgaagugcaccgccagcaacaagaacaagggcaucaucaagaccuucuccaacgggugcgacuacgucagcaacaagggcguggacaccguguccgucggcaacacgcuguacuacgugaacaagcaggaggggcagagccucuacgugaagggcgagccgaucaucaacuucuacgacccccuggucuuccccagcgacgaguucgacgcguccaucagccaggugaacgagaagaucaaccagucccuggccuucauccgcaagagcgacgagcuccugcacaacgugaacgucgggaaguccaccaccaacaucaugaucaccaccaucaucaucgugaucaucgugauccugcuccugcugaucgccgucggccucuuccuguacugcaaggcccggugaggacuagugaagggaacacccaaauuuaauucagccuuaagcacaauuaauuaagagugaaacguaauuguacaagcaguuggucacccaccauagggcaugaucaacaccgcaaccuuuccuuuuucccccagugauucugaaaaaccccucuucccuucagcuugcuuagauguuccaaauuuaguaagcuuaaggcggccuacagaagaaaaagaaaaaaaaggccacaaaaguucccucucacuuucaguaaauaaaauaaaagcagcaacagaaauaaagaaauaaaugaaauucaaaaugaaauaaauauuguguugugcagcauuaaaaaaucaauaaaaauuaaaaaugagcaagaucuaaaaaaaaaaaaaaaaaaaaaaaaaaaaaaaaaaaaaaaaaaaaaaaaaaaaaaaaaaaaaaaaugcaucccccccccccccccccccccccccccccccaaaggcucuuuucagagccaccagaauu

SEQ ID NO: 18242 - RNA, 2117 nt, Artificial Sequence
  mRNA product Design f-4 comprising derived and/or modified sequence from HRSV(Memphis-37)__AIY60640.1__F-del_DSCav1_mut6 (opt2)
gggagagucccgcagucggcguccagcggcucugcuuguucgugugugugucguugcaggccuuauucaagcuuaccauggagcuccccauccucaagaccaacgccaucaccaccauccucgccgccgucacccucugcuucgccuccucccagaacaucaccgaggaguucuaccaguccaccugcuccgccgucuccaagggcuaccucggcgcccuccgcaccggcugguacaccuccgucaucaccaucgagcucuccaacaucaaggagaacaagugcaacggcaccgacgccaaggucaagcucaucaagcaggagcucgacaaguacaagaacgccgucaccgaccuccagaugcucaugugcuccacccccgccgccggcuccggcuccgccaucgccuccggcaucgccgucugcaagguccuccaccucgagggcgaggucaacaagaucaagaacgcccuccucuccaccaacaaggccgucgucucccucuccaacggcgucuccguccucaccuucaagguccucgaccucaagaacuacaucgacaagcagcuccuccccauccucaacaagcaguccugcuccauccccaaccccgagaccgucauggaguuccagcagaagaacaaccgccuccucgagaucacccgcgaguucuccgucaacgccggcgucaccacccccgucuccaccuacaugcucaccaacuccgagcuccucucccucaucaacgacaugcccaucaccaacgaccagaagaagcucauguccaacaacguccagaucguccgccagcaguccuacuccaucaugugcaucaucaaggaggagguccucgccuacgucguccagcucccccucuacggcgucaucgacacccccugcuggaagcuccacaccuccccccucugcaccaccaacaccaaggagggcuccaacaucugccucacccgcaccgaccgcggcugguacugcgacaacgccggcuccgucuccuucuucccccaggccgagaccugcaaggucugcuccaaccgcgucuucugcgacaccaugaacucccucacccuccccuccgaggucaaccucugcaacaucgacaucuucaaccccaaguacgacugcaagaucaugaccuccaagaccgacgucuccuccuccgucaucaccucccucggcgccaucgucuccugcuacggcaagaccaagugcaccgccuccaacaagaacaagggcaucaucaagaccuucuccaacggcugcgacuacgucuccaacaagggcgucgacaccgucuccgucggcaacacccucuacuacgucaacaagcaggagggccagucccucuacgucaagggcgagcccaucaucaacuucuacgacccccucgucuuccccuccgacgaguucgacgccuccaucucccaggucaacgagaagaucaaccagucccucgccuucauccgcaaguccgacgagcuccuccacaacgucaacgucggcaaguccaccaccaacaucaugaucaccaccaucaucaucgucaucaucgucauccuccuccuccucaucgccgucggccucuuccucuacugcaaggcccgcugaggacuagugaagggaacacccaaauuuaauucagccuuaagcacaauuaauuaagagugaaacguaauuguacaagcaguuggucacccaccauagggcaugaucaacaccgcaaccuuuccuuuuucccccagugauucugaaaaaccccucuucccuucagcuugcuuagauguuccaaauuuaguaagcuuaaggcggccuacagaagaaaaagaaaaaaaaggccacaaaaguucccucucacuuucaguaaauaaaauaaaagcagcaacagaaauaaagaaauaaaugaaauucaaaaugaaauaaauauuguguugugcagcauuaaaaaaucaauaaaaauuaaaaaugagcaagaucuaaaaaaaaaaaaaaaaaaaaaaaaaaaaaaaaaaaaaaaaaaaaaaaaaaaaaaaaaaaaaaaaugcaucccccccccccccccccccccccccccccccaaaggcucuuuucagagccaccagaauu

SEQ ID NO: 18243 - RNA, 2117 nt, Artificial Sequence
  mRNA product Design f-4 comprising derived and/or modified sequence from HRSV(Memphis-37)__AIY60640.1__F-del_DSCav1_mut6 (opt3)
gggagagucccgcagucggcguccagcggcucugcuuguucgugugugugucguugcaggccuuauucaagcuuaccauggagcugcccauccucaagaccaacgccauuacaacuauacuugcugcagugacgcugugcuucgccagcucccagaauaucaccgaagaguuuuaccaaucuacauguucagcggucaguaaaggcuauuugggggcuuuaagaacuggaugguacaccagcguuauuacaaucgaacuguccaacauuaaggagaauaaaugcaacgguaccgacgccaaggugaaacuaaucaagcaggaacucgauaaguauaaaaaugcaguaacugaccugcagaugcuuauguguucuacuccugccgcuggcucggggucagcaauagccagcggaaucgcugugugcaagguccugcacuuggagggcgaggugaacaaaauuaagaaugcccuccugaguaccaacaaagcgguugugucccugucuaauggugucagcgugcucacguucaagguauuagaucugaagaacuacaucgacaaacagcuuuugccaauucugaauaagcaauccuguucaaucccgaaccccgaaacuguuauggaguuucagcagaaaaauaacaggcuacucgaaauaacccgggaguucagugugaaugcaggggucacaacuccugugagcaccuauaugcugacaaacucugagcuucuguccuugauuaacgauaugccaaucaccaaugaccagaagaaacucaugucaaacaaugugcaaauuguccgccagcagagcuacaguaucaugugcaucauuaaggaagagguucuggccuaugugguacaguuaccccuguacggagugauagauacgccuuguuggaaacuccauacuucuccacuuugcacaaccaacacuaaggaaggcuccaauaucugucugacacgaaccgaccguggcugguacugcgauaacgcugggagcgucucguuuuucccccaagccgagacguguaaggugugcucuaauagaguuuucugcgacaccaugaacuccuugacacuaccuucagaagugaaucuguguaacauugauaucuucaauccaaaauaugacugcaagauaaugacaaguaaaaccgaugucagcuccucugugauuacaagccucggagcaaucguaucauguuacgguaagacuaaaugcaccgcuaguaacaagaauaagggcaucauuaaaacauuuuccaacgggugugacuauguuagcaauaagggaguggacaccgucucugugggcaacacucuguacuaugucaacaaacaggagggucagucacuuuacgugaagggggagccgaucauuaauuucuaugauccccugguuuuuccuagugacgaauuugaugccagcauaucccaagugaacgagaaaaucaaucagucuuuggcguuuauuaggaagucggacgaacuccugcacaacguaaaugucggaaagagcacgacaaacaucaugaucaccacuauuauaaucgugauuaucguuauuuuacugcuacucaucgccgugggccuguuccuuuacugcaaagcacggugaggacuagugaagggaacacccaaauuuaauucagccuuaagcacaauuaauuaagagugaaacguaauuguacaagcaguuggucacccaccauagggcaugaucaacaccgcaaccuuuccuuuuucccccagugauucugaaaaaccccucuucccuucagcuugcuuagauguuccaaauuuaguaagcuuaaggcggccuacagaagaaaaagaaaaaaaaggccacaaaaguucccucucacuuucaguaaauaaaauaaaagcagcaacagaaauaaagaaauaaaugaaauucaaaaugaaauaaauauuguguugugcagcauuaaaaaaucaauaaaaauuaaaaaugagcaagaucuaaaaaaaaaaaaaaaaaaaaaaaaaaaaaaaaaaaaaaaaaaaaaaaaaaaaaaaaaaaaaaaaugcaucccccccccccccccccccccccccccccccaaaggcucuuuucagagccaccagaauu

SEQ ID NO: 18244 - RNA, 2117 nt, Artificial Sequence
  mRNA product Design f-4 comprising derived and/or modified sequence from HRSV(Memphis-37)__AIY60640.1__F-del_DSCav1_mut6 (opt4)
gggagagucccgcagucggcguccagcggcucugcuuguucgugugugugucguugcaggccuuauucaagcuuaccauggagcugcccauccugaagaccaacgccaucaccaccauccuggccgccgugacccugugcuucgccagcagccagaacaucaccgaggaguucuaccagagcaccugcagcgccgugagcaagggcuaccugggcgcccugagaaccggcugguacaccagcgugaucaccaucgagcugagcaacaucaaggagaacaagugcaacggcaccgacgccaaggugaagcugaucaagcaggagcuggacaaguacaagaacgccgugaccgaccugcagaugcugaugugcagcacccccgccgccggcagcggcagcgccaucgccagcggcaucgccgugugcaaggugcugcaccuggagggcgaggugaacaagaucaagaacgcccugcugagcaccaacaaggccguggugagccugagcaacggcgugagcgugcugaccuucaaggugcuggaccugaagaacuacaucgacaagcagcugcugcccauccugaacaagcagagcugcagcauccccaaccccgagaccgugauggaguuccagcagaagaacaacagacugcuggagaucaccagagaguucagcgugaacgccggcgugaccacccccgugagcaccuacaugcugaccaacagcgagcugcugagccugaucaacgacaugcccaucaccaacgaccagaagaagcugaugagcaacaacgugcagaucgugagacagcagagcuacagcaucaugugcaucaucaaggaggaggugcuggccuacguggugcagcugccccuguacggcgugaucgacacccccugcuggaagcugcacaccagcccccugugcaccaccaacaccaaggagggcagcaacaucugccugaccagaaccgacagaggcugguacugcgacaacgccggcagcgugagcuucuucccccaggccgagaccugcaaggugugcagcaacagaguguucugcgacaccaugaacagccugacccugcccagcgaggugaaccugugcaacaucgacaucuucaaccccaaguacgacugcaagaucaugaccagcaagaccgacgugagcagcagcgugaucaccagccugggcgccaucgugagcugcuacggcaagaccaagugcaccgccagcaacaagaacaagggcaucaucaagaccuucagcaacggcugcgacuacgugagcaacaagggcguggacaccgugagcgugggcaacacccuguacuacgugaacaagcaggagggccagagccuguacgugaagggcgagcccaucaucaacuucuacgacccccugguguuccccagcgacgaguucgacgccagcaucagccaggugaacgagaagaucaaccagagccuggccuucaucagaaagagcgacgagcugcugcacaacgugaacgugggcaagagcaccaccaacaucaugaucaccaccaucaucaucgugaucaucgugauccugcugcugcugaucgccgugggccuguuccuguacugcaaggccagaugaggacuagugaagggaacacccaaauuuaauucagccuuaagcacaauuaauuaagagugaaacguaauuguacaagcaguuggucacccaccauagggcaugaucaacaccgcaaccuuuccuuuuucccccagugauucugaaaaaccccucuucccuucagcuugcuuagauguuccaaauuuaguaagcuuaaggcggccuacagaagaaaaagaaaaaaaaggccacaaaaguucccucucacuuucaguaaauaaaauaaaagcagcaacagaaauaaagaaauaaaugaaauucaaaaugaaauaaauauuguguugugcagcauuaaaaaaucaauaaaaauuaaaaaugagcaagaucuaaaaaaaaaaaaaaaaaaaaaaaaaaaaaaaaaaaaaaaaaaaaaaaaaaaaaaaaaaaaaaaaugcaucccccccccccccccccccccccccccccccaaaggcucuuuucagagccaccagaauu

SEQ ID NO: 18245 - RNA, 2117 nt, Artificial Sequence
  mRNA product Design f-4 comprising derived and/or modified sequence from HRSV(Memphis-37)__AIY60640.1__F-del_DSCav1_mut6 (opt5)
gggagagucccgcagucggcguccagcggcucugcuuguucgugugugugucguugcaggccuuauucaagcuuaccauggagcugcccauccucaagaccaacgccauuacaacgauccuggcugccgugacccuuugcuucgcgagcucccagaauauuacagaagaguuuuaccaaucuaccuguagcgcugucuccaaaggcuaucugggggcccucagaacaggaugguacaccucuguuaucacaauugaacugagcaacaucaaggagaauaaaugcaacggcaccgacgccaaggugaaacuuaucaagcaggaacuggauaaguauaaaaaugcugugacggaccuccagaugcugauguguuccaccccugccgcugggucuggaagcgccauugcguccggcaucgccgucugcaaggugcugcaccucgagggggagguuaacaaaauuaagaaugcucugcuuagcacaaacaaagccguggucucucuguccaauggagugagcguucucaccuucaaggugcuggaucuuaagaacuacaucgacaaacagcugcucccgauucugaauaagcaaucuuguuccauccccaacccugaaacagucauggaguuucagcagaaaaauaaccggcugcucgaaauuacccgcgaguucagcgugaaugcuggcgugacgacacccgucucuaccuauaugcugacaaacuccgagcuucugagccucaucaacgauaugccuaucaccaaugaccagaagaaacugauguccaacaauguucaaauugugagacagcagucuuacagcaucaugugcauuaucaaggaagaggugcuugccuaugucgugcagcugccccucuacggcguuauugauaccccuuguuggaaacugcauacauccccgcugugcacgaccaacacaaaggaagggagcaauaucugucucacccggacagaccgcggaugguacugcgauaacgcgggcucuguguccuuuuucccccaagccgagaccuguaaggucugcagcaauagaguguuuugcgacacgaugaacucucugacacuuccuagcgaaguuaaucuguguaacaucgauauuuucaaucccaaauaugacugcaagaucaugaccuccaaaaccgaugugucuagcuccgucauuacaagccucggggcuaucgugucuuguuacggaaagaccaaaugcacagccuccaacaagaauaagggcauuaucaaaacguuuagcaacgggugugacuaugucucuaauaagggaguggacaccguuuccgugggcaacacacuguacuaugucaacaaacaggagggccagagccuuuacgugaagggggagccuaucauuaauuucuaugauccccugguuuuuccguccgacgaauuugaugcuucuaucagccaagugaacgagaaaauuaaucagucccucgccuucauccggaagucugacgaacugcugcacaacgucaaugugggaaagagcaccacaaacauuaugaucaccacgauuaucaucgugauuaucguuauucuccugcuucugaucgccgucggccucuuccuguacugcaaagcucgcugaggacuagugaagggaacacccaaauuuaauucagccuuaagcacaauuaauuaagagugaaacguaauuguacaagcaguuggucacccaccauagggcaugaucaacaccgcaaccuuuccuuuuucccccagugauucugaaaaaccccucuucccuucagcuugcuuagauguuccaaauuuaguaagcuuaaggcggccuacagaagaaaaagaaaaaaaaggccacaaaaguucccucucacuuucaguaaauaaaauaaaagcagcaacagaaauaaagaaauaaaugaaauucaaaaugaaauaaauauuguguugugcagcauuaaaaaaucaauaaaaauuaaaaaugagcaagaucuaaaaaaaaaaaaaaaaaaaaaaaaaaaaaaaaaaaaaaaaaaaaaaaaaaaaaaaaaaaaaaaaugcaucccccccccccccccccccccccccccccccaaaggcucuuuucagagccaccagaauu

SEQ ID NO: 18246 - RNA, 2117 nt, Artificial Sequence
  mRNA product Design f-4 comprising derived and/or modified sequence from HRSV(Memphis-37)__AIY60640.1__F-del_DSCav1_mut6 (opt6)
gggagagucccgcagucggcguccagcggcucugcuuguucgugugugugucguugcaggccuuauucaagcuuaccauggaacuaccuauacuaaaaaccaacgccauaacaacaauacuagccgcaguuacacucugcuuugcauccucacaaaacaucacagaggaauuuuaccaaucuacuugcuccgcaguaucaaaaggauaccuaggagcacuccguacaggaugguacacaucagucauaacaauugaauuaucuaacaucaaagaaaacaaauguaaugguacagacgccaaaguaaaauuaauaaaacaagaacuagacaaauacaaaaacgccguaacagaccuacaaaugcuaaugugcucaacccccgccgcaggaucuggaucagcaauugccucaggcauagcaguaugcaaaguccuacaccuagaaggagaagucaacaaaauaaaaaacgcucuccucucaaccaauaaagcaguaguaucccucucaaacggaguaucaguacuaacauucaaaguacuagaccucaaaaauuauauagacaagcaacuacucccaauauuaaauaaacaauccugcucaauacccaauccagaaacagucauggaauuucaacaaaaaaacaaccgacucuuagaaauaacaagagaauuuucagucaaugccggcgucacaaccccaguaucaacauacaugcuaacaaacucagaacuacuaucacuaaucaacgauaugcccauaaccaacgaccaaaaaaaacuaaugucaaacaauguacaaauuguaagacaacagucuuauucaauaaugugcauaauaaaagaagaagucuuagcauauguaguacaacuaccacuauacggaguaauagacacaccauguuggaaauuacacacauccccacuauguaccaccaacacaaaagaaggaucuaacauaugccuaaccagaacagaccgaggcugguauugcgacaaugcaggaucaguauccuucuuuccacaagcagaaacaugcaaagucugcucuaacagaguauucugcgauacuaugaacucacuuaccuuaccaucagaaguaaaucuauguaauaucgacauauucaaucccaaauaugauugcaaaauaaugaccucaaaaacagauguaucaucaucagucauaacaucacuaggagcaauagucagcugcuaugggaaaacaaaaugcacagcuuccaacaaaaacaaaggaaucauaaaaacauucucaaaugguugugacuacguauccaacaaaggaguagauacaguaucuguaggcaacacauuauacuauguaaauaaacaagaaggacaaagccuauacgucaaaggagaacccaucauaaauuucuaugacccauuaguuuucccaucugacgaauuugacgcuuccaucucccaaguaaaugaaaaaaucaaccaaagccucgcauucauucgcaaaucugacgaauuacuccacaacguaaacguaggaaaauccacaacaaacauuaugaucaccaccauaauaaucguaauaauagucauauuacuacuccucauagcaguaggacuauuccuauacuguaaagcuagauaaggacuagugaagggaacacccaaauuuaauucagccuuaagcacaauuaauuaagagugaaacguaauuguacaagcaguuggucacccaccauagggcaugaucaacaccgcaaccuuuccuuuuucccccagugauucugaaaaaccccucuucccuucagcuugcuuagauguuccaaauuuaguaagcuuaaggcggccuacagaagaaaaagaaaaaaaaggccacaaaaguucccucucacuuucaguaaauaaaauaaaagcagcaacagaaauaaagaaauaaaugaaauucaaaaugaaauaaauauuguguugugcagcauuaaaaaaucaauaaaaauuaaaaaugagcaagaucuaaaaaaaaaaaaaaaaaaaaaaaaaaaaaaaaaaaaaaaaaaaaaaaaaaaaaaaaaaaaaaaaugcaucccccccccccccccccccccccccccccccaaaggcucuuuucagagccaccagaauu

SEQ ID NO: 18247 - RNA, 2117 nt, Artificial Sequence
  mRNA product Design f-4 comprising derived and/or modified sequence from HRSV(Memphis-37)__AIY60640.1__F-del_DSCav1_mut6 (opt11)
gggagagucccgcagucggcguccagcggcucugcuuguucgugugugugucguugcaggccuuauucaagcuuaccauggaauuaccaauccucaaaacuaacgccaucaccaccauccucgcugccgucacccucugcuucgccuccagccaaaacaucacagaagaguucuaccaaagcacaugcuccgcugucuccaaaggcuaccuuggcgcccuccgcaccggcugguacaccucaguaauuaccauugaacuaagcaacaucaaagaaaauaaaugcaacggcaccgacgccaaaguuaaacucauaaaacaggaacucgacaaauacaaaaacgccguaacagaccuccaaaugcucaugugcuccacccccgccgccggcucaggcuccgccaucgcaagcggaauagcaguuugcaaaguccuccaccuagaaggcgaggucaacaagauuaaaaacgcacuucucucaaccaacaaggccgucguaucacucucaaacggcgucuccguccucaccuucaaaguucuggaccucaaaaacuacaucgauaaacaacuacucccaauacuuaacaaacaaucaugcuccaucccaaaccccgaaaccgucauggaguuccaacagaaaaacaaccgccuacuggaaaucacacgcgaguucagcguaaacgcuggcgucacuacacccgucuccaccuacaugcucaccaauucugaacuccuaucacucauaaacgacaugcccauuaccaacgaccaaaagaaacuaaugucaaacaacguccaaaucguaagacaacaaucguauuccaucaugugcauaauuaaagaagaaguucucgccuacgugguccaacuaccccucuacggagucauagacacuccuuguuggaaacuccacaccucuccccucugcacuaccaacacaaaagaaggcuccaacaucugccucacccgaaccgacagaggcugguacugcgacaacgccggcuccgucuccuucuucccccaagccgaaaccugcaaagucugcuccaaccgcguuuucugcgacaccaugaacucccucacacuccccuccgaagucaaccuauguaacauagacauauucaacccaaaauacgacugcaaaaucaugacauccaaaaccgacgugucuuccucggucaucaccucccucggcgccaucgucucaugcuacggcaaaacuaaaugcaccgcauccaacaaaaacaaaggcauaaucaaaacauucuccaacggcugcgacuacguuucuaacaaaggcgucgauaccgucuccgucggaaacacccucuacuacguaaacaagcaagaaggccagucccuauacguaaaaggagaaccaauuaucaacuucuacgacccccuagucuuccccuccgacgaguucgacgccuccauaucccaagucaacgagaaaaucaaccaaucccuagccuucauccgcaaaucagacgaacuccuccacaacgucaacgucggaaaauccacaacuaacaucaugaucaccaccaucauuaucgucaucauaguuauacuccuccuccucauagccgucggccucuuccuauacugcaaagcucgcuaaggacuagugaagggaacacccaaauuuaauucagccuuaagcacaauuaauuaagagugaaacguaauuguacaagcaguuggucacccaccauagggcaugaucaacaccgcaaccuuuccuuuuucccccagugauucugaaaaaccccucuucccuucagcuugcuuagauguuccaaauuuaguaagcuuaaggcggccuacagaagaaaaagaaaaaaaaggccacaaaaguucccucucacuuucaguaaauaaaauaaaagcagcaacagaaauaaagaaauaaaugaaauucaaaaugaaauaaauauuguguugugcagcauuaaaaaaucaauaaaaauuaaaaaugagcaagaucuaaaaaaaaaaaaaaaaaaaaaaaaaaaaaaaaaaaaaaaaaaaaaaaaaaaaaaaaaaaaaaaaugcaucccccccccccccccccccccccccccccccaaaggcucuuuucagagccaccagaauu

SEQ ID NO: 18248 - RNA, 1893 nt, Artificial Sequence
  mRNA product Design f-5 comprising derived and/or modified sequence from HRSV(Memphis-37)__AIY60640.1__F-del_DSCav1_mut6 (opt1)
gggagacuuucccauucuguagcagaauuugguguugccuguggucuuggucccgcggagaagcuuaccauggagcugcccauccucaagaccaacgccaucaccacgauccuggccgcggugacccugugcuucgccagcucccagaacaucaccgaggaguucuaccagagcacgugcuccgccgucagcaagggcuaccucggcgcccugcgcaccgggugguacaccagcgugaucaccaucgagcuguccaacaucaaggagaacaagugcaacggcaccgacgccaaggugaagcucaucaagcaggagcuggacaaguacaagaacgcggucacggaccugcagaugcugaugugcagcaccccggccgccggcuccgggagcgcgaucgccuccggcaucgccgucugcaaggugcugcaccucgagggcgaggugaacaagaucaagaacgcccugcuguccaccaacaaggccgucgugagccucuccaacggggugagcguccugaccuucaaggugcuggaccucaagaacuacaucgacaagcagcugcugcccauccugaacaagcagagcugcuccauccccaaccccgagaccgucauggaguuccagcagaagaacaaccgccuccuggagaucacgcgggaguucagcgugaacgcgggcgugaccacccccgucuccaccuacaugcugacgaacagcgagcuccugucccugaucaacgacaugccgaucaccaacgaccagaagaagcucaugagcaacaacgugcagaucgugcgccagcaguccuacagcaucaugugcaucaucaaggaggagguccuggccuacguggugcagcugccccucuacggggucaucgacacccccugcuggaagcugcacaccagcccccugugcacgaccaacaccaaggagggcuccaacaucugccucacccggacggaccgcgggugguacugcgacaacgccggcagcguguccuucuucccgcaggccgagaccugcaaggucugcagcaaccggguguucugcgacaccaugaacucccugacccugcccagcgaggugaaccucugcaacaucgacaucuucaaccccaaguacgacugcaagaucaugacguccaagaccgacgucagcuccagcgugaucaccucccugggcgccaucgugagcugcuacgggaagaccaagugcacggcgagcaacaagaacaagggcaucaucaagaccuucuccaacgggugcgacuacgucagcaacaagggcguggacaccguguccgucggcaacacccuguacuacgugaacaagcaggagggccagagccucuacgugaagggggagcccaucaucaacuucuacgacccgcuggucuuccccuccgacgaguucgacgccagcaucucccaggugaacgagaagaucaaccagagccuggccuucauccggaaguccgacgagcuccugcacaacgugaacgucggcaagagcaccacgaacaucaugaucaccaccaucaucaucgugaucaucgugauccugcugcuccugaucgccgucgggcuguuccucuacugcaaggcccgcugaggacuaguacuggcugcaucucccuuuccucuguccuccauccuucucccaggauggugaagggggaccugguacccagugauccccaccccaggauccuaaaucaugacuuaccugcuaauaaaaacucauuggaaaagugagaagaucuaaaaaaaaaaaaaaaaaaaaaaaaaaaaaaaaaaaaaaaaaaaaaaaaaaaaaaaaaaaaaaaaugcaucccccccccccccccccccccccccccccccaaaggcucuuuucagagccaccagaauu

SEQ ID NO: 18249 - RNA, 1893 nt, Artificial Sequence
  mRNA product Design f-5 comprising derived and/or modified sequence from HRSV(Memphis-37)__AIY60640.1__F-del_DSCav1_mut6 (opt1)
gggagacuuucccauucuguagcagaauuugguguugccuguggucuuggucccgcggagaagcuuaccauggagcugcccauccucaagaccaacgccaucaccacgauccuggccgcggugacccugugcuucgccagcucccagaacaucaccgaggaguucuaccagagcacgugcuccgccgucagcaagggcuaccucggggcccugcgcaccggcugguacaccuccgugaucaccaucgagcugagcaacaucaaggagaacaagugcaacgggaccgacgccaaggugaagcucaucaagcaggagcuggacaaguacaagaacgcggucacggaccugcagaugcucaugugcuccaccccggccgccggcagcggguccgccaucgcgagcggcaucgccgugugcaaggugcugcaccuggagggcgaggucaacaagaucaagaacgcccuccuguccaccaacaaggccguggugagccuguccaacggggucagcgugcucaccuucaaggugcuggaccugaagaacuacaucgacaagcagcuccugcccauccugaacaagcaguccugcagcauccccaaccccgagacggucauggaguuccagcagaagaacaaccggcuccuggagaucacccgcgaguucuccgugaacgccggcgugaccaccccggucagcacguacaugcugaccaacuccgagcuccugagccugaucaacgacaugcccaucaccaacgaccagaagaagcucaugagcaacaacgugcagaucgugcggcagcaguccuacagcaucaugugcaucaucaaggaggagguccuggcguacguggugcagcugccccucuacggggucaucgacacccccugcuggaagcugcacacguccccgcugugcaccaccaacaccaaggagggcagcaacaucugccucacgcgcaccgaccgggggugguacugcgacaacgccggcuccgugagcuucuucccccaggccgagaccugcaaggugugcuccaaccgcgucuucugcgacaccaugaacagccugacgcugcccuccgaggugaaccucugcaacaucgacaucuucaaccccaaguacgacugcaagaucaugaccagcaagaccgacgucuccagcuccgugaucaccagccugggcgccaucguguccugcuacgggaagacgaagugcaccgccagcaacaagaacaagggcaucaucaagaccuucuccaacgggugcgacuacgucagcaacaagggcguggacaccguguccgucggcaacacgcuguacuacgugaacaagcaggaggggcagagccucuacgugaagggcgagccgaucaucaacuucuacgacccccuggucuuccccagcgacgaguucgacgcguccaucagccaggugaacgagaagaucaaccagucccuggccuucauccgcaagagcgacgagcuccugcacaacgugaacgucgggaaguccaccaccaacaucaugaucaccaccaucaucaucgugaucaucgugauccugcuccugcugaucgccgucggccucuuccuguacugcaaggcccggugaggacuaguacuggcugcaucucccuuuccucuguccuccauccuucucccaggauggugaagggggaccugguacccagugauccccaccccaggauccuaaaucaugacuuaccugcuaauaaaaacucauuggaaaagugagaagaucuaaaaaaaaaaaaaaaaaaaaaaaaaaaaaaaaaaaaaaaaaaaaaaaaaaaaaaaaaaaaaaaaugcaucccccccccccccccccccccccccccccccaaaggcucuuuucagagccaccagaauu

SEQ ID NO: 18250 - RNA, 1893 nt, Artificial Sequence
  mRNA product Design f-5 comprising derived and/or modified sequence from HRSV(Memphis-37)__AIY60640.1__F-del_DSCav1_mut6 (opt2)
gggagacuuucccauucuguagcagaauuugguguugccuguggucuuggucccgcggagaagcuuaccauggagcuccccauccucaagaccaacgccaucaccaccauccucgccgccgucacccucugcuucgccuccucccagaacaucaccgaggaguucuaccaguccaccugcuccgccgucuccaagggcuaccucggcgcccuccgcaccggcugguacaccuccgucaucaccaucgagcucuccaacaucaaggagaacaagugcaacggcaccgacgccaaggucaagcucaucaagcaggagcucgacaaguacaagaacgccgucaccgaccuccagaugcucaugugcuccacccccgccgccggcuccggcuccgccaucgccuccggcaucgccgucugcaagguccuccaccucgagggcgaggucaacaagaucaagaacgcccuccucuccaccaacaaggccgucgucucccucuccaacggcgucuccguccucaccuucaagguccucgaccucaagaacuacaucgacaagcagcuccuccccauccucaacaagcaguccugcuccauccccaaccccgagaccgucauggaguuccagcagaagaacaaccgccuccucgagaucacccgcgaguucuccgucaacgccggcgucaccacccccgucuccaccuacaugcucaccaacuccgagcuccucucccucaucaacgacaugcccaucaccaacgaccagaagaagcucauguccaacaacguccagaucguccgccagcaguccuacuccaucaugugcaucaucaaggaggagguccucgccuacgucguccagcucccccucuacggcgucaucgacacccccugcuggaagcuccacaccuccccccucugcaccaccaacaccaaggagggcuccaacaucugccucacccgcaccgaccgcggcugguacugcgacaacgccggcuccgucuccuucuucccccaggccgagaccugcaaggucugcuccaaccgcgucuucugcgacaccaugaacucccucacccuccccuccgaggucaaccucugcaacaucgacaucuucaaccccaaguacgacugcaagaucaugaccuccaagaccgacgucuccuccuccgucaucaccucccucggcgccaucgucuccugcuacggcaagaccaagugcaccgccuccaacaagaacaagggcaucaucaagaccuucuccaacggcugcgacuacgucuccaacaagggcgucgacaccgucuccgucggcaacacccucuacuacgucaacaagcaggagggccagucccucuacgucaagggcgagcccaucaucaacuucuacgacccccucgucuuccccuccgacgaguucgacgccuccaucucccaggucaacgagaagaucaaccagucccucgccuucauccgcaaguccgacgagcuccuccacaacgucaacgucggcaaguccaccaccaacaucaugaucaccaccaucaucaucgucaucaucgucauccuccuccuccucaucgccgucggccucuuccucuacugcaaggcccgcugaggacuaguacuggcugcaucucccuuuccucuguccuccauccuucucccaggauggugaagggggaccugguacccagugauccccaccccaggauccuaaaucaugacuuaccugcuaauaaaaacucauuggaaaagugagaagaucuaaaaaaaaaaaaaaaaaaaaaaaaaaaaaaaaaaaaaaaaaaaaaaaaaaaaaaaaaaaaaaaaugcaucccccccccccccccccccccccccccccccaaaggcucuuuucagagccaccagaauu

SEQ ID NO: 18251 - RNA, 1893 nt, Artificial Sequence
  mRNA product Design f-5 comprising derived and/or modified sequence from HRSV(Memphis-37)__AIY60640.1__F-del_DSCav1_mut6 (opt3)
gggagacuuucccauucuguagcagaauuugguguugccuguggucuuggucccgcggagaagcuuaccauggagcugcccauccucaagaccaacgccauuacaacuauacuugcugcagugacgcugugcuucgccagcucccagaauaucaccgaagaguuuuaccaaucuacauguucagcggucaguaaaggcuauuugggggcuuuaagaacuggaugguacaccagcguuauuacaaucgaacuguccaacauuaaggagaauaaaugcaacgguaccgacgccaaggugaaacuaaucaagcaggaacucgauaaguauaaaaaugcaguaacugaccugcagaugcuuauguguucuacuccugccgcuggcucggggucagcaauagccagcggaaucgcugugugcaagguccugcacuuggagggcgaggugaacaaaauuaagaaugcccuccugaguaccaacaaagcgguugugucccugucuaauggugucagcgugcucacguucaagguauuagaucugaagaacuacaucgacaaacagcuuuugccaauucugaauaagcaauccuguucaaucccgaaccccgaaacuguuauggaguuucagcagaaaaauaacaggcuacucgaaauaacccgggaguucagugugaaugcaggggucacaacuccugugagcaccuauaugcugacaaacucugagcuucuguccuugauuaacgauaugccaaucaccaaugaccagaagaaacucaugucaaacaaugugcaaauuguccgccagcagagcuacaguaucaugugcaucauuaaggaagagguucuggccuaugugguacaguuaccccuguacggagugauagauacgccuuguuggaaacuccauacuucuccacuuugcacaaccaacacuaaggaaggcuccaauaucugucugacacgaaccgaccguggcugguacugcgauaacgcugggagcgucucguuuuucccccaagccgagacguguaaggugugcucuaauagaguuuucugcgacaccaugaacuccuugacacuaccuucagaagugaaucuguguaacauugauaucuucaauccaaaauaugacugcaagauaaugacaaguaaaaccgaugucagcuccucugugauuacaagccucggagcaaucguaucauguuacgguaagacuaaaugcaccgcuaguaacaagaauaagggcaucauuaaaacauuuuccaacgggugugacuauguuagcaauaagggaguggacaccgucucugugggcaacacucuguacuaugucaacaaacaggagggucagucacuuuacgugaagggggagccgaucauuaauuucuaugauccccugguuuuuccuagugacgaauuugaugccagcauaucccaagugaacgagaaaaucaaucagucuuuggcguuuauuaggaagucggacgaacuccugcacaacguaaaugucggaaagagcacgacaaacaucaugaucaccacuauuauaaucgugauuaucguuauuuuacugcuacucaucgccgugggccuguuccuuuacugcaaagcacggugaggacuaguacuggcugcaucucccuuuccucuguccuccauccuucucccaggauggugaagggggaccugguacccagugauccccaccccaggauccuaaaucaugacuuaccugcuaauaaaaacucauuggaaaagugagaagaucuaaaaaaaaaaaaaaaaaaaaaaaaaaaaaaaaaaaaaaaaaaaaaaaaaaaaaaaaaaaaaaaaugcaucccccccccccccccccccccccccccccccaaaggcucuuuucagagccaccagaauu

SEQ ID NO: 18252 - RNA, 1893 nt, Artificial Sequence
  mRNA product Design f-5 comprising derived and/or modified sequence from HRSV(Memphis-37)__AIY60640.1__F-del_DSCav1_mut6 (opt4)
gggagacuuucccauucuguagcagaauuugguguugccuguggucuuggucccgcggagaagcuuaccauggagcugcccauccugaagaccaacgccaucaccaccauccuggccgccgugacccugugcuucgccagcagccagaacaucaccgaggaguucuaccagagcaccugcagcgccgugagcaagggcuaccugggcgcccugagaaccggcugguacaccagcgugaucaccaucgagcugagcaacaucaaggagaacaagugcaacggcaccgacgccaaggugaagcugaucaagcaggagcuggacaaguacaagaacgccgugaccgaccugcagaugcugaugugcagcacccccgccgccggcagcggcagcgccaucgccagcggcaucgccgugugcaaggugcugcaccuggagggcgaggugaacaagaucaagaacgcccugcugagcaccaacaaggccguggugagccugagcaacggcgugagcgugcugaccuucaaggugcuggaccugaagaacuacaucgacaagcagcugcugcccauccugaacaagcagagcugcagcauccccaaccccgagaccgugauggaguuccagcagaagaacaacagacugcuggagaucaccagagaguucagcgugaacgccggcgugaccacccccgugagcaccuacaugcugaccaacagcgagcugcugagccugaucaacgacaugcccaucaccaacgaccagaagaagcugaugagcaacaacgugcagaucgugagacagcagagcuacagcaucaugugcaucaucaaggaggaggugcuggccuacguggugcagcugccccuguacggcgugaucgacacccccugcuggaagcugcacaccagcccccugugcaccaccaacaccaaggagggcagcaacaucugccugaccagaaccgacagaggcugguacugcgacaacgccggcagcgugagcuucuucccccaggccgagaccugcaaggugugcagcaacagaguguucugcgacaccaugaacagccugacccugcccagcgaggugaaccugugcaacaucgacaucuucaaccccaaguacgacugcaagaucaugaccagcaagaccgacgugagcagcagcgugaucaccagccugggcgccaucgugagcugcuacggcaagaccaagugcaccgccagcaacaagaacaagggcaucaucaagaccuucagcaacggcugcgacuacgugagcaacaagggcguggacaccgugagcgugggcaacacccuguacuacgugaacaagcaggagggccagagccuguacgugaagggcgagcccaucaucaacuucuacgacccccugguguuccccagcgacgaguucgacgccagcaucagccaggugaacgagaagaucaaccagagccuggccuucaucagaaagagcgacgagcugcugcacaacgugaacgugggcaagagcaccaccaacaucaugaucaccaccaucaucaucgugaucaucgugauccugcugcugcugaucgccgugggccuguuccuguacugcaaggccagaugaggacuaguacuggcugcaucucccuuuccucuguccuccauccuucucccaggauggugaagggggaccugguacccagugauccccaccccaggauccuaaaucaugacuuaccugcuaauaaaaacucauuggaaaagugagaagaucuaaaaaaaaaaaaaaaaaaaaaaaaaaaaaaaaaaaaaaaaaaaaaaaaaaaaaaaaaaaaaaaaugcaucccccccccccccccccccccccccccccccaaaggcucuuuucagagccaccagaauu
